United States Patent Application Publication US 2022/0290142 A1 - sequence listing, part 21

SEQ ID NO: 15631 - DNA, 80054 bp, Homo sapiens
gttgccaggggtaacgcaggtagccaaagtggcttgtggagtggcgaccgttagtgaggcggttgctgagacagacgctgaggcgggtaggaggagcccgagccgtaagggaagccgtgatgagggccgtgttgacgtggagagataaagccgagcactggtgaggagcggggcggttcgcgaagagcaggaggtcgagtcctcgcggggagtgcgcgagccgctgcagcgtgtttgaggggggcagcgggcttgctgcctgggccgagggcactgaaccccggcctgggagactgcagggtcgccctcccgccccttggcggttggagaaactcccgagggttggagagcggcaaagggaggtgccgcgcctgaggtggtggcgggtggaggcggctcttccctcacggtctggccctgtcgctgccttggattcatctcacacccacgagacagcacgaagctgctcaagcttcacagttcttgccacatccacatagtacccatactcttgttttcttgacgtttttctctaaattgtctcatttattttaattatgatttcacattttacaaggaaactttattactccatttatgaaaaccagtgtcacttgctctaaatgttaagataaaatcagcgtcgcttgctctaagtgtaaaagtaaaacttaaagtagggagaaacaaaactgaacaagctgtagctagctattgttgctagggagcctttaaacctgagatctcgtttctctaaaactggagatgggcaggtatgatcagaaaggtgctcaaaatgagcaccaaacacaagctctcctaattgggaagtctgaaaaagaactgaaggggaatgactttgtcaccttttgattcagttatttaatgtcctattccattgttatcgcctaaatctataacatagcagtctgttttgtcatattcttacttatgggataggtcttggcctgactttgaaaatcattcagcattgttgtgaagcctctgttctggccactggagcaggttacttgtctttggttctgtcccttctgagatctttctctgtgtaaagcatgccgtctctcctcatctcacacggaaatcctgaacatccttcaaggctcacgttggagacgggtcctctcttttgtgttcggcactagtggtagctgacactatgtgccaggtgctggctaagcacttcatatcctttatctcgttgtgtcttcaccactctctaaggtaggtactataatttcctctattttatgtatgaggaaactgaagcccagagagggtggataatttgccagcgtcacacagtgaggggtggaaccagctttcaagctcaggtcttcctcactccaacgtcaacgctctcagccactacattaatttttccttatgttacagacgtggcaaactcaaatgtctgcaggagacaggcaggtaacataaatgggagatgtttatttgcatcttcaacactaggaattgtatgttttccctaggaatagtcttgtattctgtaccccatttttcttgaaacacagccgtatcagtgaatctttcatttgtacttttaatagagatttgagttttaaaaaatcattttacttttaactttattataaacgtacctatagcacaagctgatgatagctggcaactgaacatttggcttcaatgtcagagtaatagagtgtggcaaactgcagagctcatgctcggcctaaaaggggcagctgctgctcagctcctgccaattaccaccatgcaggaatttggcctagtgtgctcagctcttcctgtttttaccagaagctaggaatctgggtttttatgtgaaatggcctaatttttaaatgttagcatccactctgaaaaaaaaacaaaacaccgtgtgggccaaataaaacatttgctggccgaatgcagcctgatttgctctgttttcaacccctggcacagaattttgttcatttctctcttgtggtacttccagagtctgttgagcataagagttaattttttaaatctgtttaattcagaagtctaataaacccgttaaaggcaatggctatgtcttactcgtttccaaattattctagagacaggtcagtggttgttgttactatggatagtaataaaatactagatatatataaaacgaaatactgtgggtagatgtattcatacgtgaatgaatgatgaataaagattggttttctggtttttggcccattacagatttgagacaacctattaggataagggatgtaggggttctatagaccatcaatcctgatggctgctagatataccagctgatagcccagaatgaaaacaaaacaaaaaactaaacaaaaaaaaaaaagacagtagaactaaaaaaatcctagatgtcaaagattagtcctccacatccaaatcagccattgtctcccggtctgctcctttgcttctattttaaccttcacatagcagcaggaactctgtttttttaagacctgctgctgtgatcctgttactctacttctcataaacctagagtgattcccaattactttccatgtcaagtcgtgcattttgctagagggtcctcctgaccctcctccccatcaggcttgcaacatttaaatttatacttttaggttgagctgaaaactctatttttctacccgaagatccttcccaaatgctcccttattctatgaactccctagttttctcctttaaatgcacagctccaggttcatctcaaccaggatgtcttattaggctagcccactgtattccaatcaggctagcatctgctgtaactctccattcatgccagctagtatttactgagtacttgctataggccacatgtccacatgtctttataggtgttatcatgtttaatctctacaacatgtgaggttggaattttcatctcatttaaagatgaagaaattgagatttaatgaggtgacataagttacctaagattacaaaatgagtaagtggggctgggtcagatgatgcaggaattggagaggcactgtgggacattggtttacagtgaggtgggtgcagggttgtcagaggacaatttgcaggattcctctgtatctctgcaatggaatctgacagtgtgtcttctgacagtgtatctcttttataaaaagaggcaggtggagagagaaccatcctacagtagaatagactgcctgcaaatgagtgagctcccagccctggagtgttcaagcaggggctagatggccatctataaggaattcttgccctgatgggccagatggactgcatgacaaggtctagagtcctttccaattctgagtttctggtgatttcataattatatttattacatgtctaggacagtgccatgcactgtgggtccacaaatatgtagaacatggccattgctttcaaattgtgtatgactataattaaaggggcaaggcaagataatatctaacacaatgtaaagaagactgtataagtcagagctaaactgaaatgtacagattctaagtacattaagagtttagattggggcaaatcagacatatatgatatattttaggaaggcaaatttcaagatattcagagaaaatgaatttttatatctaagaggaagaatgttcaggcttggctcaaatgagacattcagaaatgattttgtgataattcaacccaaaatgacccttatgaagaagaggtcacacaggaatcactttgatgagctcatatgtgtacaaggcagaaaggaagccacataccaaggatgactttagatgagaggtgcagacactgctccaacatctaataatccaccatagcaatccacaagtgtcaggcgctttggatagactggcttgtgcaccccgtgagtaggaggctacctctctatccttgttttgtaggtgagaatgaaagctcagataggagatcagcttttctggccccacgtcccccctactttttattccgccatgctgcttctcaaaatgtgaaatgtgccaaggctcagaggaagaaagcgtaagaaacaaggaaggcccaggtctgttaccacataatggtgaggaagctgaaaaactcagggcttcagtttgcccagctggaaagagtgtgataatcatccttgttccagcttctttatcagccagctctgtgactaggagcaaacaacttgcctctctgtactttagtttcctcattggtaaaatcggggcagtggtgcctgtcctgtctactacattatgttttcgtaaggatcaaataagataatgtaagtttacactcttttttttttttgagacagagtctcgctctgttgccaggctggagtgcagtggcgcaatctcggctcactgcaagctccgcctcccaggttcaagccattctcctgcctcagcctcccgagtaggtgggactacaggtgtgcaccaccacgcccagctaatttctgtatttttagtagagatacagtttcaccatgttggccaggatggtctccatctcttgacctcgtgatctgcctgcctcggcctcccaaaatgctaagattataggcgtgagccaccatgtctggccaagtttacactctttaacaattcttaaatattgaataactgtgaagagtttttattaaaggaagcgtcaggtcaacagagccatattaaaagctttctgaattcttcatgtaatgccttaagtaggtaataatacctttttttgacatatgccaacaatgataatggcagccacatagcataatggttaaaacatgggcttcaggccagattgcctgggtttgaggccggatgcagtggctcacacttaaaatcccagcactttgggaggctgaggcagatggatcacttgaggtcaggagttcgagaccagcctggccaacatggtaaaaccctgtctttaccaaaaatacaaaaatgacctgggtgtggtggcaggcacctgtcatcccagctactcaggaggctaaggcaggagaatcgattgaaactgggaggcagaggttgctgtgagccaagatcctgctactgcactccagcctgggtgacagagcaagactccacctcaaaaaaaacaaaaacaaaaacaaaaaaacagattgccttggtttgaatcctggctccatttccattcagtagcactttattttcaggcaagttatttaacttctctgtaccatagttttctcatctgtgaaacaggtatacagttgttttgaggttaacatgagttaatacatgtaaagcatttaagctgtacctggcatacacaataataaatgtgttcaataaatgttagtcactgttattaaagtatgaaggataacagatttgacatacttggcagtaattcaagggagcagaaggcagcatagcgcgttaattacaagcacagactctagagtcagacctgagttgaaatcctggcccttgcacttgctagttgtgtgacatcaggcaaactacttgacctctctgagccatggtatcctcatctacaaaacagagtaataattcctacctcacagaattattgtggagatgaaataaaataatgcattttaagagctcagcaggtgctgtctggaataagagttcgaagtactgtcattgagagtgtacttccaagttactgacaaaagcttgatttttagattactggtataaaccaaaaataaaattcagaggccccccaaccatctgaatggatttccttctcaaccagggctcttttaaaatttaacctgagagactgtttcaggccatgatgggaaatgggggtcaaacatgcctcagtatacctctctggcattaacatcaacacagactttaagtatgataagaaacattttacaaactctcctctctaaagcctagtacctcaaggcttcctctgcaaacagtaacttgggttgccacaatcctttatcttaacccaggcattcctttctgttgaacctaggttttttgttttttttttttctgagacagagtctcactctgtcgcccaggctggagtgtagtggcgcgatctcagctcactgcaagctccaccttccgggttcacgccattctcctgcctcatcctcccgtgtagctgggactataggtgcccgccatcatgcttggctaattttttgtagagacggggtttcaccgtgttagccaggatggtctcagtctcctgacctcatgatccacccacctcggcctcccaaagtgctgggattacaggcatgagccaccgcgcccggccgaccctaggtccttagataagctcaaccaattgtcagaaaaattttaaatcaacctataagctagaagccccctgcttcaagttgttccatctttctggaccaaaccaatgcatttcttaaatgtatttgattgaagtctcatgtttcactaaaatgtgtcaaaccgagctgcaccctgaccaccttgggcacatgttctcaggaccacctgagggctgtgtcatgggctgtggtcactcatatttggctcagaataaatctcttcagatattttacagagtttgattttttgttgacactggcaagtttatcccatgctaaacttttactatgggttgggttttgtttttttgttgttgttgtttgttttttgtgtgttttgttttgagtaacttcagtagtaaccttaacaatagtctgttttgacaggtttttgacacattcttactatagtcacctgaaccaatgaaatcctctgcctggggcatttgaaaaatctttgtaatatggctctagcccatttttctagcctcatttctccatgttctagcaacatcttgcacatagccagatgtttcagtcaaattaaattattttgattacttgtgttggcaagaagagtcaaactgcaaaatattttaagagatttattctgagcctaatatgagtgaccacagccagtgacacagccctcaggaggtccacagaacatgtgcccacggtggttggggtgcagtttggggaggcatgagacatcaatcagatacatttaagaaatacattggtttgatccagaaaggcaggacaactcaaagtgagggcttccaggctataggtaaatttaaacattttctggctgacaattggctgagtttgtttaaagacctgggatcaacagaaaggaatgtctgggttaagataaaggattgtggagacccatgttcttatttgcagaggaagccttcgggtactaggcttcagaaagaataggttgtaaaatgtttcttctcaccctgcaaaacagagtcttgctgtcacccaggctggagtgcagtggtgcaatctcggctcactgcaacctctgtctcccgggttcaagcaattctcctgcctcagcctccctagtagctgggattacaggcgcccgccaccacacctggctaatttttgtatttttagttgagacagggtttcaccatgttggtcaggctggcctcaaactcctgacctcgtgatccgcccgcctcggcctcccaaaacgctgggattacaggcatgagcaccgcacccagcctaaaatgtttatcatacttaaagtctgtgttgatattaatgccggagaggtacaatgaggcatgtcagaggcccacttcccgtcatggcctgaaacagtctctcaggttaaattttaaaagagccctggttgaggaggaagtccattcagacggttgggggggcttacaattttatttttgttttacacttgttatttctcactttcatgtctttgcttgttttattttctttgcctgaaatgtcctttacccagtgtcctcctccatgtttcaaaagccctacctttttcaaatatcttcttcattaatctttttctgatcctctccttgaattaaaatgctgttgaagcggcgtcattgtctggggtaaatatccgagatttgttgtctcaacagcaatggaaaactaggatacggacacaccagagtgaggttacgagtagaagtttaacaggcgaaagaaagagaagagctcactgcagctgacagcgttctcgaaaaaatgagttgccacctctgtggtgaaatgcaggttttatagataagcttgaggaggtggtgtctgatttacatagggcacaaaagattgattggattggtgtttcatttgcataactttcgaaaaactggttagggctaggtgtgtcatttgcattgggtgcgaaaagctggccacccccaccctaatcttttattatgcagttgggttatttacgtggccagcgccatgttgcccgtttctttactgtacacgtggtgacaaattaaagggaggacagaacctccatgttgaacatacttggcccccaggtagcctttttctattggcacagctgccggcattcaccagtgcaagcttccagcttgcctttttatttatttatttattttttttttttgagacggagtcttcctccgtcgcccagactggagtgcagtggcatgatcttggctcactgcaacctctgcctcccaggttctagtgattctcctgcctcagcctctcgagtagctgggattacaggcgctcaccacccaccaccatgcccagctaatttttgtatttttggtagagacaaggtttcactatgttggccaggctggtctcgaactcctgacctcaagtcttcctcctgccttggcctcccagagtgctgggattacaggcatgagccgctgcgccaggcctcagcttgcctatctatgtttgcagctcgatttttcaggctgctctttgttagaaaaaaataatttcttgggctgctttttattaaaagggaagttctgccgaagactcttttaccttcactatctggctaaataatttctttctagctcctgtatcactgcgtcttcctccttcgaatcctgttttcatgtgtctcttaaagcctttatcagagtactgttctgtatttcatccaatctaataggtcattgattataaaataccattgttttgtgtatcaataagaaagcaaaaaatgctgccagttacactgaaacatcatcaattataagacacaaccttagaggtgagaaaatgtgaaaaaaaaatgtaagctttagaattgatgacatatggtagttctttgtgaaagtgtctgtttcacaccttctcactggatagtaatttccctgaggggagggagggattatgatctgttcatatctgttggtgcctggcacctaagagggactcagtaagtatctgtggatttactggcccttaacacattctctcatgttgtctagcctttatgatattattagaagagttaataccctcaacagttgaccctttgaataatttcttgtgtctggcttctggacaagaggaaatcaggacaaagagctaactactgagtggatcatgattgaatgggctgctgtggtgtggcggttgaatggaatttgcaacaaatgcaattcgtagttattctttttctcctcagtacacacacagtgtttcttaatggcaataaagtttactttcctggccattagcagacttcatcattttggttcctaattgtctttttcccttgtcttctgttcagtataaatgacatcgcatttaagcctgatggaactcaactgattttggctgccggaagcagattactggtaggattttgtcttagtttcctcttaaagtgcttccctaacctccctcttgtgagtactctgaaatttgaccctttttttttttttttgagattaaaaaggcaagggtggaaaaaccttccctattactttttaatagggatggaaatgggctatttaaaacgggcaagtaaactatcagataagaacctgtgaacaataccacctttggggtcattcatctttccctttttactttgagacacccatgaaagagttgaaaacaatcacaatgcctttgaaactggactggtgtcagtttacattttgtcccccagaaaaattcaagcaacaggactgacggtgctgtgtccatgaaaagtcagatagcctgaccccaacttttaggcattggcctatctaaacagttccatatggatgttgtcctatttttcatattttcaaataacataagctccctctggaacctatccaggtatataaaagtaattttcagagaaccccttatgtttgaccaaaaaacctttgtatgatctctctttctgtctaagtctacttcctcttctctgttgtctctagatacgcagactgattaatctccattctttgtatggttaactacataatcttaaaacatggttaaattgttctgcagacttctctccagtgtaaacaatccaaactctattagtttttctacataggttatcttttccaatactctaaccatttcagaaagtttccgcttgatttctcagatggtgtgtgtgtgtgtgttttttttttttttttttttttttggagacagagtctggctctgtcgcccaggctggagtgcagtgacgcgatctcggcttactgcaagctccacctcccgggttcacaccattctcctgcctcagcctcctgagtagctgggactacaggcgcctgccgctacgctcagctaattttttgtatttttagtagagacggggtttctccgtgttagccaggatggtctcgatctcctgacctcgtaatccacccacctcggcctcccaaagtgctgggattacagaggtgagccaccgcgcccggccagatggtgtgtttttaaactctccacatagtgatagatgtcacatggctatcaaatacctaaatccatattacagctgggttttattttatttcttagagacagggttgtgctctgttgcccaagctggtgtgcagtagtgcagtcatagatcactgcagcctcaaactcctgggcttaagggatcttcccacctcagcctcccgagtagctaggactgtggacacacaccacctcgtccacctaatttttatttttttttatttttatttatttttattttttgtagagatggggtttcacttagttgcccaagctggtcttgaactcctggtttcaagcaatcctcccacttcagcctcccagagtgttgggatgacaggagtgagctaccatgcctggcctacagttgggttttataacattccctcctacttgaaagcccagagttctgtgactttcaaattcttggtagcaaatatgaaacatctattatgttgatttagtgcagagctggcattaaaatttaatcatgttgtagctggctctttttatgggctagttttatttaggagggcctgccttgatcaatcatatatccaaattcaggtaaggatgagtataaagaatttccatggagtgagtaattgaacctttggttctcaaggattggtagtatattcctggtcacatagtacatagacctgggtcctctacttcttggttacccaactttaagtcacgttgtttttggttttgcagtgcagtttttattggctacagatttagaatattgacacgtattgttataaaaacaaaaatagcagtagcaaccctgcaggaattctgactaatagatatcacatagataatctgtatttgtctcttttgccaggtttatgacacctctgatggcaccttacttcagcccctcaagggacacaaagacactgtgtactgtgtggcatatgcgaaggatggtaaaaggctgctctgggtttccattctctataatagcctcatcattgttcatttttctctttagtcactttttaattatttctagtaagctggagtacaagttgcaagttcagaagacagtgaagttgctaagacttcagtttggtcattcaatctagcaagtatttattgaggtcatctatgttccaggcactgttcaaggtgcttgagttacttcagagaaaaaaacggtggtccctccccttatggggcttctgttttatggggtggtggtgagaagtgagggaggaagaaagtatgagggaagacatacagtaaacatagtaaaaaggtaaattaagtagtatgctggaaggtgataactgttatggaagaagaaaaagtagagcagaatgagggggattgagagtgctgggcagggcagggggttgggtacagtattgaattagactagtgagggtgggctcattgagatgaggacaggtgaggaaaaagactttgaagtcaggaggcaatgagattgtgccagtgggcatcggggggaagagagctctttgcagaggaagagccattgcagaggccctcaggtgtgggtgtggctgctaggagctggatcaaagagaatcgggaattgtagaggatgaggataaagtggtaacagacatggggtggtcagatcataaagattttgattctcagtcaaaatggaactactgaaaggtcctcagcagaggagggatctgatttgatttgtattttaaaaggatccctctagttgctgagttggaaacaacctgcaagaggtgagggttaggacatctgtgtgaggaagcatcatccagacagggggtgatggtggctcagacctctgtgggggcagaggaggtgatgagaaattatcagactctggatataatgggagggtggagccaactggattgtctgacagattggatatgggctatgaagaaaaaggagtcaagtttttgacctgaggactgaaaggttggagttgccccccccactgagatggaaaagactgcaggtagagaaaagttatggttgaagatcagaaattcagttttatacatgctgaatttgagaaaagttgatgatgtcggagaggggagagaactgctggaacagagttgttgagtaggcaagaggagatgggatctagggcatagacggggtatttgctttagataggggcacagtaggaactgcagaggccagcagatggggacaatgtggtagtaggaatctaatggaaattctcaattccattttttttttcttcagtgaaataggaagcaacagcaactgagagtggcaatggggaagggaggtttcagagagttgaagagaaagggaaaaagtgtaaagtcactgcctcagagaatgggacagcgagtggacccaggaggtgtagtgagatccccggtgacatgaagggccctcttgaagattgtgatcatgaattgaaagtgagattagttggtgtgattgtgtctttttctccagcgattttgagctgcatagttgtagaggcagaagaggtgaatttaaccagaggtggttttgcaagcacatttgaagatgaagtaggagggcaagggagcagaaagtgtatacagataaataattatgtacattaaccttgaattgttggctgaataatgaagggagagaggacagcaatggagaagtagtaggttctggtggtgttgaaggattgttacagttggggtaccaggtgggttgggaaggaagggaagtggtgcatgaaactgagatttaaatttattttaaaataaatccatgttgtcccacagcataggattagtgggaagaaatgggctttggaatgagacagttgtgagttccaaccccaacccaacaccagagttctgtgagtctgagctggttattgagtctgagtcacgatttcttcatgtatcaaatggataacattgagataacattctgtagccactgccaagaagtcacaaaattgtaatgttataattcttgaatgaaccttggagattattccagtcccaggtttttaacttcttttggctgatgggcctctttgataatcagatggaagctttagaccactttctagaaagatgcaaattcttcatgtgtatgcagaatttcatgcatataattttagtctgattagtccagtctcttcactttagtcctgcataaagacataaacaattggccaggcacggtggctcatgcctataatcctactgaaatcctaaagctctgggagcctgagttgggaagattgcttaaggcaggagtttgagaccagcctgggcaacatagtgagactccctaaaatctggcctgggtgacagagctagactctgtctcttaaaaaaaaaaaaaaaagacaagtcatgtgacttgccaaggccatgcagcagattggcccaaagacaaaactaatttcttgcttcatagtcaggtgtgctgtaccatggtagtcatatttgtgtgtgtgtgtgtgtgtgtgtgtgtgtgtgtgtgtgtgtgtgcatgtttgagttcaagttcagaataatgttttagggagacctgtgaggagggagcctggagagctgaactgtttctgtctcatcctagtggctgttgaggaatgtgggtcagtccagggcccagtataaggcccagtaggtacagaagagctattgggcctctggtgcctctggtgtttataagcatagcagggctctttgacctgcaacaccattagggcacttgaggatgtcagagtgtgacccatcagtagtggcatttgcacagcactttgcagagtcctgtcacacacatctcacttgatgcttccaacaactctctgaagcaggcagcaaggggactcttatctccgctcaaagatgagaaaacagacttggagcaattacaggtgatggtggcagaggcaggcctaacccaggttctctgactgcagagtctttgttctttctagtgtatcatgctgcctcttcatgacacctgtataatgattaagaagtcttttagtcctcagaattggttttttcctcttagacctgaagattgagatacactgaattccagctttgctctttaagtctgcttgtttctgatttctcctttaagttcattaagttttttttgtttttttttttgagatgaagtctcgctctgtcgcccaggctggagtgcagtggcgcgatctcggctcatggcaacctctgactccctggttcaagtgattctcctgcctcagcctcctgagtagctgggactacaggcacgcgccaccatgcctagctaatttttgtattttcagtagagacagggtttcaccatgttggtcggcctgatctcaaactcctgacctcgtgatccgcccacctcggcctcccaaagtgctgggattacaggcgtgaaccaccatgcctggcccaagtttaataagtatttaatgagcaaccatgatataaaagtatgtaagacatagtttttttgttcaagaaaaacaatataatatgaagaaataatagaaatagctaatttttttttaattctattccaggcccagttctaagcaacataagggttaggggtgccactgcctgtgcaataaaaaatctgcatgtaatttctgaaccccccaaaactttactattaatagcctactgttgaccagaagccttacctgttacataaacagttaacacatttttaatattatatgtattatatattgtattcttaaaataagctagataaaatgttaattgagaaaaaagaaaaatatatttactcttcattaaatggaagtggatcatcataaaggtcttcatcttcattgtcttcaggttgaataggctgaggaggaggaggaggaggaggaggaggaagagggattggtgatgctgtgccagggagacagaggcaaaagaaaattcacatgtaaaagtggactcatgtagttaaaactcatgttgttcaggggtcaactgtatgtacacatgtacatacactcatttaatcttcacaccaaccatgaggtaaatactaacattgtatccatttttcaaataaggaaatgaaagctcttcagtagcttgtttgggtcatgcagctggtcagtgagatctctaggaattctgacccagagactctgagcccaaagcttatgcttttcatcaccatcacctgctacctaccaggatgagggaggagtgatggaaatagtaagagcagtttctttgtttatttagtatttgcagcaatatcatatggctcaccctaatatctactatttcagctactgtaaaaggtacttggccgggtgtggtggctcatgcttgtgatctcagcactttgggaagccaaggcgggtggatcatgaggtcaggagtttgagacaagcctggccaacacagtgaaacctcgtctgtactaaatatataaaaattagctgggcatggtggtgtgtgcctgtaatcccaactacttgggaggctgaggcaggagaattgcttgaacctgggaggcggagattgcagtgagctgagattatgccactgctctctggcctgggtgacagagctagactccgtctcaaaaagggccagtcgtggtgactcatgcctgtaatcacagcactttggaaggcggatcacctgaggtcaggagtttgagaccagcctgcccaacatggagaaaccccatctctactaaaaatacaaaaaattagccaggtgtggtggtgggcacctgtagtcccagctactcgggaggctgaggcaggataatcgcttgaacccgggagtcggaggttgcggtgagccgagatcgtgccactgcactatagcctgggcaacagagtgagacttagtctcaaaaaaaaggtactttacagatactatcttagttgactcccataaaaagactctgaggaagatactgttcctctgtgtttcagatgaaggcattgaggctcagagaacagtgacttgcccaaggtcaccttccacttgccctgtgaataaagtctaaaagtccttaagatgtacagaatgtggcacatacttacctcttaatcctcgtctctcaccagagtaggtgaagaccccgttatttgctgccatggtaccgtgatcctcttccaaatgcttataaatgtggaacagtgtaattaataacaaattacttgttatatgttgcctctctccagtctgttccttcataaagcccaagtagtatgaaaatgcgaatctgatctatcactctttgcttaaaacctttctttggcttcccattgctttaggataaagagcaaggcctctgctgtgtccctgaggtcccaagagatccttccacaacccacctcacccttccctccgttccatgatgactccgctcattccctcagacatgccaggcttttcctgcttcagggcctttgcacatctgttccatccatgtggatgggtctgtctcctctctacatctggctaagctctgctcatcctttaggtctccactgaaggatctcatccttagagaaatgttccctcatctaaattaggtcccccaggagatgttgaccaaagggtagtttcagtcagacaaaaggagtacatttttgagatctattgcacagcatggtgaccatagttaataatagcgtatatttcaaaactggcacaggaatagtttttttttttttttttttttgagatggagtctcgctctgttgcccaggctggagtgcagtggcgtgatctcggctcactgcaagccccacctcctgggttcactccattttcccacctcagcctccagagtagctgggactacaggcgcccgtcaccaggccggctaattttgtttttgtatttttagtagagacggggtttcaccgtgttggccaggatggtctcgatctcctgacctcgtgatccacccgcctcagccctccaaagtgctgggattacaggtgtgagccactgttcccggccaggaatagattttaaatgttctcactataaaaaaataagtatctgcagtgatggatatgttaattagcttaatcattcttcaatgtgtatgtatataaaataccacattgtacttcataagtagatataattattatttgtcaaaaataaaaatttaagtaaaaaagtaaatcaggttccccagttattctctttcataggatccgtgtcttaccatgttgtatttgtgttagattaatttgatgtgtacttcttacactagactgaactttatgaaagtagggatcatgtgtgttttaatcattacttaatccctagcatagaacatgacagctacatgtagtaggctcccaatacatctttgtttactcagtgtcagacaaagcaggtttggaacccaaatattctgactccaaggtcctgcctcccagtactgataagaactaggaaagaagctaacacttactaggtaccttaaagaactagttttctaaagaattctctctgggaaatgctggtttaagataaatgtaagactttccattttacaaacacttttaggcaagcgctttgcttctggatcagctgacaaaagcgttattatctggacatcaaaactggaaggcattctgaagtacacgtaagtaacttaggtgtacagtattatgagtttgatgcttattgaataattgcagcaaaagcctcttagaaaagatgtaggagaaaacttttttctcttaaattgaacttgaaattaagttgtgggtgtgtgtggttggtataggaaggttgagtagtgaataagttaatgaatatttcttggccacttactggcgtggccagcactgggctaggtgcttttatgtagctcatctcagttcatctgacattgtagactttatcccacccccaacctgtcatcttccagtgtccctgtctcagagaatggccttatatccacccagtgtcaaatgtcagaaacttggggtcagtgtgctccaggcctcctcttactattggggatctgccgtgttcttcccctgttcctctactagttggtccctatttaccctgcagatctcagactcaaatgtcagtttctttgtaaggactttcctgcctctctagactggaacaggtctctttcgaggcatttctcacaattgcagttttaggtttattctggtgactgatcagtattgctcatcggcctgtaagttccataagaacagatactgcatctattttttgttttgttttgttttgttttgagacagagtcttgctctgttgcccaggctggagtgcagtggcacgatctcggctcaccgcaagctccacctcccaggttcacgccattctcctgcctcagcctcccgagtagctgggactataggcgctcaccaccatgccaggctaattttttgtatttttagtagagatggggtttcaccatgttagctaggatggtctcgatctcctgactacatctattttttttttctcactcttgtgtccctgatacaatgcctagcccataattggtactcaccaattttccttccttccttctttccttccttccttccttccttccttccctccctccctcccttcttccttccttccttccctccctccctcccttcttccttccttccttccttccttccttccttccttccttccttccctccctccctcccttcttccttccttccttccttccttccttcctttcttttcagtcttgctctgtctcccaggctacagtgcagtggtaactagctcactgcaactacaaccttccaggctcaaataatcctcttacttcagcttcccaaatagctggaactgcaggtgcacacccccacaccaggccaatttttaaatttttttttttcttggtagagacagggtttcactttgttgcctgtactggtcttgaactcctgggctcaagcagtcctctcaaagtactgggattacagatacgagccactgcacctggcctcttttcaattgtggtaaaatatacatgacataaaatttatcatattaactactttttaagtttacagtttaatgttaaatacatttacattgttgtgcaaccaatctcccaaactcttttatcctgctaaactaaaattctatatccttcaaatacctactcacccttctctcctacccccagcccctgaaaaccagcattctactttctgtctctctgagtttgactgctttacatacctcatataagtagagtcatacaatgtttgttcttttgtggctgagttatttcatttcacgtaatgtcctcaaggctcatctgtgttgtagcatgtgtcagaatttactttctgtgttgtagcatgtgtcagaatttacttccttttttttctttattattatttttttttatgaagacgaggtctcactatgactcctgagctcaagcaatccttctcccttggccgcccaaactgctgggattacaggtgtgagccactgggctcagcttccttcctttttaagtctgaatattattccattgtatatatagaccacattttctttatccattcatctgttgatggacacttgtgttgcttctgcttcttagctattatgaataatgctgctatgaacatgggtgtacaaatcaacaaacaatttttgaaggaatgaatgaatgagtgaagttgtaagtaaagtattacccacaagtgaaggactaaaacgggttgagacgccttgcatggtacatgatttgctcagctttcattgttgtctaaggatttgtcatgtttccagatcttggtctgtgatgtcttcattgcacctccatcttccatttctgggcctccacaaaacagtaagagtaacagccacagataaagcacctaaaggccaaggtgggaggattgattgcttgaggccaagcgttcaaaaccaacctggccaaaagtgagtccccatctctacaaataagaaaacagtgggtgaggagaaggagaattaattctttaggagtaggagaattaatttctgtgctttttgttggtcacttgcagaagagcatgtggtctaaagtcagaggctgtgggctcattattaaaatcttcagttgtagccactgaaatctttgtggtttgctgcatagtaatctacagttgtttacttcccaggcacaatgatgctatacaatgtgtctcctacaatcctattactcatcaactggcatcttgttcctccagtgactttggtacgttctgattcctgatgtcctgtcctggaataactgaaaatctgggctaaaaatgctaaaatgcattcagaatatggtgattttatcctgagagagttaatactacttctctaccttcaatggctgaggggaggctgacagttattctttaaattgtgtggaaaccaagacagtgaatggtgacctttactctggtaagacatcagagactacaggaagggccccagcaaaggaaatggtaacaagattgggagggcacaggcataacttggtgttgctgcctttgggaagccttcccttggtgttgctgcctctgggaagccttccctgactcaccctggcagagacagtgcagttgtcctcacctttgtattgacccacatctatgtttatgtgaaattcttcactgttgcggttctacttcttgtgcaatttgtcgtcattactggtttaggtggctgtagctgtcctccctgaggggctgaacaccttgaggagttcatcctggccacggtcccgtgccagcattacagcactggtgtagtactggcacaaaagaggtgtcagtaaaatgtctgtggagggaggaagggagtgaaattgggcagaggcttgtaggttatttccattaatggttgattctgttttcagctctatcagtctgtgttcgttgctagtggatacaatgaagtcactagatgaggagtcagaggcctaatccctctcagtgttccagttcccttatctaaaaggagcatgctactcactgtgtctcactgatacggttctggttctgaggttcaaaagagagaatggaattgaaagccaattgtataaatacatggagaaaggcctgtcatttgtttaacatattttatagcattttcttcatgtgaagcactggtctgtgtgcttacactggaatattaaaaaggcaaaatagaatccctaccctcaaggagcttgtggtcttaggagaaggtgggattaaaaaaaatataatattaagtactagtatttattgaatgcttgcagtgtgctaggcactgttctaaggattagaaatgaatttctatttgagctttatgacagcccctgaggtgtcaggtattattctcattcccaccctactgatgaaaaagaggtagaggtcccttagctagtaagtggaggaaccagggcttggactttagaccaggtgattgcatacagagcctgctctgctaagcactgctgaaggaggcccaggaggaaggagtttcttccagcttggggctccaggcaggcttagtggaacacagataacatgtgcacacgtcaaaatgtttggaggaagcgttctggaccaggggaaaggcaaaaaataacttgtttgatgttgcacttggccatgtatttgtgcactggagttaccttcttgattgtacttcgcaacttggcaaatagaagaatttgcttatgttgtctagacatacacttgctatgaggcactgagccagggcatctgggacaggggggagcaagccttaggtgaccagtgtgccatgggagaggcacagctcagatagagtcatgtgttgtgattgagacctatgaaagaaaactagattttcagaaagcatcattgttattttaaatgctaggttatactctggttgcagtgtcaaagttataaacaatgaaactgtcatttctttgagagtcaaatccctgaaaagttggctagaactttaccaatctattttatttttcttctgaaagaatgatagattcatagtaagttacaaagatggtaccaagaagtctatgtacttttcatccagtttcccccagtggatccatcttatgtaactattatacaatatcaagaccaggaaactgagactggcacaaagtgtgtatattatatagttctgttgttttatcgcatgtgtagattgccatcagcgtgacacagaactaagccatcaccatgcagttaccacttagtgtcatatctactcaccttacctccagttatctccaaaccctggtaaccacaaatctgttctccatttctataattttgtcattcaagaatgttatataaatggaatcgtacagtatatgaccttttgagattatgttttttcattcagcataaaatcctggagatccatctaagttgttgtatgtttcaattatttgttcctttttattgctgggtagtattccaaccaatccatcttcttttatattattgtgcattgaagggttgtggtctcctgaacagaagtctgtctccaaacacaaatcaagcagcaagatcatctgctgcaggtaagtgcagctctgacgataagatttatgttccttcatcttccacacagactctcaaaatccaattatttcatgcagcagagaaggtcttgtgttaggtagttggtttaggcccctgtatttccttttttcttctttcttcgtctcctcgatgggaaagacttgtgcctttgatcatgaagcaaaagagaactacaagttgccttcatgcagttacttagcaacaagcctcaacatccagctatactgagtggaggcttgttgaaaatgtgaggctgtcattgtccaggcagcatgtgtggggaagaaagctttccctcccacactttgatgctagacctgaattagaatccagaatctctcattgacaggccatgtgacctcaggaaagttactaaatctttctgagctggagctttacgttcctcatctgacagatagggataaaaatactgacttgacgagattgttgtgaaatgcacacaaactcatgagtgtaaagcgtgcaggacagtacctggtgtacagtagacactctaaatggtagctattcttgctgttcagcttctaggagtatatcccttccgttcagcatctgttgagcaccttctacaaagcaagcactgttctaggggttggaagacaccaagtctgttcttaaggtgctctttaagtgggaggggattgagatggagagtgggaagtggtggctggcccagagatgtaggcacaagctaagggctgtcatagaggtatgtacagagggctgggggagctcagaaaaaggcaccaaatggtgccttcacttctcactgtttattacagaactaaatagcattttaagtttgatcctctgactttatgtcaggaccggcaataatgaaaccatatcccagctgttgctgcctcatcagacttttatttcaaaccaaggcatcatcctcactagttttaccttctgtggggtgcttcccctatccccatgccttttgttggttgtgtacacagctggacaaatgatggtcagtacctggcgctggggatgttcaatgggatcatcagcatacggaacaaaaatggcgaggagaaagtaaagatcgagcggccggggggctccctctcgccaatatggtccatctgctggaacccttcaaggtactcttaaagttgtcctccttctagaacaaacaccatcatgaagaagggctttttgtcttcctgaggtctccctacattcaaaggcttctcacctcacttgaatggtctgttttagaacctgtcccatttgtatggattttttttttaatagtcccgctacctgagaatgtatggaatttattaagagcctcctcaaaagttgagtttaggaatgaatcctggacattttagcaaagcagatgagctatttaggacaggccaaagtgtgtgtgtggcgtgtgtgtctgcgcacatgtgcatgcacacatgtgtacgtgtacatgtatatgagtgtgtgtgtgtgtgtgtgtgtgtgtgtgtgtgtgtgtgtgtgtgtggtgtgtgagtgatgcagcaggaccatttccttatgaatcaatagtggagctctttgctgtggctttatttttgcctttccttttttagttcttccctccaagtttgggcagaatatgtgcccacctgttaataaatagctttttcatgagcctttttttgcccttgtcagaaagtcaaaattaagtctacagacgtccctaaagcctagagatacacaaacaattggcacctaccttcttaaattttatacacactttgctttctatgtccatgtgactttgagagtaaactaattatatgctctttttttttttttttttttttttgagatggagtctcgctcggttgcccagcctggagtgcagtggcacaatctcggctcactgcaacctccacctctcgggttcacgcagttctcctgtctcagcctcctgagtagctgggattacaggtgcctgccaccacgcctggctaattttttttttttttttgagacggagtctcgctctgtcgcccaggccggactgcggactgcagtggcgcaatctcggctcactgcaagctccgcttcccgggttcacgccattctcctgcctcagcctcccgagtagctgggactacaggcgcccgccaccgcgcccggctaattttttgtatttttagtagagacggggtttcaccttgttagccaggatggtctcgatctcctgacctcatgatccacccgcctcggcctcccaaagtgctgggattacaggcgtgagccaccgcgcacgcctggctaattttttgttgccaccacacctggctaattttttgtatttttagtagagacagggtttcaccatgttggccaggctggtcttgaacttctgacctcaggttatccacccacctcagcctcccaaagtgctgagattacaggtgtgagccactgtgcctgaccctatatgctctttatatatcctataatattattaaaccatcagtatcctttacagagtcctctgagggtaaacgaaaggtcctacttgtttaccagctcaatgtcattttacagatggttgcctacttgatttagaaggttgtttggaaggttattatgcttcttcctgaataattttttttggcccatgctgtaccatgcatgtctaatgctgtcaaaggccattagcctgccccagagttcctgctgtttgatttgtggctgcagaggacttggtggctctaggctaccatttttaattcatgagaagcaggaggccctgtatacctggtggctgtcctcctccaggtagggttcagaggctccttttattttttatttttattcttttttttttttttttttttttttgagacggggtctcactctgtcacccaggctgcagtgcagtagtgcgatcttggctcactgcaacctccgcctcccaggttcaagcaatcctctcacctcagcctcccaagtagcttggatcacaggcacatgccactacacctgtctaattttttgtatttttggtagagacagggtttcaccatgttggccaggctggtcttgaactcctgatctcgagcgattcacttgcctcggcctcctgaagtgctgggattacaggcgtgagtcactgcacctggcccccaggggctccttgccaggattttaaattatagttttagtgtagttctaggcaatgtaattttgaacaactacttactgtctacagccgatgggagagtttctggatgaacagagagaatgaggatgccgaggatgtcattgtcaacagatatattcaggaaatcccttccactctgaagtcagcagtgtacagtagtcagggtagtgaggcagaggaggaagaaccagaggaagaggacgacagtcccagggacgacaacttgtgagtgtgtcccagtgagtgggaacccttctggtaagggcccaggccccacacagacttgccaggacagatgttaaactctttggccaagggagtgcagggactagggggaactgtgggtgaaagcgccttcaaaaaaaggagacatacccttaaaacttgtgtgtgggtataaagtgatcctgtgagaaactataggaaatactgaaaagactaaaggagaaagttcaacttttctgataaaaccccatcccctgaggaaatcactgttagcaatctagtgtatttctcctcagtcttttcgtgtgttcatataattaactaagtcatattctgctttttttttcacttaacattatagtgtgaaccctttccagtaacattacaaatccttcgaagaacatgatttttaatgtctgaaaagtgtgcccttttgtggatgccccatcactcgacacttcctctattactggacacgtttcttagcctgttcccacactatcccttaccttaccttgcattttctaggatgtatatcagagaggaagcccttaccttagccacagtcttcactcccaaatcctggctgtctagtcattcttctcttcagttgagattgcctgtagggaaaacatgggcaggccagagtggggaaagctggggtagccaggatatctcagtttggcagtagagatctagcttgagactttccaaactgttttacatagtacctgagtttccttggaagaatcccaccctgaggtcatgggggctgggaagtggggaccagtaaaggaggaaggtatggctttgggtccccatctcagtgcctttgattgtttcaacatgagtttttgtttcataaagaatcctactgccccaggaggtaaaagggggttgaaaatcactgatccatctcacagggactgagcccagcccagagccatatgtggcctccccaagagggctcactggtgggctgggctcctggattgtgtttggactttggacatcagtgccagtcacacaaaggtcatctgcaggctccctcattaacatccctctcggtctttgtctcttttcccttagttttgggttagtgcctatgacatttgccactcttggctgggttttacaaacaaggctttaccttgcctgcctacatatccagtggtgctaccaggttaccacaagacactgggatcagaaaagctggaattaataaacaaagaggcaacattaggtggattaagacccagcctcaagggctaggaatgcttttcttttttttttttgtgacagagtctggctctgtcacctgggctggagtgcagtggcacgatctcggctcactgcaacttccgcctcccgggttctaagcgattcttgtgcctcagcctctggaatagctgggattacagacacgcgacaccacgccgaactaattttgcattttcagtaaagatagggtttccccatgttggccaggctggtctagaactcctgacctcaggtgatccacctgcctcaacctcccaaagtgctggaattacaagcgtgagccatcacgggctgccgcttttctcttgaactagattcccaggtagcttgctctccagcctcaggcaagggagtttctcctgtgtgctggtcctacagtcccagccccacagcactgatccccataggttctcagtttcaaagacagttgtttgttttcagagcccattgctcttttttgaaaattagattcagtcagaaaccatttcacctgtgcaaggacccccgcctgcaggagaacctatttttaggtgttaattttctttcttcaggaagagcaagcaagtttcccttctattaaaaaatgtctttgtgctgcaagagatgtttctctgccatctccccacattttctagtatgtaagagaaaagcagtctcaatattgcagccttgcctatcttagtgttgctccccagtaagctctgaaatgagaggtttatcttcttcagctgcagcagtgtccccagcaccataaggtcatagcaggggactcagtgaaacagcagatcccaggaaggctgaacctcaactctgcttcatcccgtaagactgattgatgggttgggccaaattataacttttggcttcagtaaagctgtacaacatttggcaacctgaggccaggacttccttgttcctgttgtttaagcccttagagctatactcatcagcaggctgtggcccttcataacctcttttatcttctgttgattagagaggaacgtaatgacatcctggctgtggctgactggggacagaaagtttccttctaccagctgagtggaaaacaggtatgtagccctgtacaaatccaattgcagtcatgcctgttatattttcattttctgagattctgttactattaattatacattatcattgttagttcctgcttattgagcatttgctgtggtaccagatactgtgctcactgctttgcatactttatcctattttattcttataaaacccaatgaagtgggtactactttccttatcaactttttagaaatgagtaaaccagaactcagagcagtgaaattatatgcccaagatctcacacagctagtaaatggtggagcctaggagttaaacccaggttggtttgactttaaaatctagctcttaattttgaccttactttcctctattcgctttctttcattcaaccagtatttatgagtacccactcaggaaagccctttcataaaggagctgctgacatagagctgggaaagtgatagcctctacctgcaagagctcacaggctggcggagacacacttgatagcaaagagcccctgtgtggtgtggtatgtgacacaatagaaagctgtacagatagacagctttttgggacacaaaagagggtaacatcactacttggtagagatgggaggtcttgttagaggttatctttgagcaggccatctttgagttaggctaaggacattgggaatggtgtttcaggcagaaaaaaaaatagcatgtatcaaggcaggaaggaatgaaaatatatgacagttcagagaatggtgagttgtacagggtgactgcatctcagagtttgtgacctgaaaacagagctgaagaggaacatgggggtatgattttttatttatttatttatttatttatttatttttaatttttttcgagatggagtctcactctgtggcccaggctggagtgcagtggctcagtcttggctcactgcaagctccgcctcctgggttcacgccattctcctacctcagcctcctgagtagctgggactacaggcgcccaccaccacgcctggctaatattttttgtatttttagtagagacggggtttcactgtgttagccaggatggtctcaatctcctgacctcgtgatccgcccgcctcagcctcccaaagtgctgggattacaggcatgagccaccacgcccggcctatgattttttgtttgtttgttttgagacagagtctcactctgtcgcctaggctggagtgtaatggctcaatctcggttcactgcgacctctgcctcacgggttcaagagattctcctgcctcagcctcctgggtagctgggattacaggcatgtgccaccatgtccggctaattttgtatttttagtagagacggggtttctccatgttggtcaggctggtctcaagctcctgacctcaggtgatccacctgcctcagtctcccaaagtgctgggattacaggcatgagctgccaccacgcctggctggagatgtgattataaaggacctgagtagtgtgaataagaagtttgaacatcatatactgtaagtattcaggagccataggtggcaggaagtggcatcacagattcttgcttcagaagaataacttgtttccatggagggtggattaaaatatagagagcatggtagtaggatgacttattagtaggcaggaaatgccaaggattagagtaaaggtgctgggtacagatttcacaccacagccaagcaagtgagaaatgcaacctgtgcagtgaagcctttaattgcgtagcatccttattcctcaaaacatgtcatgtaagagggaagagttttagatgtgtgtagcccagcttttgggccatttcttctacccctgccttaccattggtcatttcttttgtattcgagtaaagaaaagataaagggagcagataatgaagtattttctcagtttcccatggctgatttcctaaaactctcattttaattaactatcatctagtttccctggccctctctattcatctgcttaatgtgtgtacatcatcattcaacagatacttattggcacacctactgtgtacgaggcactggatgtgggtactgaagactcttgggaacaaataaccacactgcagtgggagggaatggggtcttgttgctatggccacagaagaaaagagctcaacatggccgagggccacaggaaatatcttgcatgtatgcagccccagagctcatgttgtggcccaaagtttctgcacgatgagcaaccttaacctgctgagatggtaaccccaacttgtttgggacagtaaaattgttttcttgctgggtgtcttcccttcccaatctaggaagatttagaattcaatataggatgatgaagtaaatcaaacccatacttttgtgttagtctgaggtataatttgtgtatttttgtcatttgaagtgttagtaatacttaaggggatctggcttaataataataatagctaacatttattgaattccaggcattatataaactctttacaaggattaactcttttaatccttataacaaccctatgaggtaaatactgttatcatcaccattttacatgtacgaaaattgaagcacagagaggctcaataatttgcccaaaggcacacatttagtctgtggtccaccctgctgaaacccaggcatactggtgccagaatccatattagaatgtctatcagattagtcttgcaatgaccattcaaaagttgtattgagtaatttcatatgtctgattttatttactttttgagaaaaggcctcaccctgttacccaggctggagtgcagtggtatgatcatggttcactgcagccttgatccccctgggctcaaggaatcttcccactttggccttccaagtagctgggactacaggcacatgccaccacatcctgctaattaaaaaaaaaaattttttttttttggtagagatagggtctcctatgttgtccaggctggtctcaaactcctgggctcaaatgattcttctgccttggcttcccaaactgctgggaatacaggtgtgagccaccatatctggcctacttctgattttaagtggaaagataagaattatatttaaagtgtatattatttaaggttcctaagcaatattggaatgcttaagcaatttgttacatttttcttcttggtgttcactgagctttttgaatctacacattgatatcgttctgtctttcaccaaatgtgaaaacattttggccatgatttcttgaaatatttcttcttctccattctttcctttcctctggaactctaattacacttacattagaccttttgttactgttctccaagtcatcgaggccctgttattatttttttaaatcccttcttttccctctgatcttcagattagaggatttctgttgttcagtattaaatttcattgactcttctgcaacttccaatatttttcttaagctcattcagtgtgtatttgtttcagttattattgcatttttccttttctagaatttccatttggttcttttttcctttttattcattacaagcgtatttttctttatagccttaatcatagttataataactgttttaaaattctcatctgcagctgggcatggtggctcatgcctgtaatcttagtacttctggaggccaaggagggacgattgcttgaggccaggagttcaagactagcctgggctacatagagagactccatccctaaaaacgaacaaacaaattggccagggaggtggcaggcacccattgtcctaacaactctgtaggctgaggtgggagtattctcaagctgaggagttcaaggctgcagtgaactcttaccactgcactccagtgtgggtgacagagcaagacctgtgcccaaaaagcaaacaaaaattcttatctgctatttctaacatttgggtcgtcatggttcagtctccattgatttttttcccttgaatatggttcacattttcctgctttggggaattttgaattgtactcaatattgtgagtaatatgtcataaagactcatatccatcatgttcctctgaagattattgtgtatgtttgtgtgtatatatgtttaagcaggcagtttactttgctgggctcaaaatcaaaactccatgttttcagtggtgtcagcagctgacatctctgtgcagttctttagctgtagctaggctgcttggcatcttgtcacagtttatagttcaagggtttccagatattcagtggagtttatgtgcagaatttaagctcttactttgcttctcttttctgggatttcccacttcactttccgggtgctgtggtcctcccaaattctatactcacccagcatgatggtgaagagggctgccctcaggcaaaaacccttaaaaaaatgagaagttcacctagtgtttgttcccttcttctaaatgtgcatgtgtcttcagtttctgcctgcttttggtcgccctgaaatggttgttgtttatagttggtccagagtttattgttgttactttgtgggaagattggtccgatgggaactagtgagccatttccagaagctgctagccttccatgtcgtgattcataagaatttttagttttcttgttaggttttctagcatcagataagtgctagggaaagttttcgttgctaggcatttgaaattcctatacaggaaaggaaatttgaatgtattaaacttataattgcagtttaaattggtgtaagggaattaatttaactaagttttaaatgggactggatatttaagggattttataatctgttcaaaattggatgccttaaacagtcaaagtcaattggctgttcactttaactagatttataaataggaaaatatttgtaaattgaacttaagaacttaaggagaaaccagttccctaaagttatttcttttataaattgaatattagtttaataatgttaatcacaaatcgtctttttattcacaaaagacacccttggggcagcaaaaaactccagtggtaataaggaacttgggctttagtggggcagacctgattaaccctgtgtctacagacaacgagagaagtgcaatgggataggcgagcacaagtgctgtgggaggatgaggggatggggattggagatgttcctggaggagatgacacctggcagacaaagtgagggaaagagcattcctggctgggtctaggaatggtgtggagtgtagcacctgtgaggatgtggaggcctgaaaaagcattgcccgcttaggaaacttacaagttcattttggctgagagaatgaccttgggggctgagctcgggagtttgacctgcatcctagaagctgaggaagcaccatcaagaaagagaaaagacaacccacagaatgagagaagttttacaactcatatatctgataaaggacttgtatctggaatatataaagagctataaagacagggctgggcatggtggttcacacgtgtaatcccagtgctttgggaggcagagacagggagatcacttgagaacaggagttcaggaccaacctgggtaacagtgggaccccacctctaaaaaaatatatttttaattagctgagtgtggtggtatatgcctctagtcccagctactgggggtggtgaggggctgaggcagaggaattgagcccagaagttcaaggttgcattgagttatgatcatacgactgcattccagcctaagccacagagtgtgacatttctctgtggccaataagcacatgaaatgatgctccatatcattagccatcaggaaaatgcaaattgaaaccacaatgagataattcgcactcactaaaatggagaaattggaatcctcatacactgctaatgcaaatataaagtggtgcattcacttgaaaagtgtagcagttcctaaaaaaggttcaacgtagagtttaaaaataaaaaaatataggccaggagctatgactcactcctgtaatcccagcactttgggaggccaaggtgggtggatcatctgagctcaggagtttgagactagccgggacaacaaggagaaacaccgtctctgcaaaaaatacaaaaattagccaggcgtgttctcacacatctgtagtcccagctacttgggaggctgaggtaggaggatcacgtgaagctgggaagtggaggttgcagtaagccaagatggcgccactgcactccagcctgggcaacagagtcagaccctttttcaaaaaaaaaattttttgccaggcatggtggcactcacctatggtcccagctacttaggaggctgaggcaggaagatcgcttgagtccaggagttgaaggctgcagtgagccgtaattgcaccactgcactccagcctgggtgacagagtgagaccccatcttgaaataaacaagaattaaaaaatgaagagaagtagtatgggtgtagttgcagaataaaggacagtctttaaactgaataaactcagctttataaaatacttttttaaaaaggcggagaaaagaagctgagggaacccattgaactataggaagaactatatttgcagagggaggggggcctttgggaacaaaaccacccacagtctccatcttggcggaggagccctgacacactcctgcactcctggagcacttgggtgggactaggggaggtgccactgactccaggagctgaggtttgggctgtgtagaggatgagtagggagatgcagaggcagagaggcctgtgttcaccatgggatgacacaggagaaaaggctggccagctctccctgtcttcccaactccctctaaagttggcgagaaaaagcccttaattgtattgcaatggttatggattcggaaatggtttttcccttgctgtgtgttctttttcctcagattggaaaggatcgggcactgaactttgacccctgctgcatcagctactttactaaaggcgagtacattttgctggggggttcagacaagcaagtatctcttttcaccaaggatggagtgcggcttgggactgttggggagcagaactcctgggtgtggacgtgtcaagcgaaaccggattccaactatgtggtaagaagagaaagtttgttctgtggggccatggcttgaagaggcactgagcagccgccgtgtctcgagtcacatcactggggtttgtgtctgacaaatgggggaatgcagactttctccagagagctgggaattgacagttctctcaccccgcaggtggtcggctgccaggacggcaccatttccttctaccagcttattttcagcacagtccatgggctttacaaggaccgctatgcctacagggatagcatgactgacgtcattgtgcagcacctgatcactgagcagaaaggtaagaggcaggtccagaccttgggaagagggacaggtggaagcaggtggaaagggctggtgacagggcacttgaaatgacaggaaaaggtttctctttggcgttttgcaaacctgttagccactgggtctgtgtcttgttttcttttttttttttttttggtgggggaagtagggatgccagtctccttgaggatctcatgaaagcaataaatcctctctgaaaaatgtaccaactcagaattttgcacataatttcaaggagtacatgaatttccttagtgagggaggatgatttatgacaggttggagccaggtggttgacctgcatgggtcttcgtggacctttatcctttctggtcagagtcactctggggtgcttctccctcagccctgtctccacttgcctcctggtgggtccttctgccagagatgagcagtggaattggattggcacaggctaggtcagaagatcagagttcccggcctcgcatagtcattctaagccctaagactgcagtctctccctctgtccacttaagttgctgtgctggttaaatagactcaatccacttacttcaggtgtattcatatctggatgtgctggccttagtgcactgctaggtgcctttgcaagggatccaggttgggggttgtcttgtagattcagatgagtgtcctttggtccccctgggggaccctatctttttgaagattctggctgtggtggttggggcaaagccccttgggcagcttcacagtgtcccccttagggacattttctccacctggtctgtagtgggagtgtagagcctggtgtgtaccagaaattacatgtcttccccgtttgtcaaggaggtgggcagggagcggccagaggtgaggtcagttacttaggcaggcttctgatcaccgggggccactagtgctgtgcagaggagtttatatttgtatccagcaagtgatggtaacagtgagtagtttatttccatactcagttgtcagccttggaccatgaagattgtgtcctataggactttggatcccagggttcagcagagttgattgtatgtattagatactctaaagatttttcaatgagagtatctcactttaattgccagtagcgctaagtaaatgatggcttttaatttctctgccttgcaccttacataacaacctcttgctagaactagatatttttttctttgacagttcggattaaatgcaaagagcttgtcaagaagattgccatctacagaaatcgattggctatccaactgccagagaaaatcctcatctatgagttgtattcagaggacttatcagacatgcattaccgggtaaaggagaagattatcaagaagtttgagtgcaacctcctggtggtgtgtgccaatcacatcatcctgtgccaggtgggcagcagcatgttgaaggagttgggctgaattccatttgtgctccccccccagtgatagggtgcccacctcatggttttaaaactggtcactagaaaacaagtctgttccatcaaactaagtggtgcttattggctttcattttcctggcatctggatgaaccagactctatcagcaagtcatgagccataaactggagaatgtttttttgttttattttattattttttaaaaaatatttttcttgagacagacagggtcttgctctgttgcccaggctggaatgcagtggcacaattatggctcactgcagctttgacctcccaagctcaagcggtcttcctcctgagtagctggcaccacaggcacatgccaccacacccaactaattttttatttttagtagagacgcgaggctgtactttgggaggctaaggcgggaggaatgcttgaacccaggagtttgagacctgtccagcttcctaaagtactgggattataggtgtgagccactgtgtctagccaagaataccttgttctattgcagaacatcttgtcatactgggattagatatactttaatgacttaaaacataaattggtgtacagaatgaagatagtttttattgataagcatatacacataaaatttgtatcaactcagtaattgtcaaggaagttttaattcctgaaagattttttttcatagaaaaatatttctcaagattcttagagagtgtctaagtcaatgccaagagaagtttggaaagactttgagagaaggctagcccagcatcttggaagtagaggtggatttagttttacatagttctgttggaggtgataaaagagaagaattccttaggaatcactgtagtgtaaaatactattaaaatctctcaaaagcctagaactgggctgggtgcagtggctcatgcctgtaaatcccagcactttgggaggccaaggcaggatgattgcttgaggctagtagttcgaaagcagtctagaaaacagagaccccatctccaccaaaaaaaaaaaaaaaaaaaaaaaattatttaattagctgggtgtggtggcgcttgcctgtagtcccagctacttgggaggctgaggcaggagaattgctttagccagaaattggaggcagcagtgagctatgatagcgccactacactccagcctgggtgacagagtgagactctgtctcaaaaacaaataataaataaataatcaaagttagaactccaagcggtttagggttgctacaaattacaggatagatgtggcaagtatgtgtacttttgagtgctgcctctggcctaggctgcctgggtgggggtttgcattgaagatctgaggctgaattgggctccgtggggaagccttgcatggagtcttggattaacgatgccaatcgtggggtctacattgggttagatagatggatactgaatgtgtaggtattttctccccttagggacagaaagatctccttggggaggtctgggggcacttattctgttgaatttccatgcagagctgggtttgcttcctaggagaaacggctgcagtgcctgtccttcagcggagtgaaggagcgggagtggcagatggagtctctcattcgttacatcaaggtgatcggtggccctcctggaagagaaggcctcttagtggggctgaagaatggacaggtgagtgctccctcacgtctcctgtcaggctgataatctgcatgcacacgtgggtgacccgtctagcaatgactctgagctgggttctcagggcaggaaaagggcttctctcctccatgggtgaattgtggggcagcctgagttcagttttttgaggacagcctcaggccaaaggtgctgtggccctcacactcctagcaggcccacgttttggcagagttgagctataacctttggctacatgtagagtgtattagtggcttaaggtctccagaaggtgggagatttgttagagatgttgcttctgtggatttctagagggaggcagagatcgttacctaggtcagctcctgattagggcagcgagtggattaaggcagtgcgttccagcatgtgtcctaaagaatgctgggtcctcaagatactgatagatgtcataagcaaaatgggccctttggccagttagatgtgggatatccaggttacacaaaattctgtgtgtgtgtatacatgtgtacacgtgtgttctttgctcagcataagaaaagttctaagtaggctgctacatggaactttgaaagtgacaatgtagctgcattagcctgacagccaagctgtgcagcagatggcttatggctgaggcttgtcaggtctttgctggggatggaagtcacagggcatgagagcagtgggtgaagtcaagcagcaatgccaaggggaggaagggccgcttatttctcaggcagctctcacttccaatgggagcatggactatggggtcaggtgggccggaggtcgtgttcttacttagctactcactggctttgtcatcctgggcaggtcactttacctctgtgaggctggttttacatgaggataataccacatatttcatagggctgtcaaaaacagatatcatcagggttgggagttaaagccaatgttaaaaacaaaacaaaacaaaaaaaacaccaggggtattaaaacaggcatggtggagggtacctgttttcccagctactcaggaggctgagataggaggatcactttgagcccaggagtttgaggctgcagtgtgatatgattatacctgtgaatagccactgcgatcagcctgggcaacatagcaagaccttatctctaaaaaaaattttttttaaaccagggatatcagtaaatgatagctatcatgatcactatcatcattattataattttctaccacatgtcttgtcagtgttcatagtagctttttcctgtgttagttcgtgactcagatctctgctaggtggcatctcctaaagctgcagtttgggtaatgtcatcaacaaatccccagtccgaacagacactgaagtgagctcggcctgtctcagggctgtcattacttctgcagcctctgatgaacctcgcttctggcctcctaaggataagccattgccccccacccccctctttcttttgatgagtccttttccctgcacagagcttctggtgaaggtggtgggagttgttcttgcagagcacatgggattccaacggcctggcagtgggccaggatcttgttgccatggtgactgacactgttttcgctgaaattttgccagatcctgaagatcttcgtggacaatctctttgctatcgtcctgctgaagcaggccacagctgtgcgctgcttggacatgagtgcctcccgtaagaagctggccgtggtagatgaaaatgacacttgcctggtgtatgacatcgacaccaaggagctgctttttcaggtgaagtccctgagggggcccagggacatcatcctttgattagagactctcctctagcttcccagtccctgcaggaggctctcctgctctggcccaggcaggtctctgggaggggcaggggccaagcacatgcacagagtcccagaggccctgggccacaacctgctcctcccacacaggcacaagccgcagggcctggaccggcctctttaactttggtttccttgccaatggaaaccgaaggctctgagccagcagagcctttcttaagcgtttaccatgaacaagaaatggggcaatgactctgagaggggtgtgacgttggcactcagtgaatggggcgatggatgcacttcctttgcagaagtctgtgtctcacctgctgcaggcctgcctgtgtctatgcgcacctacagcgtgggaaggaaacaggatgttttgtcatctgaaagggggaaggggatgggcaagcctggccttctacttaattcacaagaatgctagaagagccagcagaatgcgaagtgcttggatctttggggttgtaggcgttgttcagtggagtcatccagccctgtggcctgaggaagtgtgtcaccagagaagacagcccggcagctctgtgccccgggcctggttggctttctgctgggctcgcgccattctttctctctttaggtctttgtaggtggtcaggactggttttccagagtgaagttccccccaaagctggagcccctcctgactggtttcctcggccactgcagggtttcctgatgttatgggcagattcagtccccttaccaggctcctccttgttctcagcagcagaatcgatgggggaggggtctggagtggggagcagcctcagtcaattagaaggagttacctggccacctctagcccagaggtaactccatgtcagtctcaactcactcatgtccttgagagagtagaatggtttcggggaaagagagggcatagccttcaagctgacctgggcttgggtcctgcctgcatcccttactgtgtgatcttaagttagtgagcctctctgagccttaattacttttctctaaaatgaaattagtaattgccccttacagaattgctacaggaatacactagatactacagtgcctagctcagtgttgagcacaaaatggggcctgaaatgttacttcccttctccccagcctcacctcccacctatagggggcatagctggccccaaatgtgaatcttgtgtctgagcctagaatcatacaagtgtggaagggcgtctgtgctgccccatccccactgctggctctatggcaggctaggggaggtgattctcagccctgccaggagacatcagcattcccagctgtaacattgcctgctggcttttcctcttctccactgcccctccctctacacataaaacagctatattgattttttctcattataaaaaacaatccatgctgattataaaagatttagtcattataaaagatcctaggcagaaaggtatgagcatatttcaggagaataattttttttcaaaagtaatacttgcttactcaaaaattccaacaacacgcaggtgcatggaggggcttgcctctgttcatttctcttgcctctgttcatttctttgtggtcccctttcatccttttccctccatcccactgtaagcaatttagtgggattcagtctttaagagggtattgggctgaaatgtgtgagcgctgaccaagcccagggtggttctcacaggatccccactgtccctgttccccaggaaccaaacgccaacagtgtagcttggaacacccagtgtgaggacatgctctgcttctcgggaggaggctacctcaacatcaaagccagcaccttccctgtgcaccggcagaagctgcagggctttgtggtcggctacaatggctccaagatcttctgcctccatgtcttctccatttctgccgtggaggtgccgcaggtaactgggggtgcctgtccactcttagcactggcaaggctgacaagaccagggaagctgggccctttgctggtgctttggggagagagtagcaaggagagaagaatggcagctgtgaggtcgtgggaggcagtctgggcctggaacctgccgccctgtctccactccttgcaacctgtgtgactgggggcaaacagctcaacctccctgagtatcagtttcttccttgtcccctttctgtagggatgggaggggtatgcagtgttgtcagcagcgtgtgttttgcagagagcccagcgtggggccgaatggagtgagcagcaaagccgggagtccggcagggtgtgtgtgtgagtacgtgtgtgatggtggtgatgtgtgtgtgagagagaggggagagagagaatgagtgggtggggggtgtgggctgaggtctgtgagccaataagggagcatgggactctgcacaagctctctgaaccaggaggtggccagaacagaaatggggcactgaagggtggagccacagaatgggggagggcagaaccacagacaggcgcctgagattgacctcccgaatgcaggatggtctcccctccaccttctgcaccccaggcagatggtgctcactgtagaattgccataaaacagagacgtgcatagcgagaaactgtagccttcagcatcccatcctcaggacagaatcactcttaaacatgttgaaatacatctgcttagcgcttttctacgtgtatatataatatatgcataatatacaattaggagcatgtggttttataagaacatttttaaacaaaagtggaatcacactgcaaatacttttcatgacttttatgtgtatacgtattgctacctatagatggaacctcagatttactgtattccctgagcctggcctgtaaacaagacttctcatcccttcctttatggctatcttctcatttcacctcacattcggttatggcagccccatcactgtctatgaagtgctggctgtacactagtcatctggccttttcactcaacaatctcctaaagcatcgttctgtgtcagtaaatggtaaatgttcttattctgcatggcaaaatttagggtaattgtagactcacataaattgtaggaaataatacagagatcccttaaaccctttgcctagtttcccccaacggtaacagtgtgcatagctctagagtgatcttcccacccatgttggcatgtgtaatctcccaccacagtcatggcactgaacactgccaccaccacaaggtccctggtgttgtgctttttacagccagcacccctccctcctgcctggtccccacctgccttgtatttacagctgcattttattgtgtcttgtggatgttccacagctttctttaccagtcctactggacatgtttgctgcttatagcttttttgtattattgtaaatagcaggcatctttctagctaggtccttgcacctgtcccaacttggcgccttggcataaattcctagaaatgaaattgctgggtcaaagcacgtgtacctttgaaagacttttagggaaatttccaggtttcccttccgctaggctctgtcagtctgttttccccatacaactcagcttcaggctagagcccacttcttctaagttgatgataccctcgaaactcatgactgcaagacttactggggaaatgcccatcatccatgcctgacacagatcagctattcaagaaatgttagtggaattcagatctgaggaaaaagaccagaaagcaagaggaagaagggaatgaggtgggtggaagtggcagcaggacgaggggcacgaacagcttctcctggactgtgtcctcgtcatccttgtctgccccattacaaacccacgcaccacatccaccaggaactcatctccctcaattgccccaaactagctctgcttattttattaaaaggttttctcccaagattgccatcctgacctcaaaaataaatgcagtttgctgctctctgactgtggccggccaagaggagccagaggggcagcctggggcttcctctgccaggactttaagattcagcagcaaagtcttgctgactgcaccaaggccatcctgctgacgcagcgggtcaggactgccaagggttaggaaacacattctcaagacaaaggctgttcatctgtcgcctctgcctccggccatcctgtggttttggcccagagaggagggagaaagcatcagacccagtcttggaatttttggttgcctttcgaaatttacattgtcttgtgcaagaactggtttgtcagggctgccaagtaggacaacgagccctaggagggcttctcaaggcggtggtgacttcatgtttgaaatccaacagcaagataaagtatagctcagagagtatttgttcagtggggtctatttttaaaactccactcaaattgtgcctcccaagtaagtccaagtgttagccatccatcatatgctcagctgtgatatgcctgcctgagtgcctgtcccactcacggggcagtcagcatggcaagcagttggtgtggttcggggaaggagcaccagctttcagtcctgactctgccatctcaagcagctgtaactagagcaactcatttcactctttggggcctcatttcttttctgtgaaatggggttaattatacccatctttcaggtttcgtcaagccaaatttctattattatttctccttattactgactcataaaatagcaaaaaccacaaaacacaactaaattgcaacaggctgtacttactgacggactttagaaaggaaagctcattgtgtgctttaagaaaagctttcaggagtttgagaaagcttccaggagatggtgaaacttgatctgagccctgagaggtctggaaaggaagagtggagcagggaagcttttcaaacaaagggaaaggtgggggtaggaacaagactggagagcctgggagatggtgaggagctggtgctgagaaaatacagtgaaggtaatgatcatgcctgcattttgcccagtgcttcattatttttggagcacatctctcctttgcccatggtagcctgagctgggcaggacatctaaacagaagttaatggatttacccaaaaagtcaccagcctaggatgtggctgagcctggcctgggttctaggtcacctgctccgtagcctatgcctgctgccccgctaaagggagcatttaatgtgccaatgaggagagatggcatggtggaaaagataagcacttggaagcagccatgttttgctctgagagtagacagactcaaaataaaaaaaattccttcaattctaaagctaaaaaatgggactggaaatttcaaagacagacaaaagccccaaatggagaaaacaatacttcaagctccacatttgggaaccattagcacagaggtcctggctgatttctcttccctgcccaggaagccaggagagatgcaggccactgaagcacactggctggcctaaaacaagggcaaggcctttccttgttaaagatgtcatggcccaactcaagactcattctcaggcctgcacgcacatatgcacatatacacgcgtgcatacatgtggcaggaaggggcacagaacctggagtccagtcacctctggctattgccagctatttgctgggacaggtcatttgtcctctctgagtctcggtctcctgggctgtagccagggagaaataatacctactgcacaggactgtggggacagccaaaagccttttataaacctaagaaagagaagtcgttaggaactattcatgggcactcacagcaaggcaaccccatcttgtaggagggcatctgtccccagggcagggatcaggagagctgtttccagaggcttccagggtaacttggagcaaatcacttacctttcttggactcagtccctggaagaagaggccattccagaccgcttcctcccacgaactcattcattgtgtcagcaaacgtagactggggttctgctgagggaggccgatacaacccaccactgcccacggctgtgcacggctttgctgtgggaacaggcctgtaactgcggcacaacctgcgatctggacaaagggcagaggaagctgagactctttcccctggggtgggggcttgaggggcttgggaggactctgcagaagaggtgacatttcaacagggccttgaaagccaaataggtattttccagaggcagagtggggaggggcaaaggcattccaggtgagggtgacatcctatggcgaggcaggcctgtaggtgggaaggaggggaggatgggcagagagtttgtgctgtggagcacagtagcccagtcatgagagaggtgcaggatggagcacacagggtgggctgggcaggctgggcagggtgctgattggcggctgcagggctgctccccaggcatgggtaatcatcccacgcatctggaggcaggctctgtatgcatctggttctttccatggctctgaaaacagtcttctttttttcccttgatgaaatcctgcagtccgctcccatgtaccagtacctggataggaaactgttcaaggaagcctaccagattgcttgcttgggtgtcacagacactgattggcgtgaactggccatggaagcgctagaaggtttagattttgaaacagcaaagaaggtaagcatctagccagcaggagctggagtttggtccttgtggggtcccttaagaaggcagatggggacccaggtggcacggagaggccatagactgcagcagtctctggagttaggctgacctgggcttgtatcttagccacttcctcactgtgggcctgggtaggtgacaccctttctaagattgcttctctatagacgtaggatgatgacaggccccatcctcacaaagctgtgaggatcaaatgggaggatgcctgtaaagcctgacccaggagcagcatgtcagattctggctgtcactcttattagctgttctctgtgggaagcacctgactagtagcctggcacatcacaggcactccgtaaatggcggcttttattatcggtgtagtcactggccatgatgctgcacacaatgctgcttttcttagcatctgccaactaaggtgggagagatggtcaaggtctctgattctgacagcaatgtgggcacttcccacgtaccttcatggcgggattcatggacttgattcgttgtgtcctttcctggcctagtctatgaaagctagagagatggctgaaaacatctgacccctctctgcacataaggaaaagcccaggtatgttcctgagctgtgtttccatctagaacctcagatggaggaaggaatggcttccaacctccactcccctaccccttccctctttatctccccacagtcaattaatgagctgctcattttgtccatattcccgggctgacattgaaggagtggcaaagagggacgtgatgcccgccttgggttagatcaagacttgtaggcatgaagagaggagactggaccagaccaggactaagaagcctggctgagaacgagctgtgtcacataaggggctctgggacctcaggccagccactttccttggagccccagtcctcccagttctgaaatgggggtggtgagaatgcccgctgcagtcatgaggcttaactgagatgttgtaaaggggaatttaaatcagggatggttgtgcagatgctagccattactaaacaagggaagtgatcgttgtgtaacaatgatctagattatatttttagatgtcctcagtgtaggaaagtggagatggaggaggctgtaagaattcagaggaggggccaggcgcggtggctcacgcctgtaaatcctagcactttgggaggccgaggtgtgcggatcacaaggtcaggagatcgagaccatcctggctaacacggtgaaaccccgtctctactaaaaatacaaaaaattagccgggcatggtggcaggcgcctgtagtcccagctactccggaggctgaggcaggagaatggcgtgaacctgggaggcggagcgtgcagtgagccgagatggtgccactgcactccagcctgggccatagagcaagactctgacttaaaaaaaaaaaaaaaaaagaattcagaggagggaggaggcatctctatggagggagcttccctctcctgccccacccagaaatgccagcagggagggagacgacaaatccctagaatagaaaggattgtaaaaagccacaaggtttaatatgagtgtttactgatatttttataaatatatatatttttatatatttgtttaaatattgagacggggactcactgtgttgcccaggcaggtcttgaactcctgggctcaagcagtcttcttgcctcagcctcccaaagtgctgggattacaggtataaaccaccacacccagccagatttactatagttgaaaagtaagtgtatgtggtatatatctattgtgtacaacatgctgttttgaaaaagccacatgatattgaagataggctggatgttactatttcatctaaatcccgagtaccccacctctttactctgtgccaggcactcaggctcaccagcttggatatagtggttcctagagatggacagccatccccactagatggcagagaagagctgctgagctcccgccagaccctgagcagagctgcaggttcctccctattcccaggcttccctctgctgagctcattcaggggccttgtgactctgaccaggcaccctgacgctgcaaaatgtgtcaggttgaaggaactcggaaacagatttattaatgggcaaatcctagacactagcacagctgagctacagctagaaagacccttgagagggtgtcagtagcaggcccctttccacaaagaagatggttggagcccagaagcagagaagtaggctcagagcgaggactcagacctcgaatgctcctttccctcttggccactgtgctgggctttgcagggttgccctctcaaggcgctttaaggaaacccagatctagagggtgatgtgtaagacctacagcttgggacacaggtagtcttagccctgtgttccttggcccatgtgatgcccgcattgcccttttctacgaattcctcttcacaaacacttgtttgccaggttctgactctgatgcctcccttaacgctgcctcccacccctgctcatgctcagaccattcatccgtgttctccaggcatgtggttcgtagttggagagctcttagctctgggaggtgtcatgatctgtttaattgaccagctttccctgttagaatgtggacctctgaattgtggagggggacaggggccgagacatgtttctccctgggtcctcagtctcttgacaggaagcctggtcctgtgggatgaaaagataaagttgcattgtggtcacctgcaaggcaggccggggacttgctcatctcccgaggtcttttcaggagggaggatgccatgctgctgagcagaggctgcaagtggtcaggattgctctgcgtgttcagttcaaagggctctggagctgctgcctcctctaggcacaggtcagcccattttgaatggggcaataaatggtgacagcaaagccacctgaaagcagcctgacctggtggcttgtgctcctccaaaccctgggcagaatctgaaagcagcaaaactagcttagctaacaccagtctgcttgttcctcagaaacttctagaggtccatgagttaaagtctctggctttactgtgagttcaaggcaagggctgcaattttagggtttacataaagagtttgccttccacagacttggtgggattcattccctacccctccaccttcttccagaatctgtctttataccctctcagctttcccctcctctgctccctctgtggtaccaggggctctgggtcccctgtgtctgtggcaccactgggtaggcatagctgtcccctgcattctacccatgttgccaagatgtataggcagtctctcatcagtccatgcatctcatcctctcctgctgtgatgctgcgtgaccccccagagggtcagaccggcttgttcttctttgggtctagagtctcccaaggaggcaccgccacagactgtggcatcacggttttgttttacctgatctcaaaatgactgatgcaactgggatgtctttgctgttctttacatggtccaatcccatggataaagccatgcctcgctgggtggtataacctcctgcacgcacgatgattaatctgtgcttgctcccttcctctcctctgtggctcactgtctagatagagcttgacttcccacccctagccaatcacccacttttgaagccaagaagacagcttattttattctttatttcttcgccacaggccttcatcagagtacaagacctccgatatttagagctcatcagcagcattgaggtaaaagatgaagcatttttccttctcaagaaggcatacttggggttcctgttttaggggcagcccttctaacaggcaagagccttgaggacatgggaacagagctcactggcgtctgggcatctgggccacagccttgctccgggggcagagtggccacactgggggagacaacagcaggtagtgtgagctgttgtgtgatagctgggtgaggcacatgggttccggatctctccagggttgggtttctagtctgtgaaaagggattggacctacctcacaggctgctgtgaggattcagtaggttctcaggaactggtttgcatcctcctggtggcggatagctggtcaccatcctctcagactccagtaatctgatagtgttggaggagtttcccaaatgcacatgagctgagctccattccccagaaatggacctggggagcaaggcccacagtctgaactgagcgccccagagttctggagcaacccctagccctactgtttctggctgagaatattgaccttgtcatccaaacccaataggcctgcagtgtgctaaggaagctggttgtaggtatgccatttgctgggtggtggtcaacactatgctttttttttcttttttttttttttttttctgaaacaaggtctcactctgttccccaggctcaagcgcagtggcacgatcacagcttactgcagcatagacctcccaggctcaaatgatcctcccacctagcctcccaagtagctgggaccacatgcatgtgccaccccgcctgattaattttttgtatattttttagagcagggttttcccatgttgcccaggctggtttcaaattcgtgggctcaagctattagcccaccttagcctcccaaagtgctagcattatagacttgagctaccatgcccggcccttagacactattcttaatttctgtgtatctcagtgctgtctggctgtctgttaaaaggcatatacattttttctcctgaacatatttattgtgaaggtatgggaatgtgagatacatttgaattcccagttggaaacagtgaggaaatagcaaatgtcttgtccctctcattcatttccccataataaacacctgtcatgggccagcccttgtgccgagctcagtgggcacagagctgaggaggagagaggctgacaggagctcacagcctgctaagcctcataacgtaatctgctctgtgccacatgcgtgatttatgtgaatgctgttctagatcctcacattaactgaatgaggcaggtactgttgctctccctattccatgcaggaggaaattaaggctcagcaagacgatgccacatccccatgggtccatagccaaaaacttggtggaattcaagcccagtctatttcctaagctcatgctctctcggccacataccctccctacccgcgtgttgtaaggggcatctgtatattctggggtttacctacccgcgtggtaaagggcttgttcggagctattgctcaaaatgcccagtgctgctgactttcacttgtaaatccactggcctggatctgggggtcttcacctgaagccaaggagcataattttcctctctacaaaagtaactgctgtggggtccaactattacttgtcacatcttactggggtcaaaatgtagtcctctcctcgtatgctatgagctgggaagtgcgttaaagtaaactcctaagattgtctcttgaaaaaaagtaaagtgcctttgagtgtgctctatatcgactgcctgcagacttatttgcacacatctgggtgctcagcataattccagagaactgcagatccttagtgggtgccttttggataggggagatgttcttgtcctgctgacggggggaaagaacctgcccatgttgacatgcacctgctgagtgccatagatcgtttttattggtcatggtgatatcctggggcctagaatggatatggcctgaatttcatgtctagtaaaaccttttttgtttgtttgtttgttttttttttgcagagatagagtctggctatattgaccaggctggcctacaactcctgggctcaagtgatcctcctcttttgacctcccaaagtgtagggatcacaggtgtaagccaccatgtccagccaaaatcaatcttttatctcacggcaagatttcaattcatttccaactattaggagttagtttgtttgatgagcctgagctgtgtgcaggtttttagaatgataatttctgtcagtatggaagcatgttgcctccagctgttaaaactttcaccagcttgtctaagagtttgattcaatgtcttatcgtcctccaatatgctgctctttctagaaaacaagcaaaaggaaactgctagggctcagggtttgggtgctactgagtgtttacaaatactcgagctgtagacaagcgaatgttccctgacacagaaggaagaagctttatcctagctgtgctaagtgtgtgtgtgtgtgtgtgtgtgttgttggggacatcacttgcttcaaaagactacattgtgtgatacaaggaatatctggagtcagacagaactgcgtccaaattccagctctgtctgaccctgacctgttcctcttcttgagtctcagcgtccttcactctaacacttgggtagtgagacctaccctgagggtcactgagaggaataaaggggccatgtgtgtataaagtatatacccagaacctagtggatgttcagcatgcgggatttcttaccttctctttagaagtagggatatcgtaagacttgtcatcctattttattggtctccctcttgggcagaaaccctaaacattctcctgctctgtcatccccatgagccacaactctgccaaacggggcctgcggatttgggagatcttgggagcttaggggtcatggatgagtcagagcacacactattcaaactattccgtcatagccttggaatacacaggaaagcaaccctgaggaatttccattaaacaaacaaaggtttgcatctttttttgatctttgcttgtctggtaaaagcctgcttttgttgtcaagccttcccagcgggaacctaggggagagagacaacagccaggagccaagcccaggttccagtaggaaggcccaggggcctcacttgaaatagccacatctaacctttgtaaaggctgcttcctgcccatggctgcagaggccatttcctttgcttctaatttttccaggagaggaagaagcggggagagaccaacaatgacctgtttctggcagatgtgttttcctaccaggggaagttccatgaggccgccaaactgtacaagaggagtgggcacgagaacctcgcgcttgaaatgtacaccgacctctgcatgtttgagtatgccaaggtaacctaccctgtcccaggcccaagctccagcttggagcccactggtattctcacgtgcggtgtccaagttattttccccaagagtgctgcggacaaaaactagcaatggtctcagaaaggatgtggggaaactggtaaacaaaggacccatctacagccactggttgaaactcacctaaaactgacctttaaggctgacaccaagggggcagactatggcagttcagaccttcatcagtgacagggctggatggctgtgggtctacaccagcacaatcccttcattgagttgagggctcagggcttcagggctgtcccccacaaatcctctcaatccttgtcaggagccgccaagaatcggtgtcttcaggcaggagccggtcctgccgatcatgcaggacgacatggtgcctgccagccaagtttcccatagcacctgctgattgtcctggacttctcactgggcttctgggaagtcaggcagagcctccgccctcccatgttagcgcagcatgcctcacgcctgccggctgcagagtggctaccatgtggttgcagtgggtgatggcagagattcccttttgcattgggacggcccccatgaaccttactccccagcagagctgggccttttaaggcaggtgtaggagaggagcttcctggaccaggctcctgatggcttctgtgggaaggagttgcactaaggagcccagagcagtcaagacatttgcagttcagtctaagcaaggttcaaagaggcttcggtacactgggcaatgagggtcttccttccatcaaggggctttgttaacctgccttttctggaagtgtcaaaagtggctctcagtatgttatgaagtgactcatcagccataacctattggtgggctactaatggtagttctccagctcacaagttcaagatggaaaatcttccccacttttttctgcttttctattcctgaagatggctgtgctcttccaccacctgttcgaccctggggctgaaggtgtgtttggtggcctgtgatgttgcccaggacctattgttcatcaggacttggacgagctcctgggccccagcctgtcttttcaccttagtgatttcttcactccgtacctgagacccagggtgttcaggctccctctactttttcctcgtcacctttcctaccctccctcaggccccaccaaagacacctagaagatttcataacacattcatactgagatcaccagagtcagtgcatctctgcttccggggataacaaaattttaactcaggatgaacccttaagggatcaagaccctagaggtagaatttagggttgggaacccctgaggcctcctcaaggaggcagctgtgctgcagtagaaaatgcctgaccaggctgggcatggtggctcaaacctgtaatactagcactttgggaggctgaagtgggtggattgcttgagctcaggaggtcgagaccagcctgggcaatatggtgaaaccctctctctaccaaaaatgcaaaaaattagctggtgcctgtagtcccagctactgggaggctaaggtggaaagattgcttgagccccagaggtggaagttgcagtgagccaagatcacgccactgcattccagcctgggtgacagagcaagacccatgtcaaaaaaaaataataaaatgcctggccttggtgccccagagctggtgtgagtgcagtttctttctgtgggatgacctggggaaaggctcttcggtttgccaaacctcccttcccttctcagatggtaatagcgacagctcagtttagtcatgagatttgcacagaataatgtataggaaagcgcattagaaatgccaacctgtagaaagattaggaagatgagaggggccacacgtgaccacagagtggattttcatacctctctccctggctggccccactcctgcccctgctctgaggcccctccttacactgtggtggacttcgtgtgcccacagcctcccaccagaactgcagcccatttacacactccatttgctccgtctctctatgaaggtaaatactctgggacttgtttttggttttagtttttgatcactattccaaggaggttggttccttttcaatcccccctgcccccacctggtagtctgaatttgagaaatatgtacctacacattatgtggggggtgggggagatctagtcctgattaacgtggcatatttttgtttacttgaaaattgcttcccaagattcaatctggttttcagaaaattttaaaattacattcccacgtacaaataaattgtatgctttctggataagtgacatgtttatatggtgataaagggaattataatgctcttaactcttatgtagtatgttcttatcaaaatcaccaagcatgagaacactgtttagtctcattcatcactcagcacagcctctttctgtccacttcagggccaagtctttgccatggccccagataatgtgtaacttagcttcaggaaagcaaaaagcctttgaatttccagtttgctgagccttgaaggaagcttttagacccagcttcaatgaagtcacagctccctgagtgaccagctggcctaggcttatggctccctctcagcctctcacccttgccgtggtcacccctggtcccctgagcactcactgaagtccctttgaaggacatttctagtctcctaagatgcctgttttcctccagctgccaccctcatttcaccagccaggtaggcagggtttccagcttcgtgctggcatagagaatccgcgccatagcagctgccagaaggaaaggtgtgtctgtaaaggcccaaactaggcggggacagcggctgctttccaagccccttccctttgtcagctccagggagaaccaaaggccagccagggggcctgtcttctattgggtcccagcatcagggtatacaatgcgctttcctccccttcttaaaatgtatcatatattaggccgacctaatactctgaaagcacatttaccctgaaagcaaatgagggaaaaaagcgagctaattgttcaagtggatttttagcatacattgactgtacttttctgacacatgagtgttaatcatggggaaaggagtgctttttttgttctcagtgaggctgacacaaagtactctccacagggtacattattcctgagacaaaccacttcttaccagtaacatagacctgggctgtaagtgctcccagtttccctttttgaaaagctccacctttaaaagctgcctcaattctggcaaactcccacgtgtgtattttgggtaactactctgaaaagaggtggtgttctgaggctgtttctcacacattgtagggccagcccagagaagctgggcataccacttcagaggtatgctgaggccgaaggaacacaggccctaggcctgatctctgagcctccaggaccacagccatctcttccttctcaggtcctctcctgagcaccttccctgcctcagattcccccatggcctcctgctgtcccactgtcggatcaggttctcacccctgcagacctgacctcagcacaggatccctaaccattcagctgagaagcaactaaccagagagatgtttgcttgttatctgttccaggaaagtaactggggcaaagacaatgtgatgattctctagttcagggcacagaatgtttgctggtgactcagagagggcatggagggcacggagggccggcaaacactgtaagtcattttgtttgtgtaagtttaggggaacccatgctcagcctcactctgaagcatgtggtatcacccatatgatctgaataagatgacaggtctcgatatgtggaattgtgcaccaggttgtctcattgctgtttaggaacagtcctgtattgaccaaactatgtgagagagagacagcctgatcatgaacccccgaccctgcagacttcatgtgcagtgccccaaatagtctagaaagtgttgtttagccgatgaacaaatgcccatttgtgagacgggaaggaagcactgggggccagcgtccctgatgctgtcccaggatcccccaggaacacctgcagggcagcctgagatcactcttcccgagacctgggactcccccaactcagcccctcagggccgggccctgcctacctcctggttgcctgcttcagccatgtggagcccgcccttgctgctagaaaagcctgatgtaacgctggcacaggaagttctgatccagagtgtttttgtttgttgtgcttcctcaggatttccttggatctggagaccccaaagaaacaaagatgctaatcaccaaacaggctgactgggccagaaatatcaaggagcccaaagccgccgtggagatgtacatctcagcaggagagcacgtcaaggccatcgagatctgtggtgaccatggctgggttgacatgtaggttttggtccctgccccgagaagcatttggcagcatgtcatcacatgtcacctcttgactgacaagggaaccaatagtgcttttctaattatctaaagctaatgtgatagtggctaggttcttcaggagacacagagattgcacaaggcagtggctgccttccaggagcttgtggagtcactaggggaagggatggtggggaccagggaagaggagacaccgggacatcacagctgccatttgctgagcgctcactacaacccagacgctgtgataaccttccaggcattaggttttccacctatgccatcagggctggtgtctcctcgcccaccttgcagatgatgaaacagaagctaaagggacaagttattcccaaagtccagatagctggaaagttgtagagctgagctttagcctctgatctgctggatgtcgatgccaactacgcgtgtaatggtaggaacaaaaacaaaacaagttccaaatccatcagggaagaattcttatgggaggaaccatggatatcttctcttaggagacactctttccatgaagggaccttaaagaattccaagaggtaaatagagatggcgggaaaggatatgcaggcaggaagtacagcagaaacacagcgagttggctctggttggaataaaagacgtgtgggaatgggagggtgaaggacatgggctgtgggttgggggaagtgggctggccacactggaagggcctccgatgccaaacggaggtgcttagatttgccaatagtgagtgaccacctacagtcagacaccccctcaggcaggcaggtagaatggagaccagataactggctagtgcagtagagcaggagggaacttggtagctgagggcatgagagagaagtagcagtgttagaaccaagtggcccatcccagggtgttggggcagtggtgagtgtcaggctggctttgctctgtggctgctggtgggttacaccattcgtcaaggtggacaacagggagaggagggggttggggtggggcagcactgagacaggatggattcagccttgggactcagcacaccggaccttgagggggaaggctttgtcctcccagtcagtgagcttcaggctcaagcatgtgcacacacacgtgcacatgctgctgcggtaggcaaaggacacgatgggacaagctcctgagggtggctcaggctgggtcctaaaggctgttgattcttctggaaacaacgttgtggtctacaggtagcagtggcccagccaggatttggggatatggaagaggctggttaatgattaaattgtttccttgggtgctgccatatattaataattggtgtgtgggcccctcacaaagggaccttgatggatgtcctaccaccccatctttttcttgtccgatagtaatttttttaaagacagaggcacagattttgttccccacattattctttaaatgaaggggttcatatagaagagagccaggcagatttagggtgctctgttctctcttctggtttttcttgtcactttcatttgtaagtgctatagtatcaggttaccctgagggtacttgagtaattcaagaaacacattaagcatgttctgcttgctttccagatgtggctataaaaggtgtctttcctccagggacgttgggtgtgatgggtgggaaggtttctaaggctgtaagggctgtctatgccacctttccctaaaaacgtgtcctttttctgctgagcagtgttatttttagatgccattattattctaagtgtagactgacaggcctccgtgccttgcctgtctccagacagggattcgttacagctgcttctccttcctttctcaccaagactagcctgggtagaaccctttctcctgggagagttagtttgactccaaattccagcctgaccagagagaacaagcgcattctatccaggcctcatgtccccatgagtgatgggagggctgctcaccatggggaagcagtggtgagccagtgggtccctgcagctcctccctctttggtcagcacgttggccaggaggacagggaagacttcctgcaggcctttgtccagagctcagagcaggccccacactcacctcttcctttagagggcagtcattgaggtattcttatgccttggcatccacttttccgtgagaattcctgcacccgtggtggaaagagtgctgggcccagtcttgggctgggtgcttcaccttccccacagactttattcttctcatctgagagatggaaataatcatgcccacctcttagggtggtgaagattctgatttcacgcatgggaaagctcatggcgtcatctgggtacctggtaggggattaggagataattgtttctataccctgctggatagctcagtgacttccgagaaagacacacaaggtggctgacaggatcctgtaaaggccacctctcccagatcctggtgatgtttctggagtgtgtattcatgcatttaataactacccactgagcaactcccatgggccatggcatagtatcaacactggggaccacagaatgaatggacatacggcttgccgttgacaagacccagagcccaccctcctacctgccccttccctctccaggttgatcgacatcgcccgcaaactggacaaggctgagcgcgagcccctgctgctgtgcgctacctacctcaagaagctggacagccctggctatgctgctgagacctacctgaagatgggtgacctcaagtccctggtgcagctgcacgtggagacccagcgctgggatgaggtgaggggaaagcaggcctcatgggctggggccccacctgagccctgggacacaggcgggtgggtacaggggccctttggggttcagatggagagaagctgccctcgtgatggaaggaacattgggctggcagtcaggtaacttaacctcgaattctctgagccacagaatcgtggagggcctttccacttgtcccttcattcagtcattgagaaaatcgttactgacagccagctctgccagggtggtgacaggcaccggggatgttagtgtgaacacgacagctccagtgcctgctgttgggctgagctgcctctgaccagcaccacaggctcagacacatggctgatgtggagatgcacctgcgtgacatttaaaacctgctgggtagcattttggcagaaagcaccatctgtgctttccagatccagactgtgagagccatttcaggggccagttttttccctcccttctctgcccccaccccacaaccactacttctctctggtgtcaggggctgtaaagaattagccaggtcagcgagaaaggtggccagcctcaggctggcagaagcagctgatgctgccccttctatggctcaacccccaccctccagctcactggctccctgttccctgcagagaaatccatccccgagaggattaggagctgtgccaagatcctcccccgactcacccacccacccatcatggtccattttagagtgaaagcaaagccttcactgagaggagccgtctgactgttgtctgctctctgaacagctccattggtgaggtgatgaggtcagtcatgagaaaaggtggggctagggacagaggcaatggtggcttctcaagagaaatttattagatttcccaagcagcatagattagagcatcttagaatgactcagacctcgctgtgcatcaggcagactttctcaccatggctcatgtccggttctcctggcctgacaggtggttctggggcttaggtgagaagcagtcagtgggtccatacagcacgaagcccacagtcatctttgacaactgataagaagtggtgatgatgataatgtcaattctgtttccttaggtgtcgcccgcaattaaaagaaatctgtttgcagcactacaggagcccacgcaaaccctcaaaataaaatgtttccgattctgtgccgcttctgtggtccagaaacagactgtgttgttactgaatccagtcgcttgcatattgctgttaattgccttttgttttcgaagagctgatttgtttttgcatttctgtgggtagttttttgggggaggcactctccccctctgagttgtcaggctggcaaaatatgatgtccctaatggattcagccaagtacagtgttttcatgggggctgcaggggcagctttattaagacttcatttgctccttcccccaggcctttgctttgggtgagaagcatcctgagtttaaggatgacatctacatgccgtatgctcagtggctagcagagaacgatcgctttgaggaagcccagaaaggtaggcaacacagactgtcaccttctagaaggagcaggagaagttactgccaagacatacatttcaggaaggctaccaagcccttcccatctgtagatcccaagatagatgacttcatcctggggatgtgattgtttggtggtgaaagactgtggagcatggaaagaccattggccttggagtcacaccctcctgggccacactcacttgccacaggcccttaagaggtgctgcctcctctccaagcctctgtggttactgagcaaagtgctgtgcactgcagtgtatcttcccgtttaatcctcgcaacagccctatggtatagctaccatcattatgattcccattttgcagatgagaaaactgaagggtaaagaggtgaagaaatttgcctgaagtttcatagctaggaagtggcagggaggtaatgtgagccagggtaccatgaggacaataagggaggattgccacacagtgtgaggcatggtctctactgagaatagaaactcagcttctatttctggctcagataaacgggtgacttctgctcctcaagaattctgttggtaaaatgggctgcacacagcgtacaacagcatctgaaataggagttaaagcaagtatagaactttcgctgatgttattaatcatattttttaaagttgacttccctctctgtgtcaggccctggctgagcacttaacctatgtaaccttgaatcttgccaacagctgtgcaaggacgaagaggctaaatgtgccatgccaagtcacaaatctagtcagcagcagagccagaattggaccagtacctctctgactggggaacctgatttttctgttttgctgcctatttagccttctaatggaagttgggtgtttgatgttccatagcatctgatttacgcttctatatggtaaccgttgccctctctggacacattgcagaacaaatgtctccctgttggagcccctcaaccgaaagccctcattgaaggttagcgcattctctgctgcttcagcatttccagagcacccagttgctgaagtatctgcatgtttgggcaaaacacatcaacctatccatctgtctgtgtctgcccttccaagaatccatcaccatagtaacttggtactcagacaagaggttgtagatgagaacggaacaaaggccagaccttctccttctctgaaggcggaggattaggatcatttgagtgctctcatatggcaagtgtcatggctacaagtgcttcactggcagccaccaacatctcaaggggctggccacgtagtaggtactcagaaaatatctgttaaacagtataggaacgattgagagtttttttgcttgttttcacaaatggttgtgataactgaggcagatccttcaaagtggtcattgaaaagcagtcatttgaagacaaactgaggacttgagttgggcttggttctgggaccttgggtgtgacactttacctccattttgcaaagcccatttcattgctcataaaaagggggataattttccttcttcataagtctgtggtgaggatccagtgaggtgattagcaacaaaagcattttacctccaagtgcagtaaagtggcaggtcctgtttctatcaccttaggagtcacaaaactttgccctggaatgagcagggggcagaacctcactgaagatgagcaagtttcactcttagactttgccctggaatttggcccctccagtttttcctttctgcatgcttttcaaagtcagtcgccttttcccagccaaaaaggaatttatctcactgtactttttccaggatgtagccttggttatttagagaagcgccatcccagcaacgaagcactgcagatgctccaatgagtgtcctacttccaaagcagccctgtgcaagccccacagagctccatcctgcctcctgtgtgacttcctaaatagcatgtgcttttttcctccctccaccactcctacagcgttccacaaggctgggcgacagagagaagcggtccaggtgctggagcagctcacaaacaatgccgtggcggagagcaggtttaatgatgctgcctattattactggatgctgtccatgcagtgcctcgatatagctcaaggtgtgtaaacatcagccagaccactgttttcccaagccccactctgacaccaagataaacatcagaagagctgggacattttaattaaagccctgggcttgtttattgggtgtattgtccataagcctgccttgcagtggcgtaatctggtgtatcatctttttccagtttgcccatcagaatggtatgaggaccgtcctggggttatggttggcaggtccagccctgcattgctaattcagagcatatctctcccctgctacctgggagcccatagctggacctgggtgagcactgggttttaaatttttttaattaaatgagaagatgaacgagagatggctttacagtaacacactccagattcttactcatcccagccaggaaaacagtttcaatattgctttctttcacaagacttcccatgatgtactgaaggagtagtggaagtggaagagacaaggagatgttcttctccactggacaaggccacatgcaggggtgggaaaaacactggcatggaagctgcaggtgacttgtagcaagtcacaatccttcctgagctctgcatgcccatctgtcctgtgggagtcccttgtcctggtccctttggttgctgggagcctcacagagtcatgcttacagtttgaaaattgtcaagcctaggtgtaaggtcgcatttttctgtttgggccagtgccttatgcttctgataggagcagcagagggaagaggcataagatgagcatgaatacagttggtgtctgcctgcctttgtcccagcaggctcttccgacacatcttgggtcttgctgcagctgtcgctcccccaggggaataatctgggagggtgcagtgagagatctggaaaaaatatcctcaaactccctggccttatgccctgtccacctaagaattcaccatcctggagtggccctactcctaagcagagtggctttcccctcactacactttgtccctcaccctggcacagacactgtgtggtgggagaactgatgctgggaaaagtactgttgcctggcccctcctcctggggccagttggcagccacagacactgtttgacacgtttcccctcccacccgctgcacacagcagatcctgcccagaaggacacaatgcttggcaagttctaccacttccagcgtttggcagagctgtaccatggttaccatgccatccatcgccacacggtaaggtggctgggtcaccagcacctgagggtaccatctcctgagctaggggtcccgggcatatctaaagagcagcagactggatggaatgtaacccactggtcacagtgaactgctgaggaatcttggtctcctctgggaagaaaaagtttgagtttctttgattgactgtttgtctgccatgcatcaagcagtgggctcctgaattgtgatccagagctggaatgggccttgctagttcctcagtgcaggctttgatgactcagggaaactctgcattaaccagcaagaggggtgggagttccatgaggccctctccttcagtagggcgaaggcccagattaaccaaaggctcgagatccctccctggccctgtcagtgatttgtgtgttcttcagcaattcactttccctctctgtccctcagtttccttctctgtgaaactagagtgttggcttggtctccagaaacccaagtagttctttttagtcactccctgattcctttgagaaagccattttaaatctctctggtggcaatggggaacaggtgatgggttgtcaacagcctcttcatccactgtatctcctcaatcacccaacagatgttgagcacttagtacctagtaggcaatgtactgagggcttcattgtatcaagtcatttcctcctttcaaccacactttgagggaaggactgtcacccccatgttacagatgagaatgaagccctagacagagaggtctcagaggttattaggttggtgcaaaagtaattgcggtttcagactgaattttaaatcattataactaggctcaaacacatctttattaattaaaataggaaccattatgatcaacacatttttgccaatgagaaataagtctgtttatttctgtagcataaaaatccatactttgggatttgacgaactcttggaaagcattttctgcatcctgctggttgtggaagcattttccctgcaaaaagttgttgagatggttgaagaagtggtagttggttagcaagaggtcaggtgaatattgcgatgaggcaaaattttgaagtattggttgtgtgatgtgcagtcaggtgggtggagaagaattgggccctttctgtgaaccagtgccagctgcaggtgttgcagttttcggtgcatctcctcgatttgctgagcatacttctcaaatgtaatcatttcaccaggatcagacaactgtagtggatcagaccagcagcagaccaccaaacagtgatcatgacctttttttggtgcaagtttggctttgggaactgctttggagctttttctcagtccagccgtggagctggtcatcacggttgtcatgtaaagtccactttttgtcacacctcacatctgattgagaaatgttttgttgttgttgcatagaataagaaaagacaacacttcaaaacgactatattttcattttctatcagctcatgaggcacccacttatcaagctttttcaccttcccaatttgcttcaaatgccaaacaaccgtagaatggttgacattgagttcttcggcaacttctcctgtagttgtgagaggatcagcttcgatgattgctctcggttgttgtcaacttccagtggccggccactatgctcctcatcttcaagcctctcatctcctttgcaaaacttcttgaaccaccactgcactgtatgtttgttagcagttcctgggccaaatgcgttgtcgatgttacgagttgtctctgttgctttatgacccattttgaactcaaataagaaaactgcttgaatttgttttttgtctaacatcatttgcatagtctaaaataaacagtaagtaataactcattagcaaaaaaacataaagcgagaaatgcccgttgaaatgatgtataacataaccacatttaagaatgtattctactatcaaacagcaaattccagagccaatatgtgagtctcagtagtctggcactggagcctgtgttcctagcctttccctccctgtctccttttagagaaagcaggctagtatgttggtttagtgggtaaactcgagagtcctcacacacaaatgacactgtgttacttatcttctctggccttcagcttctttctctataaaatagggataacagcactatgtacttgatgggattgttttgaggattagacgagttaatattggaagagtacctagcacagagtgaccctaggtggcagctatccttactgctgctccaggcaaggcttcacgccagctttccctgacctgctccctccagctgggcatctagcatttctcttttttcagagatgaggtctctgtcgcccaaggtggagtgcagtgtcatgatcatagctcatggcagcctcaaactgctggactcaagtgatcctcctgcctgagcctcccagagcactgggattacaggcatgagccaccacgcccagccttcccgccgttctttgacctctcaaatgccctgccttccaccttgggcatttctttccctctaatctgtgctgacttctcagcacattttttgcctcttgggaaagtctggcaagaaggactcctgacaggctctgtgcatgccgtcagtctagtgttacatctcttcccacagcagggtcagtggtctcaagggacctcatcttcccttacagtctttggctttcctgaaacgagaccccctcagggtccctcatctttatcaggtgctcacctggagagaaaccaccacaaaaggagcccagactcaacttaggctggaagtcagggcccagctcagcctcactttgcccaagccactccagagcctggctctcagctccttccctcagacttttctctcgctgctccctgtcctcttcctcacctggggcatggggctgagggctcctgtctctaacagctgagctctgctccaggacctacatgggactaggagctaaggggcctcagaccagctggggccctggctcttatcccagctgaatcttattaattgggccattccttcattcaataaatgcctactacgtgacagaccctgtgatgagacctggtgacacggtggtgaacaaaacgttgtccctgcagtcagtcccagtctagcaaacaggacaatccctcaggggaaacgtttagaggcctgtgaagagacttcctggaggaggtgtcctctcagccagaaggagggagagaataaaaatggggcaagtgaagtggaggaggattaggaagggtgtttgtggcaaaggtcacagcctgtgcaaaggcctggaggtgagtggtagtttgtggttcagcatccagggcccagcagagcagcactgattcagggcaagactggaaagggaagttcaggtccttcctggatacatggcatctttcccagaggaaaggactcccctgctacctattctctctgggacgttacttagcttccctacctagtgcagtagaaccacaggcagagttcatcttgttcttaccctggaaaggatgtggtctcaggttttcttgggttcttggagctaacaaaaggtatagaaatttacgtgtgaactaaatagaaaatgctaagctctgaactgaagaagtgtagagcaaagtgagtcctcaggagttcagaccaattaggggttaagctttggtggctcagtgatgagtagggcctcacaagacccttcttaagtgctcacaagaaagaggagttactggcctgctgtaatcctcaccatctaaagctttattagaaatgggcaatctcagtttatatacagtgtgccagatgccttcaaaataaggtattcttaaccttttgtagaccctcacacagaaaattccttatttgtctgctgagcttctggcagcctctaggtacgaagaccaatcactaatctgtgctaactgcctcctgttagtgcctatgccaggagccagggaaatgggtcagcagttgaggaactccgcatgtgtgctcgtttggtggcacatcagtcaagctgctgttggaaagcacagaagaggcatgtgggttcatgctggagagggctaaatgcctctgttgaaagacaggcttatatgaatcagtggttatgtcctaagctgcatagaaggtcttctcttttagagctaattggagacaacttgagtagttcagagaaatggaataattaccaactccagaggcagtacagcttggaagaaagacattcttgggctttggaatcagacctgggtttgaacagcagctcagctctgttctagttggtgacttgggcaaatcatctatctaggtgtcggtttcctcatcagtactgtgaggataaaaatgcataccacaaggttattatgttaaagaccagatgagacagtggctatatggcgctcagcacacagtaggagtaggtgctcaataatcagagccgctcttgttgatgtcactcagaattattggtgtctgccttttggcctggcccagcagcagctcttgaagaactcaatccctgtttgcttttctctcactgcaggaagatccgttcagtgtccatcgtcctgaaactcttttcaacatctccaggttcctgctgcacagcctgcccaaggacaccccctcgggcatctctaaagtgtatcctttctcttatccctcctccgtcccaccaccgttcttgtctaatggccccaagaaattccttccagagcactttcctggcagaaccttcctctctcagcaaccctcagggaagacagagaactcaccctcccgctgctgtttggctatagaggctcagcagggaggcccaggggcccaggccaagagaagatgagttttcagggctctctgagctgaacccagcagtgggtctctggccaacacactgtcccaatccctcctagaacccacagatgagggtgtgactgaaatggaagaagcaccaggccttcaggcttggaaccttgggcacttctccagactggggaggagggagtgtttgttcagcccaggtatacatagcaccttctgtgccccaagccctgggccaggcaccaggtggcaaagctgccatcaaagagggaggtcacaagttagggtctggtttggtggatgtgtgctgtgtctgagggtggaatgaagctgaggtcagggccatggtcagggaagtttacctggaggaggagatgtccatcatgcaagctgaggcagccagggaagatggccaagtggatgttccaggggaggacccagcatatggagaggcaagcaaggcatgtgggagagggtgaggggaccctgggtgggaggggccggagaggcagcaggacccaaggcctgagagcctacctttgggttttcctctcttctgtagccatcgagggccacagtggtaccataagcagagcaggtgcctgaagggcctgtgcagccagatactggatcattaccaggcaatgatccagatttttaaggtcttggatgtcaggagacataattgtccctgttcttttctaaatctcactgtactctcagctccttcccagccgcagccccaccttccctctgtaaggaaaacccactccactggagaagacccagagctccttgttgtaagaattggcctcgctagaggattccaggcccattatgtacatttcaggggaaataccctcaaatcaaggggtgccttcctggagtcagacctctgctgcatgcgtctccgtctttccccgtaggagcagtcagggctatgcctgtgggggctgagcacctgtactcatcctttccagcaagttctgtttgagtcaacagcttgatagaacctctaccctgagccttaccctgtgccatcccctggggacctggaaatggctcctgacagtccctgactttgaggagtcatgctggagacacagaaggaaactctccacagaactgctgaagtggacggggctgcactgcagacggcgggagcaggaacactgggagagatgcgggaggaagggcaggagggcctgggggcagccaacatcggaggtgacctgagaggagagcacaaaggctcgtcagcctctggctgaggagcttcaagggggccccagagcacaggctgccgctcagaaactgcccaccaggccctcggggaagggtgtgcagacagagtggggtacacccaggggcctcagagcagggttgagggtggctccccagggagtctggaccaggccccacctggcagggtgagagcagagtgccctttgtgccaggcatcctaggagggcctggctggcaggtttggtgaggcaggaagagccattttggcctagtcagggtataagatgagccatcagcaggcccagagatgctaagcaaggttaaagtattaatggaaactacgctgtttttatctttggaaaaattcctgggccttgccatccgagaagtacactcacctctcacaagcgcacagagccttcctcacggtctttcctctgccttcccggcaccagcacaagctgtgttccagcctggggctcactccaaggacaggcagtgccagctcctgggcctggtgttgcccctgctgtccttaaccctgttcacggcaggaaaatactcttcaccttggccaagcagagcaaggccctcggtgcctacaggctggcccggcacgcctatgacaagctgcgtggcctgtacatccctgccagattccaaaagtccattgagctgggtaccctgaccatccgcgccaagcccttccacgacagtgaggtgaggatgcagcacccttgggcaggtggcttctcctctcccttgaggccatctcatgccttcttgcctggcctgggttccgtttgaagagagacagctgcagctccctctaggctctgtgccccctgctcaagcctggccatgccagctcccctgtgcttccctgtccacctcctgttctccccgcagtccacctggcgcccgctcacagcccccggccccggcctcagccctcagcctggcctcccttgctccttgccctcccctaggcaagccccacacctctgtgcccaggtggctctgcctttaccccaggcctggccccagagctgactcttactctagaaacctctgccctttctggaaccaggctgtagttctccagcaaatctaccccacactcccaacccacattccttcaacccagccagcttccttctttcacacatcctccctcaagctcagagcaaggacttggttcagacagacctgggttcacatcccggctccaccctctcctagctctgtctccatctttctgcaccttgggttccccctttcccacaggtagttgtgaggctaaatgagccagtatagtccacgtgctccgcacggtgcccggagcatggtaaatggctggctaatggtggcagcggccactgtcattcctgccaggggaaaagtgccgttgagcgctgcctgtgcaggtgtcttgggcacggggacccaagtgacagggcttgggtatttcggcaggcctttatcctgcttccccatggcatggagctcctgggcccggcgccccttccctgcctgcccacccgggtggcctttcctcttggcagccaggccccaggggcctgaagccagagtccagggggaggaggacacgtgcctgccccggcccctcgggagtccgtggctgttttgtaggagttggtgcccttgtgctaccgctgctccaccaacaacccgctgctcaacaacctgggcaacgtctgcatcaactgccgccagcccttcatcttctccgcctcttcctacggtgagtccctgcatcctgagcatgtgggtgggacagcctgtggacagccaggctcactccactgctctctggcctcaggacgttgggcaagggccaaaggcctctgaatgtccctgtttatgaaatgaggacactctgacgcccacctacctgacacaaggagtcactgtcggtgttcccagagataggacccactgctgcccaaagctgaagcacccactctgggaacctggcgcagggctttacataaccaaatgccccagaaagagagtccgatggctttgcattcagaccaggaggctgagataggttatcaaggcccagctcctttgatgttgacagaggatcagaagccccttcccaggagctgagcagaggccacacacacacacagacacacacgcacacacagactgcccctgcacacacacacatacagaaactgcccctgcacacacacacacagactgtccctgaacacacacacagactgctcctgcacacacacacacagactgcccctgcacacacagagactgcccctgcacacacacacagagaccgcccctgcacacacacacacagaaaccgcccctgcacacacacggagactgcctctgcacacacacacagactgcccctgcgtgcacacacagactgcccctacacacacacagattgctcctgcacacacacacacacacacacagagactgcccctgcacacacacagagactgcccctgcacacacacacagagactgcccctgcacacacacacagagactgctcctgcacacacatacagagactgcccctgcacacacacacagactgcccctgcccacacacacagagaccgcccctgcacacacacatggagactgcccctgcacacacacatggagactgcccctgcgtgcacacacagagactgcccctgcacacacacagattgctcctgcacacacacacacacagagagactgcccctgcacacacacagagactgcccctgcacacacacacacacacggagactgcccctacacacacacacagaaactgcccctgcacacacacagattgctcctgcacacacacacacacacacacacacacacacagagagactgcccctgcacacacacacacagactgcccctgcacacagacacacagagaccgctcctgcacacacacagagactgcccctgcacacacacacagagactgcccctgcacacacacacacacagaggctgcccctgcacacacacagaccgctcctgcacacagacacacagagaccgctcctgcacacacacggagactgcccctgcacacacacagagactgcccctacacacacacacacagactgcccctgcacacacacacacacagaaactgcccctgcacacacacagattgctcctgcacacacacacacacacacacagactgcccctgcacacacacacagagactgcccctgcacacagacacacagagaccgctcctgcacacacacatggagactgcccctgcacacacacggagactgcctctgcacacacacagagactgcccctacacacacacacagactgcccctgcacacacacacacacagaaactgcccctgcacacacacacattgctcctgcacacacacacacacacacacacacacacacacagagactgctcctgcacacacatacagagactgcccctgctgcctcttcttgcttttggtgaagctgccagtgggttgagaagcaactctgtggtcaccccacctgcctggcggcaagtcctttgcaaggcctccagccccctcagccctttctctatgccctccagacgtgctacacctggttgagttctacctggaggaagggatcactgatgaagaagccatctccctcatcgacctggaggtgctgagacccaagcgggatgacagacagctagagattgcaaacaacagtatccatgcccttggccagagcctgtgtgtgcggctgtgtgaggggtctggggacaggcgggaagtaggagggcccagtcccaggggatcgcgggccatgctgagcctggccctgtgttcccagagagattggagaggcccacatgggacagggacagggatcagagatgggcagacagctggccagggcctaaggacccagaagtggcaagtggcaccttggtcttcccgtgtgggtctcccaccctcccctgacccctaaaaggcactggctgtgcctctgtctgtgcatagctcctgcatagccaacatgggacatgatgtcatgatgtcggtgttggcccccagctcttccactcaagtcactttcgcatgcaagtgacagagtccaaaactgacaagctgaacaagcaaagggtgtgcaaggaagccccaagcaggagaggaagcttcctggcccagcgctcagtctggtcggtcacaggctggctctgcctctcttggccgcactgtcctctgggcaacttcattctttggcagccccgtggtgcccccataacacagagatgtcaggagcagtgccagccccacatcccctcagccttatagcccccagaaacagccagctttcctctcagctgtggcagtgaaagccccggggcacagctcagcctgccccttggccaggaggatgcaccagggcagttgtccagggcaggccacacttgcaggctggacatgggaggggcttctggcagggaacagcacacacgtggcctgaggcctcgctcccttgcactgactgagtctgcaggcctgggggctgtaagcctgccttccttgcagctcccaggtgctgccacccccaggggccacactgggaggagggaagctcagagagctgcttgctgaaggaaagacggacccatctctgccacccaggctccctcaggtgccacagatgatatgtgctatggtgctggcaggtgggtgctgtgcccactccaacttggtaccagcagtccccatgtcctgggcctccctgcaggacccctgctggcctctgttaccagccccaccactgtgggagaggggcggtttccagggacctccaggtgagtctgacccgccctggggtcagcagggactctcgcccctgtctgctccatcacaagtgcccgcagacccccagcagccactgaatgtttctccaggatccctgggcccatcccctccgtgcctacccgcagtggctcacagggcccgcatgtgcttcccactggccctgggagctatggtgtgtgtggcctgcgaggggaatgggtgagggcagcagggccagcagagtcccttccttctgattccttggcctgagccccctctgttcctccacctggaaaactcttccactggtctggctgcccttgagtcttctcacaggggtgtagggtggaggctagggtctgtctccatctctgcttctgattccatccttgaccagatccctccaggctcccagattctgcggctagtggagaccaaggactccatcggagatgaggacccgttcacagctaagctgagctttgaggtgagggtgcctctctgggtgacctgcaggagggcagcctccatcccttctcctgtgcacatggggaccctcagctagcgcagtggtggaggaggattggccagaacttccagatgtggtggcacgaaggaggggcaggaccccttcctgtggggtgtgggagccatggctgcccccgagggaccatggccaagggcgcaggtctgtggacagggaggcagcttcagctctggtgggaggagcttgccactgttagggtcacctgggtttaggaagcaggtcctctctcaccactgccaaagattccaggatcataatccacacagatgtctcactgtggctgagtgaggacactgtgcctccttcccgcccaccctgcagcaaggtggctcagagttcgtgccagtggtggtgagccggctggtgctgcgctccatgagccgccgggatgtcctcatcaagcgatggcccccacccctgaggtggcaatacttccgctcactgctgcctgacgcctccattaccatgtgcccctcctgcttccaggtaggtggccaccctggtagctcacatgtgcttctcttggccacttttcccttgcccaaatgtccctctgggaggcgtggcccctgggaggaggggcacatccatggctccaagttgggacagaggcttgtctgtcctctcccctgcttgcattccatgtgcatctaaagtggacttcactggcccctgcgctgtccacatcctccccaaatcctgggggcccagcaagcgtgatgtgcccttgaccttcactcagaaaacaagaaaccccacagccccctcccatctccccttccagccctcaaacaaaggtgctgcaggtctgtgtccagccctgaccactgccaagccccctccccttgagaggcagtgcgtcctggccccaggcgtagggctgatgagcactagggcttcagcctggtcttacagctgtcttcccttagatgttccattctgaggactatgagttgctggtgcttcagcatggctgctgcccctactgccgcaggtgcaaggatgaccctggcccatga

SEQ ID NO: 15632 - DNA, 32850 bp, Homo sapiens
aactattcatgggcactcacagcaaggcaaccccatcttgtaggagggcatctgtccccagggcagggatcaggagagctgtttccagaggcttccagggtaacttggagcaaatcacttacctttcttggactcagtccctggaagaagaggccattccagaccgcttcctcccacgaactcattcattgtgtcagcaaacgtagactggggttctgctgagggaggccgatacaacccaccactgcccacggctgtgcacggctttgctgtgggaacaggcctgtaactgcggcacaacctgcgatctggacaaagggcagaggaagctgagactctttcccctggggtgggggcttgaggggcttgggaggactctgcagaagaggtgacatttcaacagggccttgaaagccaaataggtattttccagaggcagagtggggaggggcaaaggcattccaggtgagggtgacatcctatggcgaggcaggcctgtaggtgggaaggaggggaggatgggcagagagtttgtgctgtggagcacagtagcccagtcatgagagaggtgcaggatggagcacacagggtgggctgggcaggctgggcagggtgctgattggcggctgcagggctgctccccaggcatgggtaatcatcccacgcatctggaggcaggctctgtatgcatctggttctttccatggctctgaaaacagtcttctttttttcccttgatgaaatcctgcagtccgctcccatgtaccagtacctggataggaaactgttcaaggaagcctaccagattgcttgcttgggtgtcacagacactgattggcgtgaactggccatggaagcgctagaaggtttagattttgaaacagcaaagaaggtaagcatctagccagcaggagctggagtttggtccttgtggggtcccttaagaaggcagatggggacccaggtggcacggagaggccatagactgcagcagtctctggagttaggctgacctgggcttgtatcttagccacttcctcactgtgggcctgggtaggtgacaccctttctaagattgcttctctatagacgtaggatgatgacaggccccatcctcacaaagctgtgaggatcaaatgggaggatgcctgtaaagcctgacccaggagcagcatgtcagattctggctgtcactcttattagctgttctctgtgggaagcacctgactagtagcctggcacatcacaggcactccgtaaatggcggcttttattatcggtgtagtcactggccatgatgctgcacacaatgctgcttttcttagcatctgccaactaaggtgggagagatggtcaaggtctctgattctgacagcaatgtgggcacttcccacgtaccttcatggcgggattcatggacttgattcgttgtgtcctttcctggcctagtctatgaaagctagagagatggctgaaaacatctgacccctctctgcacataaggaaaagcccaggtatgttcctgagctgtgtttccatctagaacctcagatggaggaaggaatggcttccaacctccactcccctaccccttccctctttatctccccacagtcaattaatgagctgctcattttgtccatattcccgggctgacattgaaggagtggcaaagagggacgtgatgcccgccttgggttagatcaagacttgtaggcatgaagagaggagactggaccagaccaggactaagaagcctggctgagaacgagctgtgtcacataaggggctctgggacctcaggccagccactttccttggagccccagtcctcccagttctgaaatgggggtggtgagaatgcccgctgcagtcatgaggcttaactgagatgttgtaaaggggaatttaaatcagggatggttgtgcagatgctagccattactaaacaagggaagtgatcgttgtgtaacaatgatctagattatatttttagatgtcctcagtgtaggaaagtggagatggaggaggctgtaagaattcagaggaggggccaggcgcggtggctcacgcctgtaaatcctagcactttgggaggccgaggtgtgcggatcacaaggtcaggagatcgagaccatcctggctaacacggtgaaaccccgtctctactaaaaatacaaaaaattagccgggcatggtggcaggcgcctgtagtcccagctactccggaggctgaggcaggagaatggcgtgaacctgggaggcggagcgtgcagtgagccgagatggtgccactgcactccagcctgggccatagagcaagactctgacttaaaaaaaaaaaaaaaaaagaattcagaggagggaggaggcatctctatggagggagcttccctctcctgccccacccagaaatgccagcagggagggagacgacaaatccctagaatagaaaggattgtaaaaagccacaaggtttaatatgagtgtttactgatatttttataaatatatatatttttatatatttgtttaaatattgagacggggactcactgtgttgcccaggcaggtcttgaactcctgggctcaagcagtcttcttgcctcagcctcccaaagtgctgggattacaggtataaaccaccacacccagccagatttactatagttgaaaagtaagtgtatgtggtatatatctattgtgtacaacatgctgttttgaaaaagccacatgatattgaagataggctggatgttactatttcatctaaatcccgagtaccccacctctttactctgtgccaggcactcaggctcaccagcttggatatagtggttcctagagatggacagccatccccactagatggcagagaagagctgctgagctcccgccagaccctgagcagagctgcaggttcctccctattcccaggcttccctctgctgagctcattcaggggccttgtgactctgaccaggcaccctgacgctgcaaaatgtgtcaggttgaaggaactcggaaacagatttattaatgggcaaatcctagacactagcacagctgagctacagctagaaagacccttgagagggtgtcagtagcaggcccctttccacaaagaagatggttggagcccagaagcagagaagtaggctcagagcgaggactcagacctcgaatgctcctttccctcttggccactgtgctgggctttgcagggttgccctctcaaggcgctttaaggaaacccagatctagagggtgatgtgtaagacctacagcttgggacacaggtagtcttagccctgtgttccttggcccatgtgatgcccgcattgcccttttctacgaattcctcttcacaaacacttgtttgccaggttctgactctgatgcctcccttaacgctgcctcccacccctgctcatgctcagaccattcatccgtgttctccaggcatgtggttcgtagttggagagctcttagctctgggaggtgtcatgatctgtttaattgaccagctttccctgttagaatgtggacctctgaattgtggagggggacaggggccgagacatgtttctccctgggtcctcagtctcttgacaggaagcctggtcctgtgggatgaaaagataaagttgcattgtggtcacctgcaaggcaggccggggacttgctcatctcccgaggtcttttcaggagggaggatgccatgctgctgagcagaggctgcaagtggtcaggattgctctgcgtgttcagttcaaagggctctggagctgctgcctcctctaggcacaggtcagcccattttgaatggggcaataaatggtgacagcaaagccacctgaaagcagcctgacctggtggcttgtgctcctccaaaccctgggcagaatctgaaagcagcaaaactagcttagctaacaccagtctgcttgttcctcagaaacttctagaggtccatgagttaaagtctctggctttactgtgagttcaaggcaagggctgcaattttagggtttacataaagagtttgccttccacagacttggtgggattcattccctacccctccaccttcttccagaatctgtctttataccctctcagctttcccctcctctgctccctctgtggtaccaggggctctgggtcccctgtgtctgtggcaccactgggtaggcatagctgtcccctgcattctacccatgttgccaagatgtataggcagtctctcatcagtccatgcatctcatcctctcctgctgtgatgctgcgtgaccccccagagggtcagaccggcttgttcttctttgggtctagagtctcccaaggaggcaccgccacagactgtggcatcacggttttgttttacctgatctcaaaatgactgatgcaactgggatgtctttgctgttctttacatggtccaatcccatggataaagccatgcctcgctgggtggtataacctcctgcacgcacgatgattaatctgtgcttgctcccttcctctcctctgtggctcactgtctagatagagcttgacttcccacccctagccaatcacccacttttgaagccaagaagacagcttattttattctttatttcttcgccacaggccttcatcagagtacaagacctccgatatttagagctcatcagcagcattgaggtaaaagatgaagcatttttccttctcaagaaggcatacttggggttcctgttttaggggcagcccttctaacaggcaagagccttgaggacatgggaacagagctcactggcgtctgggcatctgggccacagccttgctccgggggcagagtggccacactgggggagacaacagcaggtagtgtgagctgttgtgtgatagctgggtgaggcacatgggttccggatctctccagggttgggtttctagtctgtgaaaagggattggacctacctcacaggctgctgtgaggattcagtaggttctcaggaactggtttgcatcctcctggtggcggatagctggtcaccatcctctcagactccagtaatctgatagtgttggaggagtttcccaaatgcacatgagctgagctccattccccagaaatggacctggggagcaaggcccacagtctgaactgagcgccccagagttctggagcaacccctagccctactgtttctggctgagaatattgaccttgtcatccaaacccaataggcctgcagtgtgctaaggaagctggttgtaggtatgccatttgctgggtggtggtcaacactatgctttttttttcttttttttttttttttttctgaaacaaggtctcactctgttccccaggctcaagcgcagtggcacgatcacagcttactgcagcatagacctcccaggctcaaatgatcctcccacctagcctcccaagtagctgggaccacatgcatgtgccaccccgcctgattaattttttgtatattttttagagcagggttttcccatgttgcccaggctggtttcaaattcgtgggctcaagctattagcccaccttagcctcccaaagtgctagcattatagacttgagctaccatgcccggcccttagacactattcttaatttctgtgtatctcagtgctgtctggctgtctgttaaaaggcatatacattttttctcctgaacatatttattgtgaaggtatgggaatgtgagatacatttgaattcccagttggaaacagtgaggaaatagcaaatgtcttgtccctctcattcatttccccataataaacacctgtcatgggccagcccttgtgccgagctcagtgggcacagagctgaggaggagagaggctgacaggagctcacagcctgctaagcctcataacgtaatctgctctgtgccacatgcgtgatttatgtgaatgctgttctagatcctcacattaactgaatgaggcaggtactgttgctctccctattccatgcaggaggaaattaaggctcagcaagacgatgccacatccccatgggtccatagccaaaaacttggtggaattcaagcccagtctatttcctaagctcatgctctctcggccacataccctccctacccgcgtgttgtaaggggcatctgtatattctggggtttacctacccgcgtggtaaagggcttgttcggagctattgctcaaaatgcccagtgctgctgactttcacttgtaaatccactggcctggatctgggggtcttcacctgaagccaaggagcataattttcctctctacaaaagtaactgctgtggggtccaactattacttgtcacatcttactggggtcaaaatgtagtcctctcctcgtatgctatgagctgggaagtgcgttaaagtaaactcctaagattgtctcttgaaaaaaagtaaagtgcctttgagtgtgctctatatcgactgcctgcagacttatttgcacacatctgggtgctcagcataattccagagaactgcagatccttagtgggtgccttttggataggggagatgttcttgtcctgctgacggggggaaagaacctgcccatgttgacatgcacctgctgagtgccatagatcgtttttattggtcatggtgatatcctggggcctagaatggatatggcctgaatttcatgtctagtaaaaccttttttgtttgtttgtttgttttttttttgcagagatagagtctggctatattgaccaggctggcctacaactcctgggctcaagtgatcctcctcttttgacctcccaaagtgtagggatcacaggtgtaagccaccatgtccagccaaaatcaatcttttatctcacggcaagatttcaattcatttccaactattaggagttagtttgtttgatgagcctgagctgtgtgcaggtttttagaatgataatttctgtcagtatggaagcatgttgcctccagctgttaaaactttcaccagcttgtctaagagtttgattcaatgtcttatcgtcctccaatatgctgctctttctagaaaacaagcaaaaggaaactgctagggctcagggtttgggtgctactgagtgtttacaaatactcgagctgtagacaagcgaatgttccctgacacagaaggaagaagctttatcctagctgtgctaagtgtgtgtgtgtgtgtgtgtgtgttgttggggacatcacttgcttcaaaagactacattgtgtgatacaaggaatatctggagtcagacagaactgcgtccaaattccagctctgtctgaccctgacctgttcctcttcttgagtctcagcgtccttcactctaacacttgggtagtgagacctaccctgagggtcactgagaggaataaaggggccatgtgtgtataaagtatatacccagaacctagtggatgttcagcatgcgggatttcttaccttctctttagaagtagggatatcgtaagacttgtcatcctattttattggtctccctcttgggcagaaaccctaaacattctcctgctctgtcatccccatgagccacaactctgccaaacggggcctgcggatttgggagatcttgggagcttaggggtcatggatgagtcagagcacacactattcaaactattccgtcatagccttggaatacacaggaaagcaaccctgaggaatttccattaaacaaacaaaggtttgcatctttttttgatctttgcttgtctggtaaaagcctgcttttgttgtcaagccttcccagcgggaacctaggggagagagacaacagccaggagccaagcccaggttccagtaggaaggcccaggggcctcacttgaaatagccacatctaacctttgtaaaggctgcttcctgcccatggctgcagaggccatttcctttgcttctaatttttccaggagaggaagaagcggggagagaccaacaatgacctgtttctggcagatgtgttttcctaccaggggaagttccatgaggccgccaaactgtacaagaggagtgggcacgagaacctcgcgcttgaaatgtacaccgacctctgcatgtttgagtatgccaaggtaacctaccctgtcccaggcccaagctccagcttggagcccactggtattctcacgtgcggtgtccaagttattttccccaagagtgctgcggacaaaaactagcaatggtctcagaaaggatgtggggaaactggtaaacaaaggacccatctacagccactggttgaaactcacctaaaactgacctttaaggctgacaccaagggggcagactatggcagttcagaccttcatcagtgacagggctggatggctgtgggtctacaccagcacaatcccttcattgagttgagggctcagggcttcagggctgtcccccacaaatcctctcaatccttgtcaggagccgccaagaatcggtgtcttcaggcaggagccggtcctgccgatcatgcaggacgacatggtgcctgccagccaagtttcccatagcacctgctgattgtcctggacttctcactgggcttctgggaagtcaggcagagcctccgccctcccatgttagcgcagcatgcctcacgcctgccggctgcagagtggctaccatgtggttgcagtgggtgatggcagagattcccttttgcattgggacggcccccatgaaccttactccccagcagagctgggccttttaaggcaggtgtaggagaggagcttcctggaccaggctcctgatggcttctgtgggaaggagttgcactaaggagcccagagcagtcaagacatttgcagttcagtctaagcaaggttcaaagaggcttcggtacactgggcaatgagggtcttccttccatcaaggggctttgttaacctgccttttctggaagtgtcaaaagtggctctcagtatgttatgaagtgactcatcagccataacctattggtgggctactaatggtagttctccagctcacaagttcaagatggaaaatcttccccacttttttctgcttttctattcctgaagatggctgtgctcttccaccacctgttcgaccctggggctgaaggtgtgtttggtggcctgtgatgttgcccaggacctattgttcatcaggacttggacgagctcctgggccccagcctgtcttttcaccttagtgatttcttcactccgtacctgagacccagggtgttcaggctccctctactttttcctcgtcacctttcctaccctccctcaggccccaccaaagacacctagaagatttcataacacattcatactgagatcaccagagtcagtgcatctctgcttccggggataacaaaattttaactcaggatgaacccttaagggatcaagaccctagaggtagaatttagggttgggaacccctgaggcctcctcaaggaggcagctgtgctgcagtagaaaatgcctgaccaggctgggcatggtggctcaaacctgtaatactagcactttgggaggctgaagtgggtggattgcttgagctcaggaggtcgagaccagcctgggcaatatggtgaaaccctctctctaccaaaaatgcaaaaaattagctggtgcctgtagtcccagctactgggaggctaaggtggaaagattgcttgagccccagaggtggaagttgcagtgagccaagatcacgccactgcattccagcctgggtgacagagcaagacccatgtcaaaaaaaaataataaaatgcctggccttggtgccccagagctggtgtgagtgcagtttctttctgtgggatgacctggggaaaggctcttcggtttgccaaacctcccttcccttctcagatggtaatagcgacagctcagtttagtcatgagatttgcacagaataatgtataggaaagcgcattagaaatgccaacctgtagaaagattaggaagatgagaggggccacacgtgaccacagagtggattttcatacctctctccctggctggccccactcctgcccctgctctgaggcccctccttacactgtggtggacttcgtgtgcccacagcctcccaccagaactgcagcccatttacacactccatttgctccgtctctctatgaaggtaaatactctgggacttgtttttggttttagtttttgatcactattccaaggaggttggttccttttcaatcccccctgcccccacctggtagtctgaatttgagaaatatgtacctacacattatgtggggggtgggggagatctagtcctgattaacgtggcatatttttgtttacttgaaaattgcttcccaagattcaatctggttttcagaaaattttaaaattacattcccacgtacaaataaattgtatgctttctggataagtgacatgtttatatggtgataaagggaattataatgctcttaactcttatgtagtatgttcttatcaaaatcaccaagcatgagaacactgtttagtctcattcatcactcagcacagcctctttctgtccacttcagggccaagtctttgccatggccccagataatgtgtaacttagcttcaggaaagcaaaaagcctttgaatttccagtttgctgagccttgaaggaagcttttagacccagcttcaatgaagtcacagctccctgagtgaccagctggcctaggcttatggctccctctcagcctctcacccttgccgtggtcacccctggtcccctgagcactcactgaagtccctttgaaggacatttctagtctcctaagatgcctgttttcctccagctgccaccctcatttcaccagccaggtaggcagggtttccagcttcgtgctggcatagagaatccgcgccatagcagctgccagaaggaaaggtgtgtctgtaaaggcccaaactaggcggggacagcggctgctttccaagccccttccctttgtcagctccagggagaaccaaaggccagccagggggcctgtcttctattgggtcccagcatcagggtatacaatgcgctttcctccccttcttaaaatgtatcatatattaggccgacctaatactctgaaagcacatttaccctgaaagcaaatgagggaaaaaagcgagctaattgttcaagtggatttttagcatacattgactgtacttttctgacacatgagtgttaatcatggggaaaggagtgctttttttgttctcagtgaggctgacacaaagtactctccacagggtacattattcctgagacaaaccacttcttaccagtaacatagacctgggctgtaagtgctcccagtttccctttttgaaaagctccacctttaaaagctgcctcaattctggcaaactcccacgtgtgtattttgggtaactactctgaaaagaggtggtgttctgaggctgtttctcacacattgtagggccagcccagagaagctgggcataccacttcagaggtatgctgaggccgaaggaacacaggccctaggcctgatctctgagcctccaggaccacagccatctcttccttctcaggtcctctcctgagcaccttccctgcctcagattcccccatggcctcctgctgtcccactgtcggatcaggttctcacccctgcagacctgacctcagcacaggatccctaaccattcagctgagaagcaactaaccagagagatgtttgcttgttatctgttccaggaaagtaactggggcaaagacaatgtgatgattctctagttcagggcacagaatgtttgctggtgactcagagagggcatggagggcacggagggccggcaaacactgtaagtcattttgtttgtgtaagtttaggggaacccatgctcagcctcactctgaagcatgtggtatcacccatatgatctgaataagatgacaggtctcgatatgtggaattgtgcaccaggttgtctcattgctgtttaggaacagtcctgtattgaccaaactatgtgagagagagacagcctgatcatgaacccccgaccctgcagacttcatgtgcagtgccccaaatagtctagaaagtgttgtttagccgatgaacaaatgcccatttgtgagacgggaaggaagcactgggggccagcgtccctgatgctgtcccaggatcccccaggaacacctgcagggcagcctgagatcactcttcccgagacctgggactcccccaactcagcccctcagggccgggccctgcctacctcctggttgcctgcttcagccatgtggagcccgcccttgctgctagaaaagcctgatgtaacgctggcacaggaagttctgatccagagtgtttttgtttgttgtgcttcctcaggatttccttggatctggagaccccaaagaaacaaagatgctaatcaccaaacaggctgactgggccagaaatatcaaggagcccaaagccgccgtggagatgtacatctcagcaggagagcacgtcaaggccatcgagatctgtggtgaccatggctgggttgacatgtaggttttggtccctgccccgagaagcatttggcagcatgtcatcacatgtcacctcttgactgacaagggaaccaatagtgcttttctaattatctaaagctaatgtgatagtggctaggttcttcaggagacacagagattgcacaaggcagtggctgccttccaggagcttgtggagtcactaggggaagggatggtggggaccagggaagaggagacaccgggacatcacagctgccatttgctgagcgctcactacaacccagacgctgtgataaccttccaggcattaggttttccacctatgccatcagggctggtgtctcctcgcccaccttgcagatgatgaaacagaagctaaagggacaagttattcccaaagtccagatagctggaaagttgtagagctgagctttagcctctgatctgctggatgtcgatgccaactacgcgtgtaatggtaggaacaaaaacaaaacaagttccaaatccatcagggaagaattcttatgggaggaaccatggatatcttctcttaggagacactctttccatgaagggaccttaaagaattccaagaggtaaatagagatggcgggaaaggatatgcaggcaggaagtacagcagaaacacagcgagttggctctggttggaataaaagacgtgtgggaatgggagggtgaaggacatgggctgtgggttgggggaagtgggctggccacactggaagggcctccgatgccaaacggaggtgcttagatttgccaatagtgagtgaccacctacagtcagacaccccctcaggcaggcaggtagaatggagaccagataactggctagtgcagtagagcaggagggaacttggtagctgagggcatgagagagaagtagcagtgttagaaccaagtggcccatcccagggtgttggggcagtggtgagtgtcaggctggctttgctctgtggctgctggtgggttacaccattcgtcaaggtggacaacagggagaggagggggttggggtggggcagcactgagacaggatggattcagccttgggactcagcacaccggaccttgagggggaaggctttgtcctcccagtcagtgagcttcaggctcaagcatgtgcacacacacgtgcacatgctgctgcggtaggcaaaggacacgatgggacaagctcctgagggtggctcaggctgggtcctaaaggctgttgattcttctggaaacaacgttgtggtctacaggtagcagtggcccagccaggatttggggatatggaagaggctggttaatgattaaattgtttccttgggtgctgccatatattaataattggtgtgtgggcccctcacaaagggaccttgatggatgtcctaccaccccatctttttcttgtccgatagtaatttttttaaagacagaggcacagattttgttccccacattattctttaaatgaaggggttcatatagaagagagccaggcagatttagggtgctctgttctctcttctggtttttcttgtcactttcatttgtaagtgctatagtatcaggttaccctgagggtacttgagtaattcaagaaacacattaagcatgttctgcttgctttccagatgtggctataaaaggtgtctttcctccagggacgttgggtgtgatgggtgggaaggtttctaaggctgtaagggctgtctatgccacctttccctaaaaacgtgtcctttttctgctgagcagtgttatttttagatgccattattattctaagtgtagactgacaggcctccgtgccttgcctgtctccagacagggattcgttacagctgcttctccttcctttctcaccaagactagcctgggtagaaccctttctcctgggagagttagtttgactccaaattccagcctgaccagagagaacaagcgcattctatccaggcctcatgtccccatgagtgatgggagggctgctcaccatggggaagcagtggtgagccagtgggtccctgcagctcctccctctttggtcagcacgttggccaggaggacagggaagacttcctgcaggcctttgtccagagctcagagcaggccccacactcacctcttcctttagagggcagtcattgaggtattcttatgccttggcatccacttttccgtgagaattcctgcacccgtggtggaaagagtgctgggcccagtcttgggctgggtgcttcaccttccccacagactttattcttctcatctgagagatggaaataatcatgcccacctcttagggtggtgaagattctgatttcacgcatgggaaagctcatggcgtcatctgggtacctggtaggggattaggagataattgtttctataccctgctggatagctcagtgacttccgagaaagacacacaaggtggctgacaggatcctgtaaaggccacctctcccagatcctggtgatgtttctggagtgtgtattcatgcatttaataactacccactgagcaactcccatgggccatggcatagtatcaacactggggaccacagaatgaatggacatacggcttgccgttgacaagacccagagcccaccctcctacctgccccttccctctccaggttgatcgacatcgcccgcaaactggacaaggctgagcgcgagcccctgctgctgtgcgctacctacctcaagaagctggacagccctggctatgctgctgagacctacctgaagatgggtgacctcaagtccctggtgcagctgcacgtggagacccagcgctgggatgaggtgaggggaaagcaggcctcatgggctggggccccacctgagccctgggacacaggcgggtgggtacaggggccctttggggttcagatggagagaagctgccctcgtgatggaaggaacattgggctggcagtcaggtaacttaacctcgaattctctgagccacagaatcgtggagggcctttccacttgtcccttcattcagtcattgagaaaatcgttactgacagccagctctgccagggtggtgacaggcaccggggatgttagtgtgaacacgacagctccagtgcctgctgttgggctgagctgcctctgaccagcaccacaggctcagacacatggctgatgtggagatgcacctgcgtgacatttaaaacctgctgggtagcattttggcagaaagcaccatctgtgctttccagatccagactgtgagagccatttcaggggccagttttttccctcccttctctgcccccaccccacaaccactacttctctctggtgtcaggggctgtaaagaattagccaggtcagcgagaaaggtggccagcctcaggctggcagaagcagctgatgctgccccttctatggctcaacccccaccctccagctcactggctccctgttccctgcagagaaatccatccccgagaggattaggagctgtgccaagatcctcccccgactcacccacccacccatcatggtccattttagagtgaaagcaaagccttcactgagaggagccgtctgactgttgtctgctctctgaacagctccattggtgaggtgatgaggtcagtcatgagaaaaggtggggctagggacagaggcaatggtggcttctcaagagaaatttattagatttcccaagcagcatagattagagcatcttagaatgactcagacctcgctgtgcatcaggcagactttctcaccatggctcatgtccggttctcctggcctgacaggtggttctggggcttaggtgagaagcagtcagtgggtccatacagcacgaagcccacagtcatctttgacaactgataagaagtggtgatgatgataatgtcaattctgtttccttaggtgtcgcccgcaattaaaagaaatctgtttgcagcactacaggagcccacgcaaaccctcaaaataaaatgtttccgattctgtgccgcttctgtggtccagaaacagactgtgttgttactgaatccagtcgcttgcatattgctgttaattgccttttgttttcgaagagctgatttgtttttgcatttctgtgggtagttttttgggggaggcactctccccctctgagttgtcaggctggcaaaatatgatgtccctaatggattcagccaagtacagtgttttcatgggggctgcaggggcagctttattaagacttcatttgctccttcccccaggcctttgctttgggtgagaagcatcctgagtttaaggatgacatctacatgccgtatgctcagtggctagcagagaacgatcgctttgaggaagcccagaaaggtaggcaacacagactgtcaccttctagaaggagcaggagaagttactgccaagacatacatttcaggaaggctaccaagcccttcccatctgtagatcccaagatagatgacttcatcctggggatgtgattgtttggtggtgaaagactgtggagcatggaaagaccattggccttggagtcacaccctcctgggccacactcacttgccacaggcccttaagaggtgctgcctcctctccaagcctctgtggttactgagcaaagtgctgtgcactgcagtgtatcttcccgtttaatcctcgcaacagccctatggtatagctaccatcattatgattcccattttgcagatgagaaaactgaagggtaaagaggtgaagaaatttgcctgaagtttcatagctaggaagtggcagggaggtaatgtgagccagggtaccatgaggacaataagggaggattgccacacagtgtgaggcatggtctctactgagaatagaaactcagcttctatttctggctcagataaacgggtgacttctgctcctcaagaattctgttggtaaaatgggctgcacacagcgtacaacagcatctgaaataggagttaaagcaagtatagaactttcgctgatgttattaatcatattttttaaagttgacttccctctctgtgtcaggccctggctgagcacttaacctatgtaaccttgaatcttgccaacagctgtgcaaggacgaagaggctaaatgtgccatgccaagtcacaaatctagtcagcagcagagccagaattggaccagtacctctctgactggggaacctgatttttctgttttgctgcctatttagccttctaatggaagttgggtgtttgatgttccatagcatctgatttacgcttctatatggtaaccgttgccctctctggacacattgcagaacaaatgtctccctgttggagcccctcaaccgaaagccctcattgaaggttagcgcattctctgctgcttcagcatttccagagcacccagttgctgaagtatctgcatgtttgggcaaaacacatcaacctatccatctgtctgtgtctgcccttccaagaatccatcaccatagtaacttggtactcagacaagaggttgtagatgagaacggaacaaaggccagaccttctccttctctgaaggcggaggattaggatcatttgagtgctctcatatggcaagtgtcatggctacaagtgcttcactggcagccaccaacatctcaaggggctggccacgtagtaggtactcagaaaatatctgttaaacagtataggaacgattgagagtttttttgcttgttttcacaaatggttgtgataactgaggcagatccttcaaagtggtcattgaaaagcagtcatttgaagacaaactgaggacttgagttgggcttggttctgggaccttgggtgtgacactttacctccattttgcaaagcccatttcattgctcataaaaagggggataattttccttcttcataagtctgtggtgaggatccagtgaggtgattagcaacaaaagcattttacctccaagtgcagtaaagtggcaggtcctgtttctatcaccttaggagtcacaaaactttgccctggaatgagcagggggcagaacctcactgaagatgagcaagtttcactcttagactttgccctggaatttggcccctccagtttttcctttctgcatgcttttcaaagtcagtcgccttttcccagccaaaaaggaatttatctcactgtactttttccaggatgtagccttggttatttagagaagcgccatcccagcaacgaagcactgcagatgctccaatgagtgtcctacttccaaagcagccctgtgcaagccccacagagctccatcctgcctcctgtgtgacttcctaaatagcatgtgcttttttcctccctccaccactcctacagcgttccacaaggctgggcgacagagagaagcggtccaggtgctggagcagctcacaaacaatgccgtggcggagagcaggtttaatgatgctgcctattattactggatgctgtccatgcagtgcctcgatatagctcaaggtgtgtaaacatcagccagaccactgttttcccaagccccactctgacaccaagataaacatcagaagagctgggacattttaattaaagccctgggcttgtttattgggtgtattgtccataagcctgccttgcagtggcgtaatctggtgtatcatctttttccagtttgcccatcagaatggtatgaggaccgtcctggggttatggttggcaggtccagccctgcattgctaattcagagcatatctctcccctgctacctgggagcccatagctggacctgggtgagcactgggttttaaatttttttaattaaatgagaagatgaacgagagatggctttacagtaacacactccagattcttactcatcccagccaggaaaacagtttcaatattgctttctttcacaagacttcccatgatgtactgaaggagtagtggaagtggaagagacaaggagatgttcttctccactggacaaggccacatgcaggggtgggaaaaacactggcatggaagctgcaggtgacttgtagcaagtcacaatccttcctgagctctgcatgcccatctgtcctgtgggagtcccttgtcctggtccctttggttgctgggagcctcacagagtcatgcttacagtttgaaaattgtcaagcctaggtgtaaggtcgcatttttctgtttgggccagtgccttatgcttctgataggagcagcagagggaagaggcataagatgagcatgaatacagttggtgtctgcctgcctttgtcccagcaggctcttccgacacatcttgggtcttgctgcagctgtcgctcccccaggggaataatctgggagggtgcagtgagagatctggaaaaaatatcctcaaactccctggccttatgccctgtccacctaagaattcaccatcctggagtggccctactcctaagcagagtggctttcccctcactacactttgtccctcaccctggcacagacactgtgtggtgggagaactgatgctgggaaaagtactgttgcctggcccctcctcctggggccagttggcagccacagacactgtttgacacgtttcccctcccacccgctgcacacagcagatcctgcccagaaggacacaatgcttggcaagttctaccacttccagcgtttggcagagctgtaccatggttaccatgccatccatcgccacacggtaaggtggctgggtcaccagcacctgagggtaccatctcctgagctaggggtcccgggcatatctaaagagcagcagactggatggaatgtaacccactggtcacagtgaactgctgaggaatcttggtctcctctgggaagaaaaagtttgagtttctttgattgactgtttgtctgccatgcatcaagcagtgggctcctgaattgtgatccagagctggaatgggccttgctagttcctcagtgcaggctttgatgactcagggaaactctgcattaaccagcaagaggggtgggagttccatgaggccctctccttcagtagggcgaaggcccagattaaccaaaggctcgagatccctccctggccctgtcagtgatttgtgtgttcttcagcaattcactttccctctctgtccctcagtttccttctctgtgaaactagagtgttggcttggtctccagaaacccaagtagttctttttagtcactccctgattcctttgagaaagccattttaaatctctctggtggcaatggggaacaggtgatgggttgtcaacagcctcttcatccactgtatctcctcaatcacccaacagatgttgagcacttagtacctagtaggcaatgtactgagggcttcattgtatcaagtcatttcctcctttcaaccacactttgagggaaggactgtcacccccatgttacagatgagaatgaagccctagacagagaggtctcagaggttattaggttggtgcaaaagtaattgcggtttcagactgaattttaaatcattataactaggctcaaacacatctttattaattaaaataggaaccattatgatcaacacatttttgccaatgagaaataagtctgtttatttctgtagcataaaaatccatactttgggatttgacgaactcttggaaagcattttctgcatcctgctggttgtggaagcattttccctgcaaaaagttgttgagatggttgaagaagtggtagttggttagcaagaggtcaggtgaatattgcgatgaggcaaaattttgaagtattggttgtgtgatgtgcagtcaggtgggtggagaagaattgggccctttctgtgaaccagtgccagctgcaggtgttgcagttttcggtgcatctcctcgatttgctgagcatacttctcaaatgtaatcatttcaccaggatcagacaactgtagtggatcagaccagcagcagaccaccaaacagtgatcatgacctttttttggtgcaagtttggctttgggaactgctttggagctttttctcagtccagccgtggagctggtcatcacggttgtcatgtaaagtccactttttgtcacacctcacatctgattgagaaatgttttgttgttgttgcatagaataagaaaagacaacacttcaaaacgactatattttcattttctatcagctcatgaggcacccacttatcaagctttttcaccttcccaatttgcttcaaatgccaaacaaccgtagaatggttgacattgagttcttcggcaacttctcctgtagttgtgagaggatcagcttcgatgattgctctcggttgttgtcaacttccagtggccggccactatgctcctcatcttcaagcctctcatctcctttgcaaaacttcttgaaccaccactgcactgtatgtttgttagcagttcctgggccaaatgcgttgtcgatgttacgagttgtctctgttgctttatgacccattttgaactcaaataagaaaactgcttgaatttgttttttgtctaacatcatttgcatagtctaaaataaacagtaagtaataactcattagcaaaaaaacataaagcgagaaatgcccgttgaaatgatgtataacataaccacatttaagaatgtattctactatcaaacagcaaattccagagccaatatgtgagtctcagtagtctggcactggagcctgtgttcctagcctttccctccctgtctccttttagagaaagcaggctagtatgttggtttagtgggtaaactcgagagtcctcacacacaaatgacactgtgttacttatcttctctggccttcagcttctttctctataaaatagggataacagcactatgtacttgatgggattgttttgaggattagacgagttaatattggaagagtacctagcacagagtgaccctaggtggcagctatccttactgctgctccaggcaaggcttcacgccagctttccctgacctgctccctccagctgggcatctagcatttctcttttttcagagatgaggtctctgtcgcccaaggtggagtgcagtgtcatgatcatagctcatggcagcctcaaactgctggactcaagtgatcctcctgcctgagcctcccagagcactgggattacaggcatgagccaccacgcccagccttcccgccgttctttgacctctcaaatgccctgccttccaccttgggcatttctttccctctaatctgtgctgacttctcagcacattttttgcctcttgggaaagtctggcaagaaggactcctgacaggctctgtgcatgccgtcagtctagtgttacatctcttcccacagcagggtcagtggtctcaagggacctcatcttcccttacagtctttggctttcctgaaacgagaccccctcagggtccctcatctttatcaggtgctcacctggagagaaaccaccacaaaaggagcccagactcaacttaggctggaagtcagggcccagctcagcctcactttgcccaagccactccagagcctggctctcagctccttccctcagacttttctctcgctgctccctgtcctcttcctcacctggggcatggggctgagggctcctgtctctaacagctgagctctgctccaggacctacatgggactaggagctaaggggcctcagaccagctggggccctggctcttatcccagctgaatcttattaattgggccattccttcattcaataaatgcctactacgtgacagaccctgtgatgagacctggtgacacggtggtgaacaaaacgttgtccctgcagtcagtcccagtctagcaaacaggacaatccctcaggggaaacgtttagaggcctgtgaagagacttcctggaggaggtgtcctctcagccagaaggagggagagaataaaaatggggcaagtgaagtggaggaggattaggaagggtgtttgtggcaaaggtcacagcctgtgcaaaggcctggaggtgagtggtagtttgtggttcagcatccagggcccagcagagcagcactgattcagggcaagactggaaagggaagttcaggtccttcctggatacatggcatctttcccagaggaaaggactcccctgctacctattctctctgggacgttacttagcttccctacctagtgcagtagaaccacaggcagagttcatcttgttcttaccctggaaaggatgtggtctcaggttttcttgggttcttggagctaacaaaaggtatagaaatttacgtgtgaactaaatagaaaatgctaagctctgaactgaagaagtgtagagcaaagtgagtcctcaggagttcagaccaattaggggttaagctttggtggctcagtgatgagtagggcctcacaagacccttcttaagtgctcacaagaaagaggagttactggcctgctgtaatcctcaccatctaaagctttattagaaatgggcaatctcagtttatatacagtgtgccagatgccttcaaaataaggtattcttaaccttttgtagaccctcacacagaaaattccttatttgtctgctgagcttctggcagcctctaggtacgaagaccaatcactaatctgtgctaactgcctcctgttagtgcctatgccaggagccagggaaatgggtcagcagttgaggaactccgcatgtgtgctcgtttggtggcacatcagtcaagctgctgttggaaagcacagaagaggcatgtgggttcatgctggagagggctaaatgcctctgttgaaagacaggcttatatgaatcagtggttatgtcctaagctgcatagaaggtcttctcttttagagctaattggagacaacttgagtagttcagagaaatggaataattaccaactccagaggcagtacagcttggaagaaagacattcttgggctttggaatcagacctgggtttgaacagcagctcagctctgttctagttggtgacttgggcaaatcatctatctaggtgtcggtttcctcatcagtactgtgaggataaaaatgcataccacaaggttattatgttaaagaccagatgagacagtggctatatggcgctcagcacacagtaggagtaggtgctcaataatcagagccgctcttgttgatgtcactcagaattattggtgtctgccttttggcctggcccagcagcagctcttgaagaactcaatccctgtttgcttttctctcactgcaggaagatccgttcagtgtccatcgtcctgaaactcttttcaacatctccaggttcctgctgcacagcctgcccaaggacaccccctcgggcatctctaaagtgtatcctttctcttatccctcctccgtcccaccaccgttcttgtctaatggccccaagaaattccttccagagcactttcctggcagaaccttcctctctcagcaaccctcagggaagacagagaactcaccctcccgctgctgtttggctatagaggctcagcagggaggcccaggggcccaggccaagagaagatgagttttcagggctctctgagctgaacccagcagtgggtctctggccaacacactgtcccaatccctcctagaacccacagatgagggtgtgactgaaatggaagaagcaccaggccttcaggcttggaaccttgggcacttctccagactggggaggagggagtgtttgttcagcccaggtatacatagcaccttctgtgccccaagccctgggccaggcaccaggtggcaaagctgccatcaaagagggaggtcacaagttagggtctggtttggtggatgtgtgctgtgtctgagggtggaatgaagctgaggtcagggccatggtcagggaagtttacctggaggaggagatgtccatcatgcaagctgaggcagccagggaagatggccaagtggatgttccaggggaggacccagcatatggagaggcaagcaaggcatgtgggagagggtgaggggaccctgggtgggaggggccggagaggcagcaggacccaaggcctgagagcctacctttgggttttcctctcttctgtagccatcgagggccacagtggtaccataagcagagcaggtgcctgaagggcctgtgcagccagatactggatcattaccaggcaatgatccagatttttaaggtcttggatgtcaggagacataattgtccctgttcttttctaaatctcactgtactctcagctccttcccagccgcagccccaccttccctctgtaaggaaaacccactccactggagaagacccagagctccttgttgtaagaattggcctcgctagaggattccaggcccattatgtacatttcaggggaaataccctcaaatcaaggggtgccttcctggagtcagacctctgctgcatgcgtctccgtctttccccgtaggagcagtcagggctatgcctgtgggggctgagcacctgtactcatcctttccagcaagttctgtttgagtcaacagcttgatagaacctctaccctgagccttaccctgtgccatcccctggggacctggaaatggctcctgacagtccctgactttgaggagtcatgctggagacacagaaggaaactctccacagaactgctgaagtggacggggctgcactgcagacggcgggagcaggaacactgggagagatgcgggaggaagggcaggagggcctgggggcagccaacatcggaggtgacctgagaggagagcacaaaggctcgtcagcctctggctgaggagcttcaagggggccccagagcacaggctgccgctcagaaactgcccaccaggccctcggggaagggtgtgcagacagagtggggtacacccaggggcctcagagcagggttgagggtggctccccagggagtctggaccaggccccacctggcagggtgagagcagagtgccctttgtgccaggcatcctaggagggcctggctggcaggtttggtgaggcaggaagagccattttggcctagtcagggtataagatgagccatcagcaggcccagagatgctaagcaaggttaaagtattaatggaaactacgctgtttttatctttggaaaaattcctgggccttgccatccgagaagtacactcacctctcacaagcgcacagagccttcctcacggtctttcctctgccttcccggcaccagcacaagctgtgttccagcctggggctcactccaaggacaggcagtgccagctcctgggcctggtgttgcccctgctgtccttaaccctgttcacggcaggaaaatactcttcaccttggccaagcagagcaaggccctcggtgcctacaggctggcccggcacgcctatgacaagctgcgtggcctgtacatccctgccagattccaaaagtccattgagctgggtaccctgaccatccgcgccaagcccttccacgacagtgaggtgaggatgcagcacccttgggcaggtggcttctcctctcccttgaggccatctcatgccttcttgcctggcctgggttccgtttgaagagagacagctgcagctccctctaggctctgtgccccctgctcaagcctggccatgccagctcccctgtgcttccctgtccacctcctgttctccccgcagtccacctggcgcccgctcacagcccccggccccggcctcagccctcagcctggcctcccttgctccttgccctcccctaggcaagccccacacctctgtgcccaggtggctctgcctttaccccaggcctggccccagagctgactcttactctagaaacctctgccctttctggaaccaggctgtagttctccagcaaatctaccccacactcccaacccacattccttcaacccagccagcttccttctttcacacatcctccctcaagctcagagcaaggacttggttcagacagacctgggttcacatcccggctccaccctctcctagctctgtctccatctttctgcaccttgggttccccctttcccacaggtagttgtgaggctaaatgagccagtatagtccacgtgctccgcacggtgcccggagcatggtaaatggctggctaatggtggcagcggccactgtcattcctgccaggggaaaagtgccgttgagcgctgcctgtgcaggtgtcttgggcacggggacccaagtgacagggcttgggtatttcggcaggcctttatcctgcttccccatggcatggagctcctgggcccggcgccccttccctgcctgcccacccgggtggcctttcctcttggcagccaggccccaggggcctgaagccagagtccagggggaggaggacacgtgcctgccccggcccctcgggagtccgtggctgttttgtaggagttggtgcccttgtgctaccgctgctccaccaacaacccgctgctcaacaacctgggcaacgtctgcatcaactgccgccagcccttcatcttctccgcctcttcctacggtgagtccctgcatcctgagcatgtgggtgggacagcctgtggacagccaggctcactccactgctctctggcctcaggacgttgggcaagggccaaaggcctctgaatgtccctgtttatgaaatgaggacactctgacgcccacctacctgacacaaggagtcactgtcggtgttcccagagataggacccactgctgcccaaagctgaagcacccactctgggaacctggcgcagggctttacataaccaaatgccccagaaagagagtccgatggctttgcattcagaccaggaggctgagataggttatcaaggcccagctcctttgatgttgacagaggatcagaagccccttcccaggagctgagcagaggccacacacacacacagacacacacgcacacacagactgcccctgcacacacacacatacagaaactgcccctgcacacacacacacagactgtccctgaacacacacacagactgctcctgcacacacacacacagactgcccctgcacacacagagactgcccctgcacacacacacagagaccgcccctgcacacacacacacagaaaccgcccctgcacacacacggagactgcctctgcacacacacacagactgcccctgcgtgcacacacagactgcccctacacacacacagattgctcctgcacacacacacacacacacacagagactgcccctgcacacacacagagactgcccctgcacacacacacagagactgcccctgcacacacacacagagactgctcctgcacacacatacagagactgcccctgcacacacacacagactgcccctgcccacacacacagagaccgcccctgcacacacacatggagactgcccctgcacacacacatggagactgcccctgcgtgcacacacagagactgcccctgcacacacacagattgctcctgcacacacacacacacagagagactgcccctgcacacacacagagactgcccctgcacacacacacacacacggagactgcccctacacacacacacagaaactgcccctgcacacacacagattgctcctgcacacacacacacacacacacacacacacacagagagactgcccctgcacacacacacacagactgcccctgcacacagacacacagagaccgctcctgcacacacacagagactgcccctgcacacacacacagagactgcccctgcacacacacacacacagaggctgcccctgcacacacacagaccgctcctgcacacagacacacagagaccgctcctgcacacacacggagactgcccctgcacacacacagagactgcccctacacacacacacacagactgcccctgcacacacacacacacagaaactgcccctgcacacacacagattgctcctgcacacacacacacacacacacagactgcccctgcacacacacacagagactgcccctgcacacagacacacagagaccgctcctgcacacacacatggagactgcccctgcacacacacggagactgcctctgcacacacacagagactgcccctacacacacacacagactgcccctgcacacacacacacacagaaactgcccctgcacacacacacattgctcctgcacacacacacacacacacacacacacacacacagagactgctcctgcacacacatacagagactgcccctgctgcctcttcttgcttttggtgaagctgccagtgggttgagaagcaactctgtggtcaccccacctgcctggcggcaagtcctttgcaaggcctccagccccctcagccctttctctatgccctccagacgtgctacacctggttgagttctacctggaggaagggatcactgatgaagaagccatctccctcatcgacctggaggtgctgagacccaagcgggatgacagacagctagagattgcaaacaacagtatccatgcccttggccagagcctgtgtgtgcggctgtgtgaggggtctggggacaggcgggaagtaggagggcccagtcccaggggatcgcgggccatgctgagcctggccctgtgttcccagagagattggagaggcccacatgggacagggacagggatcagagatgggcagacagctggccagggcctaaggacccagaagtggcaagtggcaccttggtcttcccgtgtgggtctcccaccctcccctgacccctaaaaggcactggctgtgcctctgtctgtgcatagctcctgcatagccaacatgggacatgatgtcatgatgtcggtgttggcccccagctcttccactcaagtcactttcgcatgcaagtgacagagtccaaaactgacaagctgaacaagcaaagggtgtgcaaggaagccccaagcaggagaggaagcttcctggcccagcgctcagtctggtcggtcacaggctggctctgcctctcttggccgcactgtcctctgggcaacttcattctttggcagccccgtggtgcccccataacacagagatgtcaggagcagtgccagccccacatcccctcagccttatagcccccagaaacagccagctttcctctcagctgtggcagtgaaagccccggggcacagctcagcctgccccttggccaggaggatgcaccagggcagttgtccagggcaggccacacttgcaggctggacatgggaggggcttctggcagggaacagcacacacgtggcctgaggcctcgctcccttgcactgactgagtctgcaggcctgggggctgtaagcctgccttccttgcagctcccaggtgctgccacccccaggggccacactgggaggagggaagctcagagagctgcttgctgaaggaaagacggacccatctctgccacccaggctccctcaggtgccacagatgatatgtgctatggtgctggcaggtgggtgctgtgcccactccaacttggtaccagcagtccccatgtcctgggcctccctgcaggacccctgctggcctctgttaccagccccaccactgtgggagaggggcggtttccagggacctccaggtgagtctgacccgccctggggtcagcagggactctcgcccctgtctgctccatcacaagtgcccgcagacccccagcagccactgaatgtttctccaggatccctgggcccatcccctccgtgcctacccgcagtggctcacagggcccgcatgtgcttcccactggccctgggagctatggtgtgtgtggcctgcgaggggaatgggtgagggcagcagggccagcagagtcccttccttctgattccttggcctgagccccctctgttcctccacctggaaaactcttccactggtctggctgcccttgagtcttctcacaggggtgtagggtggaggctagggtctgtctccatctctgcttctgattccatccttgaccagatccctccaggctcccagattctgcggctagtggagaccaaggactccatcggagatgaggacccgttcacagctaagctgagctttgaggtgagggtgcctctctgggtgacctgcaggagggcagcctccatcccttctcctgtgcacatggggaccctcagctagcgcagtggtggaggaggattggccagaacttccagatgtggtggcacgaaggaggggcaggaccccttcctgtggggtgtgggagccatggctgcccccgagggaccatggccaagggcgcaggtctgtggacagggaggcagcttcagctctggtgggaggagcttgccactgttagggtcacctgggtttaggaagcaggtcctctctcaccactgccaaagattccaggatcataatccacacagatgtctcactgtggctgagtgaggacactgtgcctccttcccgcccaccctgcagcaaggtggctcagagttcgtgccagtggtggtgagccggctggtgctgcgctccatgagccgccgggatgtcctcatcaagcgatggcccccacccctgaggtggcaatacttccgctcactgctgcctgacgcctccattaccatgtgcccctcctgcttccaggtaggtggccaccctggtagctcacatgtgcttctcttggccacttttcccttgcccaaatgtccctctgggaggcgtggcccctgggaggaggggcacatccatggctccaagttgggacagaggcttgtctgtcctctcccctgcttgcattccatgtgcatctaaagtggacttcactggcccctgcgctgtccacatcctccccaaatcctgggggcccagcaagcgtgatgtgcccttgaccttcactcagaaaacaagaaaccccacagccccctcccatctccccttccagccctcaaacaaaggtgctgcaggtctgtgtccagccctgaccactgccaagccccctccccttgagaggcagtgcgtcctggccccaggcgtagggctgatgagcactagggcttcagcctggtcttacagctgtcttcccttagatgttccattctgaggactatgagttgctggtgcttcagcatggctgctgcccctactgccgcaggtgcaaggatgaccctggcccatgaccagcatcctggggacggcctgcaccctctgcccgccttggggtctgctgggctgtgaaggagaataaagagttaaactgtcagaatgtg

SEQ ID NO: 15633 - DNA, 80115 bp, Homo sapiens
agccaaagtggcttgtggagtggcgaccgttagtgaggcggttgctgagacagacgctgaggcgggtaggaggagcccgagccgtaagggaagccgtgatgagggccgtgttgacgtggagagataaagccgagcactggtgaggagcggggcggttcgcgaagagcaggaggtcgagtcctcgcggggagtgcgcgagccgctgcagcgtgtttgaggggggcagcgggcttgctgcctgggccgagggcactgaaccccggcctgggagactgcagggtcgccctcccgccccttggcggttggagaaactcccgagggttggagagcggcaaagggaggtgccgcgcctgaggtggtggcgggtggaggcggctcttccctcacggtctggccctgtcgctgccttggattcatctcacacccacgagacagcacgaagctgctcaagcttcacagttcttgccacatccacatagtacccatactcttgttttcttgacgtttttctctaaattgtctcatttattttaattatgatttcacattttacaaggaaactttattactccatttatgaaaaccagtgtcacttgctctaaatgttaagataaaatcagcgtcgcttgctctaagtgtaaaagtaaaacttaaagtagggagaaacaaaactgaacaagctgtagctagctattgttgctagggagcctttaaacctgagatctcgtttctctaaaactggagatgggcaggtatgatcagaaaggtgctcaaaatgagcaccaaacacaagctctcctaattgggaagtctgaaaaagaactgaaggggaatgactttgtcaccttttgattcagttatttaatgtcctattccattgttatcgcctaaatctataacatagcagtctgttttgtcatattcttacttatgggataggtcttggcctgactttgaaaatcattcagcattgttgtgaagcctctgttctggccactggagcaggttacttgtctttggttctgtcccttctgagatctttctctgtgtaaagcatgccgtctctcctcatctcacacggaaatcctgaacatccttcaaggctcacgttggagacgggtcctctcttttgtgttcggcactagtggtagctgacactatgtgccaggtgctggctaagcacttcatatcctttatctcgttgtgtcttcaccactctctaaggtaggtactataatttcctctattttatgtatgaggaaactgaagcccagagagggtggataatttgccagcgtcacacagtgaggggtggaaccagctttcaagctcaggtcttcctcactccaacgtcaacgctctcagccactacattaatttttccttatgttacagacgtggcaaactcaaatgtctgcaggagacaggcaggtaacataaatgggagatgtttatttgcatcttcaacactaggaattgtatgttttccctaggaatagtcttgtattctgtaccccatttttcttgaaacacagccgtatcagtgaatctttcatttgtacttttaatagagatttgagttttaaaaaatcattttacttttaactttattataaacgtacctatagcacaagctgatgatagctggcaactgaacatttggcttcaatgtcagagtaatagagtgtggcaaactgcagagctcatgctcggcctaaaaggggcagctgctgctcagctcctgccaattaccaccatgcaggaatttggcctagtgtgctcagctcttcctgtttttaccagaagctaggaatctgggtttttatgtgaaatggcctaatttttaaatgttagcatccactctgaaaaaaaaacaaaacaccgtgtgggccaaataaaacatttgctggccgaatgcagcctgatttgctctgttttcaacccctggcacagaattttgttcatttctctcttgtggtacttccagagtctgttgagcataagagttaattttttaaatctgtttaattcagaagtctaataaacccgttaaaggcaatggctatgtcttactcgtttccaaattattctagagacaggtcagtggttgttgttactatggatagtaataaaatactagatatatataaaacgaaatactgtgggtagatgtattcatacgtgaatgaatgatgaataaagattggttttctggtttttggcccattacagatttgagacaacctattaggataagggatgtaggggttctatagaccatcaatcctgatggctgctagatataccagctgatagcccagaatgaaaacaaaacaaaaaactaaacaaaaaaaaaaaagacagtagaactaaaaaaatcctagatgtcaaagattagtcctccacatccaaatcagccattgtctcccggtctgctcctttgcttctattttaaccttcacatagcagcaggaactctgtttttttaagacctgctgctgtgatcctgttactctacttctcataaacctagagtgattcccaattactttccatgtcaagtcgtgcattttgctagagggtcctcctgaccctcctccccatcaggcttgcaacatttaaatttatacttttaggttgagctgaaaactctatttttctacccgaagatccttcccaaatgctcccttattctatgaactccctagttttctcctttaaatgcacagctccaggttcatctcaaccaggatgtcttattaggctagcccactgtattccaatcaggctagcatctgctgtaactctccattcatgccagctagtatttactgagtacttgctataggccacatgtccacatgtctttataggtgttatcatgtttaatctctacaacatgtgaggttggaattttcatctcatttaaagatgaagaaattgagatttaatgaggtgacataagttacctaagattacaaaatgagtaagtggggctgggtcagatgatgcaggaattggagaggcactgtgggacattggtttacagtgaggtgggtgcagggttgtcagaggacaatttgcaggattcctctgtatctctgcaatggaatctgacagtgtgtcttctgacagtgtatctcttttataaaaagaggcaggtggagagagaaccatcctacagtagaatagactgcctgcaaatgagtgagctcccagccctggagtgttcaagcaggggctagatggccatctataaggaattcttgccctgatgggccagatggactgcatgacaaggtctagagtcctttccaattctgagtttctggtgatttcataattatatttattacatgtctaggacagtgccatgcactgtgggtccacaaatatgtagaacatggccattgctttcaaattgtgtatgactataattaaaggggcaaggcaagataatatctaacacaatgtaaagaagactgtataagtcagagctaaactgaaatgtacagattctaagtacattaagagtttagattggggcaaatcagacatatatgatatattttaggaaggcaaatttcaagatattcagagaaaatgaatttttatatctaagaggaagaatgttcaggcttggctcaaatgagacattcagaaatgattttgtgataattcaacccaaaatgacccttatgaagaagaggtcacacaggaatcactttgatgagctcatatgtgtacaaggcagaaaggaagccacataccaaggatgactttagatgagaggtgcagacactgctccaacatctaataatccaccatagcaatccacaagtgtcaggcgctttggatagactggcttgtgcaccccgtgagtaggaggctacctctctatccttgttttgtaggtgagaatgaaagctcagataggagatcagcttttctggccccacgtcccccctactttttattccgccatgctgcttctcaaaatgtgaaatgtgccaaggctcagaggaagaaagcgtaagaaacaaggaaggcccaggtctgttaccacataatggtgaggaagctgaaaaactcagggcttcagtttgcccagctggaaagagtgtgataatcatccttgttccagcttctttatcagccagctctgtgactaggagcaaacaacttgcctctctgtactttagtttcctcattggtaaaatcggggcagtggtgcctgtcctgtctactacattatgttttcgtaaggatcaaataagataatgtaagtttacactcttttttttttttgagacagagtctcgctctgttgccaggctggagtgcagtggcgcaatctcggctcactgcaagctccgcctcccaggttcaagccattctcctgcctcagcctcccgagtaggtgggactacaggtgtgcaccaccacgcccagctaatttctgtatttttagtagagatacagtttcaccatgttggccaggatggtctccatctcttgacctcgtgatctgcctgcctcggcctcccaaaatgctaagattataggcgtgagccaccatgtctggccaagtttacactctttaacaattcttaaatattgaataactgtgaagagtttttattaaaggaagcgtcaggtcaacagagccatattaaaagctttctgaattcttcatgtaatgccttaagtaggtaataatacctttttttgacatatgccaacaatgataatggcagccacatagcataatggttaaaacatgggcttcaggccagattgcctgggtttgaggccggatgcagtggctcacacttaaaatcccagcactttgggaggctgaggcagatggatcacttgaggtcaggagttcgagaccagcctggccaacatggtaaaaccctgtctttaccaaaaatacaaaaatgacctgggtgtggtggcaggcacctgtcatcccagctactcaggaggctaaggcaggagaatcgattgaaactgggaggcagaggttgctgtgagccaagatcctgctactgcactccagcctgggtgacagagcaagactccacctcaaaaaaaacaaaaacaaaaacaaaaaaacagattgccttggtttgaatcctggctccatttccattcagtagcactttattttcaggcaagttatttaacttctctgtaccatagttttctcatctgtgaaacaggtatacagttgttttgaggttaacatgagttaatacatgtaaagcatttaagctgtacctggcatacacaataataaatgtgttcaataaatgttagtcactgttattaaagtatgaaggataacagatttgacatacttggcagtaattcaagggagcagaaggcagcatagcgcgttaattacaagcacagactctagagtcagacctgagttgaaatcctggcccttgcacttgctagttgtgtgacatcaggcaaactacttgacctctctgagccatggtatcctcatctacaaaacagagtaataattcctacctcacagaattattgtggagatgaaataaaataatgcattttaagagctcagcaggtgctgtctggaataagagttcgaagtactgtcattgagagtgtacttccaagttactgacaaaagcttgatttttagattactggtataaaccaaaaataaaattcagaggccccccaaccatctgaatggatttccttctcaaccagggctcttttaaaatttaacctgagagactgtttcaggccatgatgggaaatgggggtcaaacatgcctcagtatacctctctggcattaacatcaacacagactttaagtatgataagaaacattttacaaactctcctctctaaagcctagtacctcaaggcttcctctgcaaacagtaacttgggttgccacaatcctttatcttaacccaggcattcctttctgttgaacctaggttttttgttttttttttttctgagacagagtctcactctgtcgcccaggctggagtgtagtggcgcgatctcagctcactgcaagctccaccttccgggttcacgccattctcctgcctcatcctcccgtgtagctgggactataggtgcccgccatcatgcttggctaattttttgtagagacggggtttcaccgtgttagccaggatggtctcagtctcctgacctcatgatccacccacctcggcctcccaaagtgctgggattacaggcatgagccaccgcgcccggccgaccctaggtccttagataagctcaaccaattgtcagaaaaattttaaatcaacctataagctagaagccccctgcttcaagttgttccatctttctggaccaaaccaatgcatttcttaaatgtatttgattgaagtctcatgtttcactaaaatgtgtcaaaccgagctgcaccctgaccaccttgggcacatgttctcaggaccacctgagggctgtgtcatgggctgtggtcactcatatttggctcagaataaatctcttcagatattttacagagtttgattttttgttgacactggcaagtttatcccatgctaaacttttactatgggttgggttttgtttttttgttgttgttgtttgttttttgtgtgttttgttttgagtaacttcagtagtaaccttaacaatagtctgttttgacaggtttttgacacattcttactatagtcacctgaaccaatgaaatcctctgcctggggcatttgaaaaatctttgtaatatggctctagcccatttttctagcctcatttctccatgttctagcaacatcttgcacatagccagatgtttcagtcaaattaaattattttgattacttgtgttggcaagaagagtcaaactgcaaaatattttaagagatttattctgagcctaatatgagtgaccacagccagtgacacagccctcaggaggtccacagaacatgtgcccacggtggttggggtgcagtttggggaggcatgagacatcaatcagatacatttaagaaatacattggtttgatccagaaaggcaggacaactcaaagtgagggcttccaggctataggtaaatttaaacattttctggctgacaattggctgagtttgtttaaagacctgggatcaacagaaaggaatgtctgggttaagataaaggattgtggagacccatgttcttatttgcagaggaagccttcgggtactaggcttcagaaagaataggttgtaaaatgtttcttctcaccctgcaaaacagagtcttgctgtcacccaggctggagtgcagtggtgcaatctcggctcactgcaacctctgtctcccgggttcaagcaattctcctgcctcagcctccctagtagctgggattacaggcgcccgccaccacacctggctaatttttgtatttttagttgagacagggtttcaccatgttggtcaggctggcctcaaactcctgacctcgtgatccgcccgcctcggcctcccaaaacgctgggattacaggcatgagcaccgcacccagcctaaaatgtttatcatacttaaagtctgtgttgatattaatgccggagaggtacaatgaggcatgtcagaggcccacttcccgtcatggcctgaaacagtctctcaggttaaattttaaaagagccctggttgaggaggaagtccattcagacggttgggggggcttacaattttatttttgttttacacttgttatttctcactttcatgtctttgcttgttttattttctttgcctgaaatgtcctttacccagtgtcctcctccatgtttcaaaagccctacctttttcaaatatcttcttcattaatctttttctgatcctctccttgaattaaaatgctgttgaagcggcgtcattgtctggggtaaatatccgagatttgttgtctcaacagcaatggaaaactaggatacggacacaccagagtgaggttacgagtagaagtttaacaggcgaaagaaagagaagagctcactgcagctgacagcgttctcgaaaaaatgagttgccacctctgtggtgaaatgcaggttttatagataagcttgaggaggtggtgtctgatttacatagggcacaaaagattgattggattggtgtttcatttgcataactttcgaaaaactggttagggctaggtgtgtcatttgcattgggtgcgaaaagctggccacccccaccctaatcttttattatgcagttgggttatttacgtggccagcgccatgttgcccgtttctttactgtacacgtggtgacaaattaaagggaggacagaacctccatgttgaacatacttggcccccaggtagcctttttctattggcacagctgccggcattcaccagtgcaagcttccagcttgcctttttatttatttatttattttttttttttgagacggagtcttcctccgtcgcccagactggagtgcagtggcatgatcttggctcactgcaacctctgcctcccaggttctagtgattctcctgcctcagcctctcgagtagctgggattacaggcgctcaccacccaccaccatgcccagctaatttttgtatttttggtagagacaaggtttcactatgttggccaggctggtctcgaactcctgacctcaagtcttcctcctgccttggcctcccagagtgctgggattacaggcatgagccgctgcgccaggcctcagcttgcctatctatgtttgcagctcgatttttcaggctgctctttgttagaaaaaaataatttcttgggctgctttttattaaaagggaagttctgccgaagactcttttaccttcactatctggctaaataatttctttctagctcctgtatcactgcgtcttcctccttcgaatcctgttttcatgtgtctcttaaagcctttatcagagtactgttctgtatttcatccaatctaataggtcattgattataaaataccattgttttgtgtatcaataagaaagcaaaaaatgctgccagttacactgaaacatcatcaattataagacacaaccttagaggtgagaaaatgtgaaaaaaaaatgtaagctttagaattgatgacatatggtagttctttgtgaaagtgtctgtttcacaccttctcactggatagtaatttccctgaggggagggagggattatgatctgttcatatctgttggtgcctggcacctaagagggactcagtaagtatctgtggatttactggcccttaacacattctctcatgttgtctagcctttatgatattattagaagagttaataccctcaacagttgaccctttgaataatttcttgtgtctggcttctggacaagaggaaatcaggacaaagagctaactactgagtggatcatgattgaatgggctgctgtggtgtggcggttgaatggaatttgcaacaaatgcaattcgtagttattctttttctcctcagtacacacacagtgtttcttaatggcaataaagtttactttcctggccattagcagacttcatcattttggttcctaattgtctttttcccttgtcttctgttcagtataaatgacatcgcatttaagcctgatggaactcaactgattttggctgccggaagcagattactggtaggattttgtcttagtttcctcttaaagtgcttccctaacctccctcttgtgagtactctgaaatttgaccctttttttttttttttgagattaaaaaggcaagggtggaaaaaccttccctattactttttaatagggatggaaatgggctatttaaaacgggcaagtaaactatcagataagaacctgtgaacaataccacctttggggtcattcatctttccctttttactttgagacacccatgaaagagttgaaaacaatcacaatgcctttgaaactggactggtgtcagtttacattttgtcccccagaaaaattcaagcaacaggactgacggtgctgtgtccatgaaaagtcagatagcctgaccccaacttttaggcattggcctatctaaacagttccatatggatgttgtcctatttttcatattttcaaataacataagctccctctggaacctatccaggtatataaaagtaattttcagagaaccccttatgtttgaccaaaaaacctttgtatgatctctctttctgtctaagtctacttcctcttctctgttgtctctagatacgcagactgattaatctccattctttgtatggttaactacataatcttaaaacatggttaaattgttctgcagacttctctccagtgtaaacaatccaaactctattagtttttctacataggttatcttttccaatactctaaccatttcagaaagtttccgcttgatttctcagatggtgtgtgtgtgtgtgttttttttttttttttttttttttggagacagagtctggctctgtcgcccaggctggagtgcagtgacgcgatctcggcttactgcaagctccacctcccgggttcacaccattctcctgcctcagcctcctgagtagctgggactacaggcgcctgccgctacgctcagctaattttttgtatttttagtagagacggggtttctccgtgttagccaggatggtctcgatctcctgacctcgtaatccacccacctcggcctcccaaagtgctgggattacagaggtgagccaccgcgcccggccagatggtgtgtttttaaactctccacatagtgatagatgtcacatggctatcaaatacctaaatccatattacagctgggttttattttatttcttagagacagggttgtgctctgttgcccaagctggtgtgcagtagtgcagtcatagatcactgcagcctcaaactcctgggcttaagggatcttcccacctcagcctcccgagtagctaggactgtggacacacaccacctcgtccacctaatttttatttttttttatttttatttatttttattttttgtagagatggggtttcacttagttgcccaagctggtcttgaactcctggtttcaagcaatcctcccacttcagcctcccagagtgttgggatgacaggagtgagctaccatgcctggcctacagttgggttttataacattccctcctacttgaaagcccagagttctgtgactttcaaattcttggtagcaaatatgaaacatctattatgttgatttagtgcagagctggcattaaaatttaatcatgttgtagctggctctttttatgggctagttttatttaggagggcctgccttgatcaatcatatatccaaattcaggtaaggatgagtataaagaatttccatggagtgagtaattgaacctttggttctcaaggattggtagtatattcctggtcacatagtacatagacctgggtcctctacttcttggttacccaactttaagtcacgttgtttttggttttgcagtgcagtttttattggctacagatttagaatattgacacgtattgttataaaaacaaaaatagcagtagcaaccctgcaggaattctgactaatagatatcacatagataatctgtatttgtctcttttgccaggtttatgacacctctgatggcaccttacttcagcccctcaagggacacaaagacactgtgtactgtgtggcatatgcgaaggatggtaaaaggctgctctgggtttccattctctataatagcctcatcattgttcatttttctctttagtcactttttaattatttctagtaagctggagtacaagttgcaagttcagaagacagtgaagttgctaagacttcagtttggtcattcaatctagcaagtatttattgaggtcatctatgttccaggcactgttcaaggtgcttgagttacttcagagaaaaaaacggtggtccctccccttatggggcttctgttttatggggtggtggtgagaagtgagggaggaagaaagtatgagggaagacatacagtaaacatagtaaaaaggtaaattaagtagtatgctggaaggtgataactgttatggaagaagaaaaagtagagcagaatgagggggattgagagtgctgggcagggcagggggttgggtacagtattgaattagactagtgagggtgggctcattgagatgaggacaggtgaggaaaaagactttgaagtcaggaggcaatgagattgtgccagtgggcatcggggggaagagagctctttgcagaggaagagccattgcagaggccctcaggtgtgggtgtggctgctaggagctggatcaaagagaatcgggaattgtagaggatgaggataaagtggtaacagacatggggtggtcagatcataaagattttgattctcagtcaaaatggaactactgaaaggtcctcagcagaggagggatctgatttgatttgtattttaaaaggatccctctagttgctgagttggaaacaacctgcaagaggtgagggttaggacatctgtgtgaggaagcatcatccagacagggggtgatggtggctcagacctctgtgggggcagaggaggtgatgagaaattatcagactctggatataatgggagggtggagccaactggattgtctgacagattggatatgggctatgaagaaaaaggagtcaagtttttgacctgaggactgaaaggttggagttgccccccccactgagatggaaaagactgcaggtagagaaaagttatggttgaagatcagaaattcagttttatacatgctgaatttgagaaaagttgatgatgtcggagaggggagagaactgctggaacagagttgttgagtaggcaagaggagatgggatctagggcatagacggggtatttgctttagataggggcacagtaggaactgcagaggccagcagatggggacaatgtggtagtaggaatctaatggaaattctcaattccattttttttttcttcagtgaaataggaagcaacagcaactgagagtggcaatggggaagggaggtttcagagagttgaagagaaagggaaaaagtgtaaagtcactgcctcagagaatgggacagcgagtggacccaggaggtgtagtgagatccccggtgacatgaagggccctcttgaagattgtgatcatgaattgaaagtgagattagttggtgtgattgtgtctttttctccagcgattttgagctgcatagttgtagaggcagaagaggtgaatttaaccagaggtggttttgcaagcacatttgaagatgaagtaggagggcaagggagcagaaagtgtatacagataaataattatgtacattaaccttgaattgttggctgaataatgaagggagagaggacagcaatggagaagtagtaggttctggtggtgttgaaggattgttacagttggggtaccaggtgggttgggaaggaagggaagtggtgcatgaaactgagatttaaatttattttaaaataaatccatgttgtcccacagcataggattagtgggaagaaatgggctttggaatgagacagttgtgagttccaaccccaacccaacaccagagttctgtgagtctgagctggttattgagtctgagtcacgatttcttcatgtatcaaatggataacattgagataacattctgtagccactgccaagaagtcacaaaattgtaatgttataattcttgaatgaaccttggagattattccagtcccaggtttttaacttcttttggctgatgggcctctttgataatcagatggaagctttagaccactttctagaaagatgcaaattcttcatgtgtatgcagaatttcatgcatataattttagtctgattagtccagtctcttcactttagtcctgcataaagacataaacaattggccaggcacggtggctcatgcctataatcctactgaaatcctaaagctctgggagcctgagttgggaagattgcttaaggcaggagtttgagaccagcctgggcaacatagtgagactccctaaaatctggcctgggtgacagagctagactctgtctcttaaaaaaaaaaaaaaaagacaagtcatgtgacttgccaaggccatgcagcagattggcccaaagacaaaactaatttcttgcttcatagtcaggtgtgctgtaccatggtagtcatatttgtgtgtgtgtgtgtgtgtgtgtgtgtgtgtgtgtgtgtgtgtgcatgtttgagttcaagttcagaataatgttttagggagacctgtgaggagggagcctggagagctgaactgtttctgtctcatcctagtggctgttgaggaatgtgggtcagtccagggcccagtataaggcccagtaggtacagaagagctattgggcctctggtgcctctggtgtttataagcatagcagggctctttgacctgcaacaccattagggcacttgaggatgtcagagtgtgacccatcagtagtggcatttgcacagcactttgcagagtcctgtcacacacatctcacttgatgcttccaacaactctctgaagcaggcagcaaggggactcttatctccgctcaaagatgagaaaacagacttggagcaattacaggtgatggtggcagaggcaggcctaacccaggttctctgactgcagagtctttgttctttctagtgtatcatgctgcctcttcatgacacctgtataatgattaagaagtcttttagtcctcagaattggttttttcctcttagacctgaagattgagatacactgaattccagctttgctctttaagtctgcttgtttctgatttctcctttaagttcattaagttttttttgtttttttttttgagatgaagtctcgctctgtcgcccaggctggagtgcagtggcgcgatctcggctcatggcaacctctgactccctggttcaagtgattctcctgcctcagcctcctgagtagctgggactacaggcacgcgccaccatgcctagctaatttttgtattttcagtagagacagggtttcaccatgttggtcggcctgatctcaaactcctgacctcgtgatccgcccacctcggcctcccaaagtgctgggattacaggcgtgaaccaccatgcctggcccaagtttaataagtatttaatgagcaaccatgatataaaagtatgtaagacatagtttttttgttcaagaaaaacaatataatatgaagaaataatagaaatagctaatttttttttaattctattccaggcccagttctaagcaacataagggttaggggtgccactgcctgtgcaataaaaaatctgcatgtaatttctgaaccccccaaaactttactattaatagcctactgttgaccagaagccttacctgttacataaacagttaacacatttttaatattatatgtattatatattgtattcttaaaataagctagataaaatgttaattgagaaaaaagaaaaatatatttactcttcattaaatggaagtggatcatcataaaggtcttcatcttcattgtcttcaggttgaataggctgaggaggaggaggaggaggaggaggaggaagagggattggtgatgctgtgccagggagacagaggcaaaagaaaattcacatgtaaaagtggactcatgtagttaaaactcatgttgttcaggggtcaactgtatgtacacatgtacatacactcatttaatcttcacaccaaccatgaggtaaatactaacattgtatccatttttcaaataaggaaatgaaagctcttcagtagcttgtttgggtcatgcagctggtcagtgagatctctaggaattctgacccagagactctgagcccaaagcttatgcttttcatcaccatcacctgctacctaccaggatgagggaggagtgatggaaatagtaagagcagtttctttgtttatttagtatttgcagcaatatcatatggctcaccctaatatctactatttcagctactgtaaaaggtacttggccgggtgtggtggctcatgcttgtgatctcagcactttgggaagccaaggcgggtggatcatgaggtcaggagtttgagacaagcctggccaacacagtgaaacctcgtctgtactaaatatataaaaattagctgggcatggtggtgtgtgcctgtaatcccaactacttgggaggctgaggcaggagaattgcttgaacctgggaggcggagattgcagtgagctgagattatgccactgctctctggcctgggtgacagagctagactccgtctcaaaaagggccagtcgtggtgactcatgcctgtaatcacagcactttggaaggcggatcacctgaggtcaggagtttgagaccagcctgcccaacatggagaaaccccatctctactaaaaatacaaaaaattagccaggtgtggtggtgggcacctgtagtcccagctactcgggaggctgaggcaggataatcgcttgaacccgggagtcggaggttgcggtgagccgagatcgtgccactgcactatagcctgggcaacagagtgagacttagtctcaaaaaaaaggtactttacagatactatcttagttgactcccataaaaagactctgaggaagatactgttcctctgtgtttcagatgaaggcattgaggctcagagaacagtgacttgcccaaggtcaccttccacttgccctgtgaataaagtctaaaagtccttaagatgtacagaatgtggcacatacttacctcttaatcctcgtctctcaccagagtaggtgaagaccccgttatttgctgccatggtaccgtgatcctcttccaaatgcttataaatgtggaacagtgtaattaataacaaattacttgttatatgttgcctctctccagtctgttccttcataaagcccaagtagtatgaaaatgcgaatctgatctatcactctttgcttaaaacctttctttggcttcccattgctttaggataaagagcaaggcctctgctgtgtccctgaggtcccaagagatccttccacaacccacctcacccttccctccgttccatgatgactccgctcattccctcagacatgccaggcttttcctgcttcagggcctttgcacatctgttccatccatgtggatgggtctgtctcctctctacatctggctaagctctgctcatcctttaggtctccactgaaggatctcatccttagagaaatgttccctcatctaaattaggtcccccaggagatgttgaccaaagggtagtttcagtcagacaaaaggagtacatttttgagatctattgcacagcatggtgaccatagttaataatagcgtatatttcaaaactggcacaggaatagtttttttttttttttttttttgagatggagtctcgctctgttgcccaggctggagtgcagtggcgtgatctcggctcactgcaagccccacctcctgggttcactccattttcccacctcagcctccagagtagctgggactacaggcgcccgtcaccaggccggctaattttgtttttgtatttttagtagagacggggtttcaccgtgttggccaggatggtctcgatctcctgacctcgtgatccacccgcctcagccctccaaagtgctgggattacaggtgtgagccactgttcccggccaggaatagattttaaatgttctcactataaaaaaataagtatctgcagtgatggatatgttaattagcttaatcattcttcaatgtgtatgtatataaaataccacattgtacttcataagtagatataattattatttgtcaaaaataaaaatttaagtaaaaaagtaaatcaggttccccagttattctctttcataggatccgtgtcttaccatgttgtatttgtgttagattaatttgatgtgtacttcttacactagactgaactttatgaaagtagggatcatgtgtgttttaatcattacttaatccctagcatagaacatgacagctacatgtagtaggctcccaatacatctttgtttactcagtgtcagacaaagcaggtttggaacccaaatattctgactccaaggtcctgcctcccagtactgataagaactaggaaagaagctaacacttactaggtaccttaaagaactagttttctaaagaattctctctgggaaatgctggtttaagataaatgtaagactttccattttacaaacacttttaggcaagcgctttgcttctggatcagctgacaaaagcgttattatctggacatcaaaactggaaggcattctgaagtacacgtaagtaacttaggtgtacagtattatgagtttgatgcttattgaataattgcagcaaaagcctcttagaaaagatgtaggagaaaacttttttctcttaaattgaacttgaaattaagttgtgggtgtgtgtggttggtataggaaggttgagtagtgaataagttaatgaatatttcttggccacttactggcgtggccagcactgggctaggtgcttttatgtagctcatctcagttcatctgacattgtagactttatcccacccccaacctgtcatcttccagtgtccctgtctcagagaatggccttatatccacccagtgtcaaatgtcagaaacttggggtcagtgtgctccaggcctcctcttactattggggatctgccgtgttcttcccctgttcctctactagttggtccctatttaccctgcagatctcagactcaaatgtcagtttctttgtaaggactttcctgcctctctagactggaacaggtctctttcgaggcatttctcacaattgcagttttaggtttattctggtgactgatcagtattgctcatcggcctgtaagttccataagaacagatactgcatctattttttgttttgttttgttttgttttgagacagagtcttgctctgttgcccaggctggagtgcagtggcacgatctcggctcaccgcaagctccacctcccaggttcacgccattctcctgcctcagcctcccgagtagctgggactataggcgctcaccaccatgccaggctaattttttgtatttttagtagagatggggtttcaccatgttagctaggatggtctcgatctcctgactacatctattttttttttctcactcttgtgtccctgatacaatgcctagcccataattggtactcaccaattttccttccttccttctttccttccttccttccttccttccttccctccctccctcccttcttccttccttccttccctccctccctcccttcttccttccttccttccttccttccttccttccttccttccttccctccctccctcccttcttccttccttccttccttccttccttcctttcttttcagtcttgctctgtctcccaggctacagtgcagtggtaactagctcactgcaactacaaccttccaggctcaaataatcctcttacttcagcttcccaaatagctggaactgcaggtgcacacccccacaccaggccaatttttaaatttttttttttcttggtagagacagggtttcactttgttgcctgtactggtcttgaactcctgggctcaagcagtcctctcaaagtactgggattacagatacgagccactgcacctggcctcttttcaattgtggtaaaatatacatgacataaaatttatcatattaactactttttaagtttacagtttaatgttaaatacatttacattgttgtgcaaccaatctcccaaactcttttatcctgctaaactaaaattctatatccttcaaatacctactcacccttctctcctacccccagcccctgaaaaccagcattctactttctgtctctctgagtttgactgctttacatacctcatataagtagagtcatacaatgtttgttcttttgtggctgagttatttcatttcacgtaatgtcctcaaggctcatctgtgttgtagcatgtgtcagaatttactttctgtgttgtagcatgtgtcagaatttacttccttttttttctttattattatttttttttatgaagacgaggtctcactatgactcctgagctcaagcaatccttctcccttggccgcccaaactgctgggattacaggtgtgagccactgggctcagcttccttcctttttaagtctgaatattattccattgtatatatagaccacattttctttatccattcatctgttgatggacacttgtgttgcttctgcttcttagctattatgaataatgctgctatgaacatgggtgtacaaatcaacaaacaatttttgaaggaatgaatgaatgagtgaagttgtaagtaaagtattacccacaagtgaaggactaaaacgggttgagacgccttgcatggtacatgatttgctcagctttcattgttgtctaaggatttgtcatgtttccagatcttggtctgtgatgtcttcattgcacctccatcttccatttctgggcctccacaaaacagtaagagtaacagccacagataaagcacctaaaggccaaggtgggaggattgattgcttgaggccaagcgttcaaaaccaacctggccaaaagtgagtccccatctctacaaataagaaaacagtgggtgaggagaaggagaattaattctttaggagtaggagaattaatttctgtgctttttgttggtcacttgcagaagagcatgtggtctaaagtcagaggctgtgggctcattattaaaatcttcagttgtagccactgaaatctttgtggtttgctgcatagtaatctacagttgtttacttcccaggcacaatgatgctatacaatgtgtctcctacaatcctattactcatcaactggcatcttgttcctccagtgactttggtacgttctgattcctgatgtcctgtcctggaataactgaaaatctgggctaaaaatgctaaaatgcattcagaatatggtgattttatcctgagagagttaatactacttctctaccttcaatggctgaggggaggctgacagttattctttaaattgtgtggaaaccaagacagtgaatggtgacctttactctggtaagacatcagagactacaggaagggccccagcaaaggaaatggtaacaagattgggagggcacaggcataacttggtgttgctgcctttgggaagccttcccttggtgttgctgcctctgggaagccttccctgactcaccctggcagagacagtgcagttgtcctcacctttgtattgacccacatctatgtttatgtgaaattcttcactgttgcggttctacttcttgtgcaatttgtcgtcattactggtttaggtggctgtagctgtcctccctgaggggctgaacaccttgaggagttcatcctggccacggtcccgtgccagcattacagcactggtgtagtactggcacaaaagaggtgtcagtaaaatgtctgtggagggaggaagggagtgaaattgggcagaggcttgtaggttatttccattaatggttgattctgttttcagctctatcagtctgtgttcgttgctagtggatacaatgaagtcactagatgaggagtcagaggcctaatccctctcagtgttccagttcccttatctaaaaggagcatgctactcactgtgtctcactgatacggttctggttctgaggttcaaaagagagaatggaattgaaagccaattgtataaatacatggagaaaggcctgtcatttgtttaacatattttatagcattttcttcatgtgaagcactggtctgtgtgcttacactggaatattaaaaaggcaaaatagaatccctaccctcaaggagcttgtggtcttaggagaaggtgggattaaaaaaaatataatattaagtactagtatttattgaatgcttgcagtgtgctaggcactgttctaaggattagaaatgaatttctatttgagctttatgacagcccctgaggtgtcaggtattattctcattcccaccctactgatgaaaaagaggtagaggtcccttagctagtaagtggaggaaccagggcttggactttagaccaggtgattgcatacagagcctgctctgctaagcactgctgaaggaggcccaggaggaaggagtttcttccagcttggggctccaggcaggcttagtggaacacagataacatgtgcacacgtcaaaatgtttggaggaagcgttctggaccaggggaaaggcaaaaaataacttgtttgatgttgcacttggccatgtatttgtgcactggagttaccttcttgattgtacttcgcaacttggcaaatagaagaatttgcttatgttgtctagacatacacttgctatgaggcactgagccagggcatctgggacaggggggagcaagccttaggtgaccagtgtgccatgggagaggcacagctcagatagagtcatgtgttgtgattgagacctatgaaagaaaactagattttcagaaagcatcattgttattttaaatgctaggttatactctggttgcagtgtcaaagttataaacaatgaaactgtcatttctttgagagtcaaatccctgaaaagttggctagaactttaccaatctattttatttttcttctgaaagaatgatagattcatagtaagttacaaagatggtaccaagaagtctatgtacttttcatccagtttcccccagtggatccatcttatgtaactattatacaatatcaagaccaggaaactgagactggcacaaagtgtgtatattatatagttctgttgttttatcgcatgtgtagattgccatcagcgtgacacagaactaagccatcaccatgcagttaccacttagtgtcatatctactcaccttacctccagttatctccaaaccctggtaaccacaaatctgttctccatttctataattttgtcattcaagaatgttatataaatggaatcgtacagtatatgaccttttgagattatgttttttcattcagcataaaatcctggagatccatctaagttgttgtatgtttcaattatttgttcctttttattgctgggtagtattccaaccaatccatcttcttttatattattgtgcattgaagggttgtggtctcctgaacagaagtctgtctccaaacacaaatcaagcagcaagatcatctgctgcaggtaagtgcagctctgacgataagatttatgttccttcatcttccacacagactctcaaaatccaattatttcatgcagcagagaaggtcttgtgttaggtagttggtttaggcccctgtatttccttttttcttctttcttcgtctcctcgatgggaaagacttgtgcctttgatcatgaagcaaaagagaactacaagttgccttcatgcagttacttagcaacaagcctcaacatccagctatactgagtggaggcttgttgaaaatgtgaggctgtcattgtccaggcagcatgtgtggggaagaaagctttccctcccacactttgatgctagacctgaattagaatccagaatctctcattgacaggccatgtgacctcaggaaagttactaaatctttctgagctggagctttacgttcctcatctgacagatagggataaaaatactgacttgacgagattgttgtgaaatgcacacaaactcatgagtgtaaagcgtgcaggacagtacctggtgtacagtagacactctaaatggtagctattcttgctgttcagcttctaggagtatatcccttccgttcagcatctgttgagcaccttctacaaagcaagcactgttctaggggttggaagacaccaagtctgttcttaaggtgctctttaagtgggaggggattgagatggagagtgggaagtggtggctggcccagagatgtaggcacaagctaagggctgtcatagaggtatgtacagagggctgggggagctcagaaaaaggcaccaaatggtgccttcacttctcactgtttattacagaactaaatagcattttaagtttgatcctctgactttatgtcaggaccggcaataatgaaaccatatcccagctgttgctgcctcatcagacttttatttcaaaccaaggcatcatcctcactagttttaccttctgtggggtgcttcccctatccccatgccttttgttggttgtgtacacagctggacaaatgatggtcagtacctggcgctggggatgttcaatgggatcatcagcatacggaacaaaaatggcgaggagaaagtaaagatcgagcggccggggggctccctctcgccaatatggtccatctgctggaacccttcaaggtactcttaaagttgtcctccttctagaacaaacaccatcatgaagaagggctttttgtcttcctgaggtctccctacattcaaaggcttctcacctcacttgaatggtctgttttagaacctgtcccatttgtatggattttttttttaatagtcccgctacctgagaatgtatggaatttattaagagcctcctcaaaagttgagtttaggaatgaatcctggacattttagcaaagcagatgagctatttaggacaggccaaagtgtgtgtgtggcgtgtgtgtctgcgcacatgtgcatgcacacatgtgtacgtgtacatgtatatgagtgtgtgtgtgtgtgtgtgtgtgtgtgtgtgtgtgtgtgtgtgtgtggtgtgtgagtgatgcagcaggaccatttccttatgaatcaatagtggagctctttgctgtggctttatttttgcctttccttttttagttcttccctccaagtttgggcagaatatgtgcccacctgttaataaatagctttttcatgagcctttttttgcccttgtcagaaagtcaaaattaagtctacagacgtccctaaagcctagagatacacaaacaattggcacctaccttcttaaattttatacacactttgctttctatgtccatgtgactttgagagtaaactaattatatgctctttttttttttttttttttttttgagatggagtctcgctcggttgcccagcctggagtgcagtggcacaatctcggctcactgcaacctccacctctcgggttcacgcagttctcctgtctcagcctcctgagtagctgggattacaggtgcctgccaccacgcctggctaattttttttttttttttgagacggagtctcgctctgtcgcccaggccggactgcggactgcagtggcgcaatctcggctcactgcaagctccgcttcccgggttcacgccattctcctgcctcagcctcccgagtagctgggactacaggcgcccgccaccgcgcccggctaattttttgtatttttagtagagacggggtttcaccttgttagccaggatggtctcgatctcctgacctcatgatccacccgcctcggcctcccaaagtgctgggattacaggcgtgagccaccgcgcacgcctggctaattttttgttgccaccacacctggctaattttttgtatttttagtagagacagggtttcaccatgttggccaggctggtcttgaacttctgacctcaggttatccacccacctcagcctcccaaagtgctgagattacaggtgtgagccactgtgcctgaccctatatgctctttatatatcctataatattattaaaccatcagtatcctttacagagtcctctgagggtaaacgaaaggtcctacttgtttaccagctcaatgtcattttacagatggttgcctacttgatttagaaggttgtttggaaggttattatgcttcttcctgaataattttttttggcccatgctgtaccatgcatgtctaatgctgtcaaaggccattagcctgccccagagttcctgctgtttgatttgtggctgcagaggacttggtggctctaggctaccatttttaattcatgagaagcaggaggccctgtatacctggtggctgtcctcctccaggtagggttcagaggctccttttattttttatttttattcttttttttttttttttttttttttgagacggggtctcactctgtcacccaggctgcagtgcagtagtgcgatcttggctcactgcaacctccgcctcccaggttcaagcaatcctctcacctcagcctcccaagtagcttggatcacaggcacatgccactacacctgtctaattttttgtatttttggtagagacagggtttcaccatgttggccaggctggtcttgaactcctgatctcgagcgattcacttgcctcggcctcctgaagtgctgggattacaggcgtgagtcactgcacctggcccccaggggctccttgccaggattttaaattatagttttagtgtagttctaggcaatgtaattttgaacaactacttactgtctacagccgatgggagagtttctggatgaacagagagaatgaggatgccgaggatgtcattgtcaacagatatattcaggaaatcccttccactctgaagtcagcagtgtacagtagtcagggtagtgaggcagaggaggaagaaccagaggaagaggacgacagtcccagggacgacaacttgtgagtgtgtcccagtgagtgggaacccttctggtaagggcccaggccccacacagacttgccaggacagatgttaaactctttggccaagggagtgcagggactagggggaactgtgggtgaaagcgccttcaaaaaaaggagacatacccttaaaacttgtgtgtgggtataaagtgatcctgtgagaaactataggaaatactgaaaagactaaaggagaaagttcaacttttctgataaaaccccatcccctgaggaaatcactgttagcaatctagtgtatttctcctcagtcttttcgtgtgttcatataattaactaagtcatattctgctttttttttcacttaacattatagtgtgaaccctttccagtaacattacaaatccttcgaagaacatgatttttaatgtctgaaaagtgtgcccttttgtggatgccccatcactcgacacttcctctattactggacacgtttcttagcctgttcccacactatcccttaccttaccttgcattttctaggatgtatatcagagaggaagcccttaccttagccacagtcttcactcccaaatcctggctgtctagtcattcttctcttcagttgagattgcctgtagggaaaacatgggcaggccagagtggggaaagctggggtagccaggatatctcagtttggcagtagagatctagcttgagactttccaaactgttttacatagtacctgagtttccttggaagaatcccaccctgaggtcatgggggctgggaagtggggaccagtaaaggaggaaggtatggctttgggtccccatctcagtgcctttgattgtttcaacatgagtttttgtttcataaagaatcctactgccccaggaggtaaaagggggttgaaaatcactgatccatctcacagggactgagcccagcccagagccatatgtggcctccccaagagggctcactggtgggctgggctcctggattgtgtttggactttggacatcagtgccagtcacacaaaggtcatctgcaggctccctcattaacatccctctcggtctttgtctcttttcccttagttttgggttagtgcctatgacatttgccactcttggctgggttttacaaacaaggctttaccttgcctgcctacatatccagtggtgctaccaggttaccacaagacactgggatcagaaaagctggaattaataaacaaagaggcaacattaggtggattaagacccagcctcaagggctaggaatgcttttcttttttttttttgtgacagagtctggctctgtcacctgggctggagtgcagtggcacgatctcggctcactgcaacttccgcctcccgggttctaagcgattcttgtgcctcagcctctggaatagctgggattacagacacgcgacaccacgccgaactaattttgcattttcagtaaagatagggtttccccatgttggccaggctggtctagaactcctgacctcaggtgatccacctgcctcaacctcccaaagtgctggaattacaagcgtgagccatcacgggctgccgcttttctcttgaactagattcccaggtagcttgctctccagcctcaggcaagggagtttctcctgtgtgctggtcctacagtcccagccccacagcactgatccccataggttctcagtttcaaagacagttgtttgttttcagagcccattgctcttttttgaaaattagattcagtcagaaaccatttcacctgtgcaaggacccccgcctgcaggagaacctatttttaggtgttaattttctttcttcaggaagagcaagcaagtttcccttctattaaaaaatgtctttgtgctgcaagagatgtttctctgccatctccccacattttctagtatgtaagagaaaagcagtctcaatattgcagccttgcctatcttagtgttgctccccagtaagctctgaaatgagaggtttatcttcttcagctgcagcagtgtccccagcaccataaggtcatagcaggggactcagtgaaacagcagatcccaggaaggctgaacctcaactctgcttcatcccgtaagactgattgatgggttgggccaaattataacttttggcttcagtaaagctgtacaacatttggcaacctgaggccaggacttccttgttcctgttgtttaagcccttagagctatactcatcagcaggctgtggcccttcataacctcttttatcttctgttgattagagaggaacgtaatgacatcctggctgtggctgactggggacagaaagtttccttctaccagctgagtggaaaacaggtatgtagccctgtacaaatccaattgcagtcatgcctgttatattttcattttctgagattctgttactattaattatacattatcattgttagttcctgcttattgagcatttgctgtggtaccagatactgtgctcactgctttgcatactttatcctattttattcttataaaacccaatgaagtgggtactactttccttatcaactttttagaaatgagtaaaccagaactcagagcagtgaaattatatgcccaagatctcacacagctagtaaatggtggagcctaggagttaaacccaggttggtttgactttaaaatctagctcttaattttgaccttactttcctctattcgctttctttcattcaaccagtatttatgagtacccactcaggaaagccctttcataaaggagctgctgacatagagctgggaaagtgatagcctctacctgcaagagctcacaggctggcggagacacacttgatagcaaagagcccctgtgtggtgtggtatgtgacacaatagaaagctgtacagatagacagctttttgggacacaaaagagggtaacatcactacttggtagagatgggaggtcttgttagaggttatctttgagcaggccatctttgagttaggctaaggacattgggaatggtgtttcaggcagaaaaaaaaatagcatgtatcaaggcaggaaggaatgaaaatatatgacagttcagagaatggtgagttgtacagggtgactgcatctcagagtttgtgacctgaaaacagagctgaagaggaacatgggggtatgattttttatttatttatttatttatttatttatttttaatttttttcgagatggagtctcactctgtggcccaggctggagtgcagtggctcagtcttggctcactgcaagctccgcctcctgggttcacgccattctcctacctcagcctcctgagtagctgggactacaggcgcccaccaccacgcctggctaatattttttgtatttttagtagagacggggtttcactgtgttagccaggatggtctcaatctcctgacctcgtgatccgcccgcctcagcctcccaaagtgctgggattacaggcatgagccaccacgcccggcctatgattttttgtttgtttgttttgagacagagtctcactctgtcgcctaggctggagtgtaatggctcaatctcggttcactgcgacctctgcctcacgggttcaagagattctcctgcctcagcctcctgggtagctgggattacaggcatgtgccaccatgtccggctaattttgtatttttagtagagacggggtttctccatgttggtcaggctggtctcaagctcctgacctcaggtgatccacctgcctcagtctcccaaagtgctgggattacaggcatgagctgccaccacgcctggctggagatgtgattataaaggacctgagtagtgtgaataagaagtttgaacatcatatactgtaagtattcaggagccataggtggcaggaagtggcatcacagattcttgcttcagaagaataacttgtttccatggagggtggattaaaatatagagagcatggtagtaggatgacttattagtaggcaggaaatgccaaggattagagtaaaggtgctgggtacagatttcacaccacagccaagcaagtgagaaatgcaacctgtgcagtgaagcctttaattgcgtagcatccttattcctcaaaacatgtcatgtaagagggaagagttttagatgtgtgtagcccagcttttgggccatttcttctacccctgccttaccattggtcatttcttttgtattcgagtaaagaaaagataaagggagcagataatgaagtattttctcagtttcccatggctgatttcctaaaactctcattttaattaactatcatctagtttccctggccctctctattcatctgcttaatgtgtgtacatcatcattcaacagatacttattggcacacctactgtgtacgaggcactggatgtgggtactgaagactcttgggaacaaataaccacactgcagtgggagggaatggggtcttgttgctatggccacagaagaaaagagctcaacatggccgagggccacaggaaatatcttgcatgtatgcagccccagagctcatgttgtggcccaaagtttctgcacgatgagcaaccttaacctgctgagatggtaaccccaacttgtttgggacagtaaaattgttttcttgctgggtgtcttcccttcccaatctaggaagatttagaattcaatataggatgatgaagtaaatcaaacccatacttttgtgttagtctgaggtataatttgtgtatttttgtcatttgaagtgttagtaatacttaaggggatctggcttaataataataatagctaacatttattgaattccaggcattatataaactctttacaaggattaactcttttaatccttataacaaccctatgaggtaaatactgttatcatcaccattttacatgtacgaaaattgaagcacagagaggctcaataatttgcccaaaggcacacatttagtctgtggtccaccctgctgaaacccaggcatactggtgccagaatccatattagaatgtctatcagattagtcttgcaatgaccattcaaaagttgtattgagtaatttcatatgtctgattttatttactttttgagaaaaggcctcaccctgttacccaggctggagtgcagtggtatgatcatggttcactgcagccttgatccccctgggctcaaggaatcttcccactttggccttccaagtagctgggactacaggcacatgccaccacatcctgctaattaaaaaaaaaaattttttttttttggtagagatagggtctcctatgttgtccaggctggtctcaaactcctgggctcaaatgattcttctgccttggcttcccaaactgctgggaatacaggtgtgagccaccatatctggcctacttctgattttaagtggaaagataagaattatatttaaagtgtatattatttaaggttcctaagcaatattggaatgcttaagcaatttgttacatttttcttcttggtgttcactgagctttttgaatctacacattgatatcgttctgtctttcaccaaatgtgaaaacattttggccatgatttcttgaaatatttcttcttctccattctttcctttcctctggaactctaattacacttacattagaccttttgttactgttctccaagtcatcgaggccctgttattatttttttaaatcccttcttttccctctgatcttcagattagaggatttctgttgttcagtattaaatttcattgactcttctgcaacttccaatatttttcttaagctcattcagtgtgtatttgtttcagttattattgcatttttccttttctagaatttccatttggttcttttttcctttttattcattacaagcgtatttttctttatagccttaatcatagttataataactgttttaaaattctcatctgcagctgggcatggtggctcatgcctgtaatcttagtacttctggaggccaaggagggacgattgcttgaggccaggagttcaagactagcctgggctacatagagagactccatccctaaaaacgaacaaacaaattggccagggaggtggcaggcacccattgtcctaacaactctgtaggctgaggtgggagtattctcaagctgaggagttcaaggctgcagtgaactcttaccactgcactccagtgtgggtgacagagcaagacctgtgcccaaaaagcaaacaaaaattcttatctgctatttctaacatttgggtcgtcatggttcagtctccattgatttttttcccttgaatatggttcacattttcctgctttggggaattttgaattgtactcaatattgtgagtaatatgtcataaagactcatatccatcatgttcctctgaagattattgtgtatgtttgtgtgtatatatgtttaagcaggcagtttactttgctgggctcaaaatcaaaactccatgttttcagtggtgtcagcagctgacatctctgtgcagttctttagctgtagctaggctgcttggcatcttgtcacagtttatagttcaagggtttccagatattcagtggagtttatgtgcagaatttaagctcttactttgcttctcttttctgggatttcccacttcactttccgggtgctgtggtcctcccaaattctatactcacccagcatgatggtgaagagggctgccctcaggcaaaaacccttaaaaaaatgagaagttcacctagtgtttgttcccttcttctaaatgtgcatgtgtcttcagtttctgcctgcttttggtcgccctgaaatggttgttgtttatagttggtccagagtttattgttgttactttgtgggaagattggtccgatgggaactagtgagccatttccagaagctgctagccttccatgtcgtgattcataagaatttttagttttcttgttaggttttctagcatcagataagtgctagggaaagttttcgttgctaggcatttgaaattcctatacaggaaaggaaatttgaatgtattaaacttataattgcagtttaaattggtgtaagggaattaatttaactaagttttaaatgggactggatatttaagggattttataatctgttcaaaattggatgccttaaacagtcaaagtcaattggctgttcactttaactagatttataaataggaaaatatttgtaaattgaacttaagaacttaaggagaaaccagttccctaaagttatttcttttataaattgaatattagtttaataatgttaatcacaaatcgtctttttattcacaaaagacacccttggggcagcaaaaaactccagtggtaataaggaacttgggctttagtggggcagacctgattaaccctgtgtctacagacaacgagagaagtgcaatgggataggcgagcacaagtgctgtgggaggatgaggggatggggattggagatgttcctggaggagatgacacctggcagacaaagtgagggaaagagcattcctggctgggtctaggaatggtgtggagtgtagcacctgtgaggatgtggaggcctgaaaaagcattgcccgcttaggaaacttacaagttcattttggctgagagaatgaccttgggggctgagctcgggagtttgacctgcatcctagaagctgaggaagcaccatcaagaaagagaaaagacaacccacagaatgagagaagttttacaactcatatatctgataaaggacttgtatctggaatatataaagagctataaagacagggctgggcatggtggttcacacgtgtaatcccagtgctttgggaggcagagacagggagatcacttgagaacaggagttcaggaccaacctgggtaacagtgggaccccacctctaaaaaaatatatttttaattagctgagtgtggtggtatatgcctctagtcccagctactgggggtggtgaggggctgaggcagaggaattgagcccagaagttcaaggttgcattgagttatgatcatacgactgcattccagcctaagccacagagtgtgacatttctctgtggccaataagcacatgaaatgatgctccatatcattagccatcaggaaaatgcaaattgaaaccacaatgagataattcgcactcactaaaatggagaaattggaatcctcatacactgctaatgcaaatataaagtggtgcattcacttgaaaagtgtagcagttcctaaaaaaggttcaacgtagagtttaaaaataaaaaaatataggccaggagctatgactcactcctgtaatcccagcactttgggaggccaaggtgggtggatcatctgagctcaggagtttgagactagccgggacaacaaggagaaacaccgtctctgcaaaaaatacaaaaattagccaggcgtgttctcacacatctgtagtcccagctacttgggaggctgaggtaggaggatcacgtgaagctgggaagtggaggttgcagtaagccaagatggcgccactgcactccagcctgggcaacagagtcagaccctttttcaaaaaaaaaattttttgccaggcatggtggcactcacctatggtcccagctacttaggaggctgaggcaggaagatcgcttgagtccaggagttgaaggctgcagtgagccgtaattgcaccactgcactccagcctgggtgacagagtgagaccccatcttgaaataaacaagaattaaaaaatgaagagaagtagtatgggtgtagttgcagaataaaggacagtctttaaactgaataaactcagctttataaaatacttttttaaaaaggcggagaaaagaagctgagggaacccattgaactataggaagaactatatttgcagagggaggggggcctttgggaacaaaaccacccacagtctccatcttggcggaggagccctgacacactcctgcactcctggagcacttgggtgggactaggggaggtgccactgactccaggagctgaggtttgggctgtgtagaggatgagtagggagatgcagaggcagagaggcctgtgttcaccatgggatgacacaggagaaaaggctggccagctctccctgtcttcccaactccctctaaagttggcgagaaaaagcccttaattgtattgcaatggttatggattcggaaatggtttttcccttgctgtgtgttctttttcctcagattggaaaggatcgggcactgaactttgacccctgctgcatcagctactttactaaaggcgagtacattttgctggggggttcagacaagcaagtatctcttttcaccaaggatggagtgcggcttgggactgttggggagcagaactcctgggtgtggacgtgtcaagcgaaaccggattccaactatgtggtaagaagagaaagtttgttctgtggggccatggcttgaagaggcactgagcagccgccgtgtctcgagtcacatcactggggtttgtgtctgacaaatgggggaatgcagactttctccagagagctgggaattgacagttctctcaccccgcaggtggtcggctgccaggacggcaccatttccttctaccagcttattttcagcacagtccatgggctttacaaggaccgctatgcctacagggatagcatgactgacgtcattgtgcagcacctgatcactgagcagaaaggtaagaggcaggtccagaccttgggaagagggacaggtggaagcaggtggaaagggctggtgacagggcacttgaaatgacaggaaaaggtttctctttggcgttttgcaaacctgttagccactgggtctgtgtcttgttttcttttttttttttttttggtgggggaagtagggatgccagtctccttgaggatctcatgaaagcaataaatcctctctgaaaaatgtaccaactcagaattttgcacataatttcaaggagtacatgaatttccttagtgagggaggatgatttatgacaggttggagccaggtggttgacctgcatgggtcttcgtggacctttatcctttctggtcagagtcactctggggtgcttctccctcagccctgtctccacttgcctcctggtgggtccttctgccagagatgagcagtggaattggattggcacaggctaggtcagaagatcagagttcccggcctcgcatagtcattctaagccctaagactgcagtctctccctctgtccacttaagttgctgtgctggttaaatagactcaatccacttacttcaggtgtattcatatctggatgtgctggccttagtgcactgctaggtgcctttgcaagggatccaggttgggggttgtcttgtagattcagatgagtgtcctttggtccccctgggggaccctatctttttgaagattctggctgtggtggttggggcaaagccccttgggcagcttcacagtgtcccccttagggacattttctccacctggtctgtagtgggagtgtagagcctggtgtgtaccagaaattacatgtcttccccgtttgtcaaggaggtgggcagggagcggccagaggtgaggtcagttacttaggcaggcttctgatcaccgggggccactagtgctgtgcagaggagtttatatttgtatccagcaagtgatggtaacagtgagtagtttatttccatactcagttgtcagccttggaccatgaagattgtgtcctataggactttggatcccagggttcagcagagttgattgtatgtattagatactctaaagatttttcaatgagagtatctcactttaattgccagtagcgctaagtaaatgatggcttttaatttctctgccttgcaccttacataacaacctcttgctagaactagatatttttttctttgacagttcggattaaatgcaaagagcttgtcaagaagattgccatctacagaaatcgattggctatccaactgccagagaaaatcctcatctatgagttgtattcagaggacttatcagacatgcattaccgggtaaaggagaagattatcaagaagtttgagtgcaacctcctggtggtgtgtgccaatcacatcatcctgtgccaggtgggcagcagcatgttgaaggagttgggctgaattccatttgtgctccccccccagtgatagggtgcccacctcatggttttaaaactggtcactagaaaacaagtctgttccatcaaactaagtggtgcttattggctttcattttcctggcatctggatgaaccagactctatcagcaagtcatgagccataaactggagaatgtttttttgttttattttattattttttaaaaaatatttttcttgagacagacagggtcttgctctgttgcccaggctggaatgcagtggcacaattatggctcactgcagctttgacctcccaagctcaagcggtcttcctcctgagtagctggcaccacaggcacatgccaccacacccaactaattttttatttttagtagagacgcgaggctgtactttgggaggctaaggcgggaggaatgcttgaacccaggagtttgagacctgtccagcttcctaaagtactgggattataggtgtgagccactgtgtctagccaagaataccttgttctattgcagaacatcttgtcatactgggattagatatactttaatgacttaaaacataaattggtgtacagaatgaagatagtttttattgataagcatatacacataaaatttgtatcaactcagtaattgtcaaggaagttttaattcctgaaagattttttttcatagaaaaatatttctcaagattcttagagagtgtctaagtcaatgccaagagaagtttggaaagactttgagagaaggctagcccagcatcttggaagtagaggtggatttagttttacatagttctgttggaggtgataaaagagaagaattccttaggaatcactgtagtgtaaaatactattaaaatctctcaaaagcctagaactgggctgggtgcagtggctcatgcctgtaaatcccagcactttgggaggccaaggcaggatgattgcttgaggctagtagttcgaaagcagtctagaaaacagagaccccatctccaccaaaaaaaaaaaaaaaaaaaaaaaattatttaattagctgggtgtggtggcgcttgcctgtagtcccagctacttgggaggctgaggcaggagaattgctttagccagaaattggaggcagcagtgagctatgatagcgccactacactccagcctgggtgacagagtgagactctgtctcaaaaacaaataataaataaataatcaaagttagaactccaagcggtttagggttgctacaaattacaggatagatgtggcaagtatgtgtacttttgagtgctgcctctggcctaggctgcctgggtgggggtttgcattgaagatctgaggctgaattgggctccgtggggaagccttgcatggagtcttggattaacgatgccaatcgtggggtctacattgggttagatagatggatactgaatgtgtaggtattttctccccttagggacagaaagatctccttggggaggtctgggggcacttattctgttgaatttccatgcagagctgggtttgcttcctaggagaaacggctgcagtgcctgtccttcagcggagtgaaggagcgggagtggcagatggagtctctcattcgttacatcaaggtgatcggtggccctcctggaagagaaggcctcttagtggggctgaagaatggacaggtgagtgctccctcacgtctcctgtcaggctgataatctgcatgcacacgtgggtgacccgtctagcaatgactctgagctgggttctcagggcaggaaaagggcttctctcctccatgggtgaattgtggggcagcctgagttcagttttttgaggacagcctcaggccaaaggtgctgtggccctcacactcctagcaggcccacgttttggcagagttgagctataacctttggctacatgtagagtgtattagtggcttaaggtctccagaaggtgggagatttgttagagatgttgcttctgtggatttctagagggaggcagagatcgttacctaggtcagctcctgattagggcagcgagtggattaaggcagtgcgttccagcatgtgtcctaaagaatgctgggtcctcaagatactgatagatgtcataagcaaaatgggccctttggccagttagatgtgggatatccaggttacacaaaattctgtgtgtgtgtatacatgtgtacacgtgtgttctttgctcagcataagaaaagttctaagtaggctgctacatggaactttgaaagtgacaatgtagctgcattagcctgacagccaagctgtgcagcagatggcttatggctgaggcttgtcaggtctttgctggggatggaagtcacagggcatgagagcagtgggtgaagtcaagcagcaatgccaaggggaggaagggccgcttatttctcaggcagctctcacttccaatgggagcatggactatggggtcaggtgggccggaggtcgtgttcttacttagctactcactggctttgtcatcctgggcaggtcactttacctctgtgaggctggttttacatgaggataataccacatatttcatagggctgtcaaaaacagatatcatcagggttgggagttaaagccaatgttaaaaacaaaacaaaacaaaaaaaacaccaggggtattaaaacaggcatggtggagggtacctgttttcccagctactcaggaggctgagataggaggatcactttgagcccaggagtttgaggctgcagtgtgatatgattatacctgtgaatagccactgcgatcagcctgggcaacatagcaagaccttatctctaaaaaaaattttttttaaaccagggatatcagtaaatgatagctatcatgatcactatcatcattattataattttctaccacatgtcttgtcagtgttcatagtagctttttcctgtgttagttcgtgactcagatctctgctaggtggcatctcctaaagctgcagtttgggtaatgtcatcaacaaatccccagtccgaacagacactgaagtgagctcggcctgtctcagggctgtcattacttctgcagcctctgatgaacctcgcttctggcctcctaaggataagccattgccccccacccccctctttcttttgatgagtccttttccctgcacagagcttctggtgaaggtggtgggagttgttcttgcagagcacatgggattccaacggcctggcagtgggccaggatcttgttgccatggtgactgacactgttttcgctgaaattttgccagatcctgaagatcttcgtggacaatctctttgctatcgtcctgctgaagcaggccacagctgtgcgctgcttggacatgagtgcctcccgtaagaagctggccgtggtagatgaaaatgacacttgcctggtgtatgacatcgacaccaaggagctgctttttcaggtgaagtccctgagggggcccagggacatcatcctttgattagagactctcctctagcttcccagtccctgcaggaggctctcctgctctggcccaggcaggtctctgggaggggcaggggccaagcacatgcacagagtcccagaggccctgggccacaacctgctcctcccacacaggcacaagccgcagggcctggaccggcctctttaactttggtttccttgccaatggaaaccgaaggctctgagccagcagagcctttcttaagcgtttaccatgaacaagaaatggggcaatgactctgagaggggtgtgacgttggcactcagtgaatggggcgatggatgcacttcctttgcagaagtctgtgtctcacctgctgcaggcctgcctgtgtctatgcgcacctacagcgtgggaaggaaacaggatgttttgtcatctgaaagggggaaggggatgggcaagcctggccttctacttaattcacaagaatgctagaagagccagcagaatgcgaagtgcttggatctttggggttgtaggcgttgttcagtggagtcatccagccctgtggcctgaggaagtgtgtcaccagagaagacagcccggcagctctgtgccccgggcctggttggctttctgctgggctcgcgccattctttctctctttaggtctttgtaggtggtcaggactggttttccagagtgaagttccccccaaagctggagcccctcctgactggtttcctcggccactgcagggtttcctgatgttatgggcagattcagtccccttaccaggctcctccttgttctcagcagcagaatcgatgggggaggggtctggagtggggagcagcctcagtcaattagaaggagttacctggccacctctagcccagaggtaactccatgtcagtctcaactcactcatgtccttgagagagtagaatggtttcggggaaagagagggcatagccttcaagctgacctgggcttgggtcctgcctgcatcccttactgtgtgatcttaagttagtgagcctctctgagccttaattacttttctctaaaatgaaattagtaattgccccttacagaattgctacaggaatacactagatactacagtgcctagctcagtgttgagcacaaaatggggcctgaaatgttacttcccttctccccagcctcacctcccacctatagggggcatagctggccccaaatgtgaatcttgtgtctgagcctagaatcatacaagtgtggaagggcgtctgtgctgccccatccccactgctggctctatggcaggctaggggaggtgattctcagccctgccaggagacatcagcattcccagctgtaacattgcctgctggcttttcctcttctccactgcccctccctctacacataaaacagctatattgattttttctcattataaaaaacaatccatgctgattataaaagatttagtcattataaaagatcctaggcagaaaggtatgagcatatttcaggagaataattttttttcaaaagtaatacttgcttactcaaaaattccaacaacacgcaggtgcatggaggggcttgcctctgttcatttctcttgcctctgttcatttctttgtggtcccctttcatccttttccctccatcccactgtaagcaatttagtgggattcagtctttaagagggtattgggctgaaatgtgtgagcgctgaccaagcccagggtggttctcacaggatccccactgtccctgttccccaggaaccaaacgccaacagtgtagcttggaacacccagtgtgaggacatgctctgcttctcgggaggaggctacctcaacatcaaagccagcaccttccctgtgcaccggcagaagctgcagggctttgtggtcggctacaatggctccaagatcttctgcctccatgtcttctccatttctgccgtggaggtgccgcaggtaactgggggtgcctgtccactcttagcactggcaaggctgacaagaccagggaagctgggccctttgctggtgctttggggagagagtagcaaggagagaagaatggcagctgtgaggtcgtgggaggcagtctgggcctggaacctgccgccctgtctccactccttgcaacctgtgtgactgggggcaaacagctcaacctccctgagtatcagtttcttccttgtcccctttctgtagggatgggaggggtatgcagtgttgtcagcagcgtgtgttttgcagagagcccagcgtggggccgaatggagtgagcagcaaagccgggagtccggcagggtgtgtgtgtgagtacgtgtgtgatggtggtgatgtgtgtgtgagagagaggggagagagagaatgagtgggtggggggtgtgggctgaggtctgtgagccaataagggagcatgggactctgcacaagctctctgaaccaggaggtggccagaacagaaatggggcactgaagggtggagccacagaatgggggagggcagaaccacagacaggcgcctgagattgacctcccgaatgcaggatggtctcccctccaccttctgcaccccaggcagatggtgctcactgtagaattgccataaaacagagacgtgcatagcgagaaactgtagccttcagcatcccatcctcaggacagaatcactcttaaacatgttgaaatacatctgcttagcgcttttctacgtgtatatataatatatgcataatatacaattaggagcatgtggttttataagaacatttttaaacaaaagtggaatcacactgcaaatacttttcatgacttttatgtgtatacgtattgctacctatagatggaacctcagatttactgtattccctgagcctggcctgtaaacaagacttctcatcccttcctttatggctatcttctcatttcacctcacattcggttatggcagccccatcactgtctatgaagtgctggctgtacactagtcatctggccttttcactcaacaatctcctaaagcatcgttctgtgtcagtaaatggtaaatgttcttattctgcatggcaaaatttagggtaattgtagactcacataaattgtaggaaataatacagagatcccttaaaccctttgcctagtttcccccaacggtaacagtgtgcatagctctagagtgatcttcccacccatgttggcatgtgtaatctcccaccacagtcatggcactgaacactgccaccaccacaaggtccctggtgttgtgctttttacagccagcacccctccctcctgcctggtccccacctgccttgtatttacagctgcattttattgtgtcttgtggatgttccacagctttctttaccagtcctactggacatgtttgctgcttatagcttttttgtattattgtaaatagcaggcatctttctagctaggtccttgcacctgtcccaacttggcgccttggcataaattcctagaaatgaaattgctgggtcaaagcacgtgtacctttgaaagacttttagggaaatttccaggtttcccttccgctaggctctgtcagtctgttttccccatacaactcagcttcaggctagagcccacttcttctaagttgatgataccctcgaaactcatgactgcaagacttactggggaaatgcccatcatccatgcctgacacagatcagctattcaagaaatgttagtggaattcagatctgaggaaaaagaccagaaagcaagaggaagaagggaatgaggtgggtggaagtggcagcaggacgaggggcacgaacagcttctcctggactgtgtcctcgtcatccttgtctgccccattacaaacccacgcaccacatccaccaggaactcatctccctcaattgccccaaactagctctgcttattttattaaaaggttttctcccaagattgccatcctgacctcaaaaataaatgcagtttgctgctctctgactgtggccggccaagaggagccagaggggcagcctggggcttcctctgccaggactttaagattcagcagcaaagtcttgctgactgcaccaaggccatcctgctgacgcagcgggtcaggactgccaagggttaggaaacacattctcaagacaaaggctgttcatctgtcgcctctgcctccggccatcctgtggttttggcccagagaggagggagaaagcatcagacccagtcttggaatttttggttgcctttcgaaatttacattgtcttgtgcaagaactggtttgtcagggctgccaagtaggacaacgagccctaggagggcttctcaaggcggtggtgacttcatgtttgaaatccaacagcaagataaagtatagctcagagagtatttgttcagtggggtctatttttaaaactccactcaaattgtgcctcccaagtaagtccaagtgttagccatccatcatatgctcagctgtgatatgcctgcctgagtgcctgtcccactcacggggcagtcagcatggcaagcagttggtgtggttcggggaaggagcaccagctttcagtcctgactctgccatctcaagcagctgtaactagagcaactcatttcactctttggggcctcatttcttttctgtgaaatggggttaattatacccatctttcaggtttcgtcaagccaaatttctattattatttctccttattactgactcataaaatagcaaaaaccacaaaacacaactaaattgcaacaggctgtacttactgacggactttagaaaggaaagctcattgtgtgctttaagaaaagctttcaggagtttgagaaagcttccaggagatggtgaaacttgatctgagccctgagaggtctggaaaggaagagtggagcagggaagcttttcaaacaaagggaaaggtgggggtaggaacaagactggagagcctgggagatggtgaggagctggtgctgagaaaatacagtgaaggtaatgatcatgcctgcattttgcccagtgcttcattatttttggagcacatctctcctttgcccatggtagcctgagctgggcaggacatctaaacagaagttaatggatttacccaaaaagtcaccagcctaggatgtggctgagcctggcctgggttctaggtcacctgctccgtagcctatgcctgctgccccgctaaagggagcatttaatgtgccaatgaggagagatggcatggtggaaaagataagcacttggaagcagccatgttttgctctgagagtagacagactcaaaataaaaaaaattccttcaattctaaagctaaaaaatgggactggaaatttcaaagacagacaaaagccccaaatggagaaaacaatacttcaagctccacatttgggaaccattagcacagaggtcctggctgatttctcttccctgcccaggaagccaggagagatgcaggccactgaagcacactggctggcctaaaacaagggcaaggcctttccttgttaaagatgtcatggcccaactcaagactcattctcaggcctgcacgcacatatgcacatatacacgcgtgcatacatgtggcaggaaggggcacagaacctggagtccagtcacctctggctattgccagctatttgctgggacaggtcatttgtcctctctgagtctcggtctcctgggctgtagccagggagaaataatacctactgcacaggactgtggggacagccaaaagccttttataaacctaagaaagagaagtcgttaggaactattcatgggcactcacagcaaggcaaccccatcttgtaggagggcatctgtccccagggcagggatcaggagagctgtttccagaggcttccagggtaacttggagcaaatcacttacctttcttggactcagtccctggaagaagaggccattccagaccgcttcctcccacgaactcattcattgtgtcagcaaacgtagactggggttctgctgagggaggccgatacaacccaccactgcccacggctgtgcacggctttgctgtgggaacaggcctgtaactgcggcacaacctgcgatctggacaaagggcagaggaagctgagactctttcccctggggtgggggcttgaggggcttgggaggactctgcagaagaggtgacatttcaacagggccttgaaagccaaataggtattttccagaggcagagtggggaggggcaaaggcattccaggtgagggtgacatcctatggcgaggcaggcctgtaggtgggaaggaggggaggatgggcagagagtttgtgctgtggagcacagtagcccagtcatgagagaggtgcaggatggagcacacagggtgggctgggcaggctgggcagggtgctgattggcggctgcagggctgctccccaggcatgggtaatcatcccacgcatctggaggcaggctctgtatgcatctggttctttccatggctctgaaaacagtcttctttttttcccttgatgaaatcctgcagtccgctcccatgtaccagtacctggataggaaactgttcaaggaagcctaccagattgcttgcttgggtgtcacagacactgattggcgtgaactggccatggaagcgctagaaggtttagattttgaaacagcaaagaaggtaagcatctagccagcaggagctggagtttggtccttgtggggtcccttaagaaggcagatggggacccaggtggcacggagaggccatagactgcagcagtctctggagttaggctgacctgggcttgtatcttagccacttcctcactgtgggcctgggtaggtgacaccctttctaagattgcttctctatagacgtaggatgatgacaggccccatcctcacaaagctgtgaggatcaaatgggaggatgcctgtaaagcctgacccaggagcagcatgtcagattctggctgtcactcttattagctgttctctgtgggaagcacctgactagtagcctggcacatcacaggcactccgtaaatggcggcttttattatcggtgtagtcactggccatgatgctgcacacaatgctgcttttcttagcatctgccaactaaggtgggagagatggtcaaggtctctgattctgacagcaatgtgggcacttcccacgtaccttcatggcgggattcatggacttgattcgttgtgtcctttcctggcctagtctatgaaagctagagagatggctgaaaacatctgacccctctctgcacataaggaaaagcccaggtatgttcctgagctgtgtttccatctagaacctcagatggaggaaggaatggcttccaacctccactcccctaccccttccctctttatctccccacagtcaattaatgagctgctcattttgtccatattcccgggctgacattgaaggagtggcaaagagggacgtgatgcccgccttgggttagatcaagacttgtaggcatgaagagaggagactggaccagaccaggactaagaagcctggctgagaacgagctgtgtcacataaggggctctgggacctcaggccagccactttccttggagccccagtcctcccagttctgaaatgggggtggtgagaatgcccgctgcagtcatgaggcttaactgagatgttgtaaaggggaatttaaatcagggatggttgtgcagatgctagccattactaaacaagggaagtgatcgttgtgtaacaatgatctagattatatttttagatgtcctcagtgtaggaaagtggagatggaggaggctgtaagaattcagaggaggggccaggcgcggtggctcacgcctgtaaatcctagcactttgggaggccgaggtgtgcggatcacaaggtcaggagatcgagaccatcctggctaacacggtgaaaccccgtctctactaaaaatacaaaaaattagccgggcatggtggcaggcgcctgtagtcccagctactccggaggctgaggcaggagaatggcgtgaacctgggaggcggagcgtgcagtgagccgagatggtgccactgcactccagcctgggccatagagcaagactctgacttaaaaaaaaaaaaaaaaaagaattcagaggagggaggaggcatctctatggagggagcttccctctcctgccccacccagaaatgccagcagggagggagacgacaaatccctagaatagaaaggattgtaaaaagccacaaggtttaatatgagtgtttactgatatttttataaatatatatatttttatatatttgtttaaatattgagacggggactcactgtgttgcccaggcaggtcttgaactcctgggctcaagcagtcttcttgcctcagcctcccaaagtgctgggattacaggtataaaccaccacacccagccagatttactatagttgaaaagtaagtgtatgtggtatatatctattgtgtacaacatgctgttttgaaaaagccacatgatattgaagataggctggatgttactatttcatctaaatcccgagtaccccacctctttactctgtgccaggcactcaggctcaccagcttggatatagtggttcctagagatggacagccatccccactagatggcagagaagagctgctgagctcccgccagaccctgagcagagctgcaggttcctccctattcccaggcttccctctgctgagctcattcaggggccttgtgactctgaccaggcaccctgacgctgcaaaatgtgtcaggttgaaggaactcggaaacagatttattaatgggcaaatcctagacactagcacagctgagctacagctagaaagacccttgagagggtgtcagtagcaggcccctttccacaaagaagatggttggagcccagaagcagagaagtaggctcagagcgaggactcagacctcgaatgctcctttccctcttggccactgtgctgggctttgcagggttgccctctcaaggcgctttaaggaaacccagatctagagggtgatgtgtaagacctacagcttgggacacaggtagtcttagccctgtgttccttggcccatgtgatgcccgcattgcccttttctacgaattcctcttcacaaacacttgtttgccaggttctgactctgatgcctcccttaacgctgcctcccacccctgctcatgctcagaccattcatccgtgttctccaggcatgtggttcgtagttggagagctcttagctctgggaggtgtcatgatctgtttaattgaccagctttccctgttagaatgtggacctctgaattgtggagggggacaggggccgagacatgtttctccctgggtcctcagtctcttgacaggaagcctggtcctgtgggatgaaaagataaagttgcattgtggtcacctgcaaggcaggccggggacttgctcatctcccgaggtcttttcaggagggaggatgccatgctgctgagcagaggctgcaagtggtcaggattgctctgcgtgttcagttcaaagggctctggagctgctgcctcctctaggcacaggtcagcccattttgaatggggcaataaatggtgacagcaaagccacctgaaagcagcctgacctggtggcttgtgctcctccaaaccctgggcagaatctgaaagcagcaaaactagcttagctaacaccagtctgcttgttcctcagaaacttctagaggtccatgagttaaagtctctggctttactgtgagttcaaggcaagggctgcaattttagggtttacataaagagtttgccttccacagacttggtgggattcattccctacccctccaccttcttccagaatctgtctttataccctctcagctttcccctcctctgctccctctgtggtaccaggggctctgggtcccctgtgtctgtggcaccactgggtaggcatagctgtcccctgcattctacccatgttgccaagatgtataggcagtctctcatcagtccatgcatctcatcctctcctgctgtgatgctgcgtgaccccccagagggtcagaccggcttgttcttctttgggtctagagtctcccaaggaggcaccgccacagactgtggcatcacggttttgttttacctgatctcaaaatgactgatgcaactgggatgtctttgctgttctttacatggtccaatcccatggataaagccatgcctcgctgggtggtataacctcctgcacgcacgatgattaatctgtgcttgctcccttcctctcctctgtggctcactgtctagatagagcttgacttcccacccctagccaatcacccacttttgaagccaagaagacagcttattttattctttatttcttcgccacaggccttcatcagagtacaagacctccgatatttagagctcatcagcagcattgaggtaaaagatgaagcatttttccttctcaagaaggcatacttggggttcctgttttaggggcagcccttctaacaggcaagagccttgaggacatgggaacagagctcactggcgtctgggcatctgggccacagccttgctccgggggcagagtggccacactgggggagacaacagcaggtagtgtgagctgttgtgtgatagctgggtgaggcacatgggttccggatctctccagggttgggtttctagtctgtgaaaagggattggacctacctcacaggctgctgtgaggattcagtaggttctcaggaactggtttgcatcctcctggtggcggatagctggtcaccatcctctcagactccagtaatctgatagtgttggaggagtttcccaaatgcacatgagctgagctccattccccagaaatggacctggggagcaaggcccacagtctgaactgagcgccccagagttctggagcaacccctagccctactgtttctggctgagaatattgaccttgtcatccaaacccaataggcctgcagtgtgctaaggaagctggttgtaggtatgccatttgctgggtggtggtcaacactatgctttttttttcttttttttttttttttttctgaaacaaggtctcactctgttccccaggctcaagcgcagtggcacgatcacagcttactgcagcatagacctcccaggctcaaatgatcctcccacctagcctcccaagtagctgggaccacatgcatgtgccaccccgcctgattaattttttgtatattttttagagcagggttttcccatgttgcccaggctggtttcaaattcgtgggctcaagctattagcccaccttagcctcccaaagtgctagcattatagacttgagctaccatgcccggcccttagacactattcttaatttctgtgtatctcagtgctgtctggctgtctgttaaaaggcatatacattttttctcctgaacatatttattgtgaaggtatgggaatgtgagatacatttgaattcccagttggaaacagtgaggaaatagcaaatgtcttgtccctctcattcatttccccataataaacacctgtcatgggccagcccttgtgccgagctcagtgggcacagagctgaggaggagagaggctgacaggagctcacagcctgctaagcctcataacgtaatctgctctgtgccacatgcgtgatttatgtgaatgctgttctagatcctcacattaactgaatgaggcaggtactgttgctctccctattccatgcaggaggaaattaaggctcagcaagacgatgccacatccccatgggtccatagccaaaaacttggtggaattcaagcccagtctatttcctaagctcatgctctctcggccacataccctccctacccgcgtgttgtaaggggcatctgtatattctggggtttacctacccgcgtggtaaagggcttgttcggagctattgctcaaaatgcccagtgctgctgactttcacttgtaaatccactggcctggatctgggggtcttcacctgaagccaaggagcataattttcctctctacaaaagtaactgctgtggggtccaactattacttgtcacatcttactggggtcaaaatgtagtcctctcctcgtatgctatgagctgggaagtgcgttaaagtaaactcctaagattgtctcttgaaaaaaagtaaagtgcctttgagtgtgctctatatcgactgcctgcagacttatttgcacacatctgggtgctcagcataattccagagaactgcagatccttagtgggtgccttttggataggggagatgttcttgtcctgctgacggggggaaagaacctgcccatgttgacatgcacctgctgagtgccatagatcgtttttattggtcatggtgatatcctggggcctagaatggatatggcctgaatttcatgtctagtaaaaccttttttgtttgtttgtttgttttttttttgcagagatagagtctggctatattgaccaggctggcctacaactcctgggctcaagtgatcctcctcttttgacctcccaaagtgtagggatcacaggtgtaagccaccatgtccagccaaaatcaatcttttatctcacggcaagatttcaattcatttccaactattaggagttagtttgtttgatgagcctgagctgtgtgcaggtttttagaatgataatttctgtcagtatggaagcatgttgcctccagctgttaaaactttcaccagcttgtctaagagtttgattcaatgtcttatcgtcctccaatatgctgctctttctagaaaacaagcaaaaggaaactgctagggctcagggtttgggtgctactgagtgtttacaaatactcgagctgtagacaagcgaatgttccctgacacagaaggaagaagctttatcctagctgtgctaagtgtgtgtgtgtgtgtgtgtgtgttgttggggacatcacttgcttcaaaagactacattgtgtgatacaaggaatatctggagtcagacagaactgcgtccaaattccagctctgtctgaccctgacctgttcctcttcttgagtctcagcgtccttcactctaacacttgggtagtgagacctaccctgagggtcactgagaggaataaaggggccatgtgtgtataaagtatatacccagaacctagtggatgttcagcatgcgggatttcttaccttctctttagaagtagggatatcgtaagacttgtcatcctattttattggtctccctcttgggcagaaaccctaaacattctcctgctctgtcatccccatgagccacaactctgccaaacggggcctgcggatttgggagatcttgggagcttaggggtcatggatgagtcagagcacacactattcaaactattccgtcatagccttggaatacacaggaaagcaaccctgaggaatttccattaaacaaacaaaggtttgcatctttttttgatctttgcttgtctggtaaaagcctgcttttgttgtcaagccttcccagcgggaacctaggggagagagacaacagccaggagccaagcccaggttccagtaggaaggcccaggggcctcacttgaaatagccacatctaacctttgtaaaggctgcttcctgcccatggctgcagaggccatttcctttgcttctaatttttccaggagaggaagaagcggggagagaccaacaatgacctgtttctggcagatgtgttttcctaccaggggaagttccatgaggccgccaaactgtacaagaggagtgggcacgagaacctcgcgcttgaaatgtacaccgacctctgcatgtttgagtatgccaaggtaacctaccctgtcccaggcccaagctccagcttggagcccactggtattctcacgtgcggtgtccaagttattttccccaagagtgctgcggacaaaaactagcaatggtctcagaaaggatgtggggaaactggtaaacaaaggacccatctacagccactggttgaaactcacctaaaactgacctttaaggctgacaccaagggggcagactatggcagttcagaccttcatcagtgacagggctggatggctgtgggtctacaccagcacaatcccttcattgagttgagggctcagggcttcagggctgtcccccacaaatcctctcaatccttgtcaggagccgccaagaatcggtgtcttcaggcaggagccggtcctgccgatcatgcaggacgacatggtgcctgccagccaagtttcccatagcacctgctgattgtcctggacttctcactgggcttctgggaagtcaggcagagcctccgccctcccatgttagcgcagcatgcctcacgcctgccggctgcagagtggctaccatgtggttgcagtgggtgatggcagagattcccttttgcattgggacggcccccatgaaccttactccccagcagagctgggccttttaaggcaggtgtaggagaggagcttcctggaccaggctcctgatggcttctgtgggaaggagttgcactaaggagcccagagcagtcaagacatttgcagttcagtctaagcaaggttcaaagaggcttcggtacactgggcaatgagggtcttccttccatcaaggggctttgttaacctgccttttctggaagtgtcaaaagtggctctcagtatgttatgaagtgactcatcagccataacctattggtgggctactaatggtagttctccagctcacaagttcaagatggaaaatcttccccacttttttctgcttttctattcctgaagatggctgtgctcttccaccacctgttcgaccctggggctgaaggtgtgtttggtggcctgtgatgttgcccaggacctattgttcatcaggacttggacgagctcctgggccccagcctgtcttttcaccttagtgatttcttcactccgtacctgagacccagggtgttcaggctccctctactttttcctcgtcacctttcctaccctccctcaggccccaccaaagacacctagaagatttcataacacattcatactgagatcaccagagtcagtgcatctctgcttccggggataacaaaattttaactcaggatgaacccttaagggatcaagaccctagaggtagaatttagggttgggaacccctgaggcctcctcaaggaggcagctgtgctgcagtagaaaatgcctgaccaggctgggcatggtggctcaaacctgtaatactagcactttgggaggctgaagtgggtggattgcttgagctcaggaggtcgagaccagcctgggcaatatggtgaaaccctctctctaccaaaaatgcaaaaaattagctggtgcctgtagtcccagctactgggaggctaaggtggaaagattgcttgagccccagaggtggaagttgcagtgagccaagatcacgccactgcattccagcctgggtgacagagcaagacccatgtcaaaaaaaaataataaaatgcctggccttggtgccccagagctggtgtgagtgcagtttctttctgtgggatgacctggggaaaggctcttcggtttgccaaacctcccttcccttctcagatggtaatagcgacagctcagtttagtcatgagatttgcacagaataatgtataggaaagcgcattagaaatgccaacctgtagaaagattaggaagatgagaggggccacacgtgaccacagagtggattttcatacctctctccctggctggccccactcctgcccctgctctgaggcccctccttacactgtggtggacttcgtgtgcccacagcctcccaccagaactgcagcccatttacacactccatttgctccgtctctctatgaaggtaaatactctgggacttgtttttggttttagtttttgatcactattccaaggaggttggttccttttcaatcccccctgcccccacctggtagtctgaatttgagaaatatgtacctacacattatgtggggggtgggggagatctagtcctgattaacgtggcatatttttgtttacttgaaaattgcttcccaagattcaatctggttttcagaaaattttaaaattacattcccacgtacaaataaattgtatgctttctggataagtgacatgtttatatggtgataaagggaattataatgctcttaactcttatgtagtatgttcttatcaaaatcaccaagcatgagaacactgtttagtctcattcatcactcagcacagcctctttctgtccacttcagggccaagtctttgccatggccccagataatgtgtaacttagcttcaggaaagcaaaaagcctttgaatttccagtttgctgagccttgaaggaagcttttagacccagcttcaatgaagtcacagctccctgagtgaccagctggcctaggcttatggctccctctcagcctctcacccttgccgtggtcacccctggtcccctgagcactcactgaagtccctttgaaggacatttctagtctcctaagatgcctgttttcctccagctgccaccctcatttcaccagccaggtaggcagggtttccagcttcgtgctggcatagagaatccgcgccatagcagctgccagaaggaaaggtgtgtctgtaaaggcccaaactaggcggggacagcggctgctttccaagccccttccctttgtcagctccagggagaaccaaaggccagccagggggcctgtcttctattgggtcccagcatcagggtatacaatgcgctttcctccccttcttaaaatgtatcatatattaggccgacctaatactctgaaagcacatttaccctgaaagcaaatgagggaaaaaagcgagctaattgttcaagtggatttttagcatacattgactgtacttttctgacacatgagtgttaatcatggggaaaggagtgctttttttgttctcagtgaggctgacacaaagtactctccacagggtacattattcctgagacaaaccacttcttaccagtaacatagacctgggctgtaagtgctcccagtttccctttttgaaaagctccacctttaaaagctgcctcaattctggcaaactcccacgtgtgtattttgggtaactactctgaaaagaggtggtgttctgaggctgtttctcacacattgtagggccagcccagagaagctgggcataccacttcagaggtatgctgaggccgaaggaacacaggccctaggcctgatctctgagcctccaggaccacagccatctcttccttctcaggtcctctcctgagcaccttccctgcctcagattcccccatggcctcctgctgtcccactgtcggatcaggttctcacccctgcagacctgacctcagcacaggatccctaaccattcagctgagaagcaactaaccagagagatgtttgcttgttatctgttccaggaaagtaactggggcaaagacaatgtgatgattctctagttcagggcacagaatgtttgctggtgactcagagagggcatggagggcacggagggccggcaaacactgtaagtcattttgtttgtgtaagtttaggggaacccatgctcagcctcactctgaagcatgtggtatcacccatatgatctgaataagatgacaggtctcgatatgtggaattgtgcaccaggttgtctcattgctgtttaggaacagtcctgtattgaccaaactatgtgagagagagacagcctgatcatgaacccccgaccctgcagacttcatgtgcagtgccccaaatagtctagaaagtgttgtttagccgatgaacaaatgcccatttgtgagacgggaaggaagcactgggggccagcgtccctgatgctgtcccaggatcccccaggaacacctgcagggcagcctgagatcactcttcccgagacctgggactcccccaactcagcccctcagggccgggccctgcctacctcctggttgcctgcttcagccatgtggagcccgcccttgctgctagaaaagcctgatgtaacgctggcacaggaagttctgatccagagtgtttttgtttgttgtgcttcctcaggatttccttggatctggagaccccaaagaaacaaagatgctaatcaccaaacaggctgactgggccagaaatatcaaggagcccaaagccgccgtggagatgtacatctcagcaggagagcacgtcaaggccatcgagatctgtggtgaccatggctgggttgacatgtaggttttggtccctgccccgagaagcatttggcagcatgtcatcacatgtcacctcttgactgacaagggaaccaatagtgcttttctaattatctaaagctaatgtgatagtggctaggttcttcaggagacacagagattgcacaaggcagtggctgccttccaggagcttgtggagtcactaggggaagggatggtggggaccagggaagaggagacaccgggacatcacagctgccatttgctgagcgctcactacaacccagacgctgtgataaccttccaggcattaggttttccacctatgccatcagggctggtgtctcctcgcccaccttgcagatgatgaaacagaagctaaagggacaagttattcccaaagtccagatagctggaaagttgtagagctgagctttagcctctgatctgctggatgtcgatgccaactacgcgtgtaatggtaggaacaaaaacaaaacaagttccaaatccatcagggaagaattcttatgggaggaaccatggatatcttctcttaggagacactctttccatgaagggaccttaaagaattccaagaggtaaatagagatggcgggaaaggatatgcaggcaggaagtacagcagaaacacagcgagttggctctggttggaataaaagacgtgtgggaatgggagggtgaaggacatgggctgtgggttgggggaagtgggctggccacactggaagggcctccgatgccaaacggaggtgcttagatttgccaatagtgagtgaccacctacagtcagacaccccctcaggcaggcaggtagaatggagaccagataactggctagtgcagtagagcaggagggaacttggtagctgagggcatgagagagaagtagcagtgttagaaccaagtggcccatcccagggtgttggggcagtggtgagtgtcaggctggctttgctctgtggctgctggtgggttacaccattcgtcaaggtggacaacagggagaggagggggttggggtggggcagcactgagacaggatggattcagccttgggactcagcacaccggaccttgagggggaaggctttgtcctcccagtcagtgagcttcaggctcaagcatgtgcacacacacgtgcacatgctgctgcggtaggcaaaggacacgatgggacaagctcctgagggtggctcaggctgggtcctaaaggctgttgattcttctggaaacaacgttgtggtctacaggtagcagtggcccagccaggatttggggatatggaagaggctggttaatgattaaattgtttccttgggtgctgccatatattaataattggtgtgtgggcccctcacaaagggaccttgatggatgtcctaccaccccatctttttcttgtccgatagtaatttttttaaagacagaggcacagattttgttccccacattattctttaaatgaaggggttcatatagaagagagccaggcagatttagggtgctctgttctctcttctggtttttcttgtcactttcatttgtaagtgctatagtatcaggttaccctgagggtacttgagtaattcaagaaacacattaagcatgttctgcttgctttccagatgtggctataaaaggtgtctttcctccagggacgttgggtgtgatgggtgggaaggtttctaaggctgtaagggctgtctatgccacctttccctaaaaacgtgtcctttttctgctgagcagtgttatttttagatgccattattattctaagtgtagactgacaggcctccgtgccttgcctgtctccagacagggattcgttacagctgcttctccttcctttctcaccaagactagcctgggtagaaccctttctcctgggagagttagtttgactccaaattccagcctgaccagagagaacaagcgcattctatccaggcctcatgtccccatgagtgatgggagggctgctcaccatggggaagcagtggtgagccagtgggtccctgcagctcctccctctttggtcagcacgttggccaggaggacagggaagacttcctgcaggcctttgtccagagctcagagcaggccccacactcacctcttcctttagagggcagtcattgaggtattcttatgccttggcatccacttttccgtgagaattcctgcacccgtggtggaaagagtgctgggcccagtcttgggctgggtgcttcaccttccccacagactttattcttctcatctgagagatggaaataatcatgcccacctcttagggtggtgaagattctgatttcacgcatgggaaagctcatggcgtcatctgggtacctggtaggggattaggagataattgtttctataccctgctggatagctcagtgacttccgagaaagacacacaaggtggctgacaggatcctgtaaaggccacctctcccagatcctggtgatgtttctggagtgtgtattcatgcatttaataactacccactgagcaactcccatgggccatggcatagtatcaacactggggaccacagaatgaatggacatacggcttgccgttgacaagacccagagcccaccctcctacctgccccttccctctccaggttgatcgacatcgcccgcaaactggacaaggctgagcgcgagcccctgctgctgtgcgctacctacctcaagaagctggacagccctggctatgctgctgagacctacctgaagatgggtgacctcaagtccctggtgcagctgcacgtggagacccagcgctgggatgaggtgaggggaaagcaggcctcatgggctggggccccacctgagccctgggacacaggcgggtgggtacaggggccctttggggttcagatggagagaagctgccctcgtgatggaaggaacattgggctggcagtcaggtaacttaacctcgaattctctgagccacagaatcgtggagggcctttccacttgtcccttcattcagtcattgagaaaatcgttactgacagccagctctgccagggtggtgacaggcaccggggatgttagtgtgaacacgacagctccagtgcctgctgttgggctgagctgcctctgaccagcaccacaggctcagacacatggctgatgtggagatgcacctgcgtgacatttaaaacctgctgggtagcattttggcagaaagcaccatctgtgctttccagatccagactgtgagagccatttcaggggccagttttttccctcccttctctgcccccaccccacaaccactacttctctctggtgtcaggggctgtaaagaattagccaggtcagcgagaaaggtggccagcctcaggctggcagaagcagctgatgctgccccttctatggctcaacccccaccctccagctcactggctccctgttccctgcagagaaatccatccccgagaggattaggagctgtgccaagatcctcccccgactcacccacccacccatcatggtccattttagagtgaaagcaaagccttcactgagaggagccgtctgactgttgtctgctctctgaacagctccattggtgaggtgatgaggtcagtcatgagaaaaggtggggctagggacagaggcaatggtggcttctcaagagaaatttattagatttcccaagcagcatagattagagcatcttagaatgactcagacctcgctgtgcatcaggcagactttctcaccatggctcatgtccggttctcctggcctgacaggtggttctggggcttaggtgagaagcagtcagtgggtccatacagcacgaagcccacagtcatctttgacaactgataagaagtggtgatgatgataatgtcaattctgtttccttaggtgtcgcccgcaattaaaagaaatctgtttgcagcactacaggagcccacgcaaaccctcaaaataaaatgtttccgattctgtgccgcttctgtggtccagaaacagactgtgttgttactgaatccagtcgcttgcatattgctgttaattgccttttgttttcgaagagctgatttgtttttgcatttctgtgggtagttttttgggggaggcactctccccctctgagttgtcaggctggcaaaatatgatgtccctaatggattcagccaagtacagtgttttcatgggggctgcaggggcagctttattaagacttcatttgctccttcccccaggcctttgctttgggtgagaagcatcctgagtttaaggatgacatctacatgccgtatgctcagtggctagcagagaacgatcgctttgaggaagcccagaaaggtaggcaacacagactgtcaccttctagaaggagcaggagaagttactgccaagacatacatttcaggaaggctaccaagcccttcccatctgtagatcccaagatagatgacttcatcctggggatgtgattgtttggtggtgaaagactgtggagcatggaaagaccattggccttggagtcacaccctcctgggccacactcacttgccacaggcccttaagaggtgctgcctcctctccaagcctctgtggttactgagcaaagtgctgtgcactgcagtgtatcttcccgtttaatcctcgcaacagccctatggtatagctaccatcattatgattcccattttgcagatgagaaaactgaagggtaaagaggtgaagaaatttgcctgaagtttcatagctaggaagtggcagggaggtaatgtgagccagggtaccatgaggacaataagggaggattgccacacagtgtgaggcatggtctctactgagaatagaaactcagcttctatttctggctcagataaacgggtgacttctgctcctcaagaattctgttggtaaaatgggctgcacacagcgtacaacagcatctgaaataggagttaaagcaagtatagaactttcgctgatgttattaatcatattttttaaagttgacttccctctctgtgtcaggccctggctgagcacttaacctatgtaaccttgaatcttgccaacagctgtgcaaggacgaagaggctaaatgtgccatgccaagtcacaaatctagtcagcagcagagccagaattggaccagtacctctctgactggggaacctgatttttctgttttgctgcctatttagccttctaatggaagttgggtgtttgatgttccatagcatctgatttacgcttctatatggtaaccgttgccctctctggacacattgcagaacaaatgtctccctgttggagcccctcaaccgaaagccctcattgaaggttagcgcattctctgctgcttcagcatttccagagcacccagttgctgaagtatctgcatgtttgggcaaaacacatcaacctatccatctgtctgtgtctgcccttccaagaatccatcaccatagtaacttggtactcagacaagaggttgtagatgagaacggaacaaaggccagaccttctccttctctgaaggcggaggattaggatcatttgagtgctctcatatggcaagtgtcatggctacaagtgcttcactggcagccaccaacatctcaaggggctggccacgtagtaggtactcagaaaatatctgttaaacagtataggaacgattgagagtttttttgcttgttttcacaaatggttgtgataactgaggcagatccttcaaagtggtcattgaaaagcagtcatttgaagacaaactgaggacttgagttgggcttggttctgggaccttgggtgtgacactttacctccattttgcaaagcccatttcattgctcataaaaagggggataattttccttcttcataagtctgtggtgaggatccagtgaggtgattagcaacaaaagcattttacctccaagtgcagtaaagtggcaggtcctgtttctatcaccttaggagtcacaaaactttgccctggaatgagcagggggcagaacctcactgaagatgagcaagtttcactcttagactttgccctggaatttggcccctccagtttttcctttctgcatgcttttcaaagtcagtcgccttttcccagccaaaaaggaatttatctcactgtactttttccaggatgtagccttggttatttagagaagcgccatcccagcaacgaagcactgcagatgctccaatgagtgtcctacttccaaagcagccctgtgcaagccccacagagctccatcctgcctcctgtgtgacttcctaaatagcatgtgcttttttcctccctccaccactcctacagcgttccacaaggctgggcgacagagagaagcggtccaggtgctggagcagctcacaaacaatgccgtggcggagagcaggtttaatgatgctgcctattattactggatgctgtccatgcagtgcctcgatatagctcaaggtgtgtaaacatcagccagaccactgttttcccaagccccactctgacaccaagataaacatcagaagagctgggacattttaattaaagccctgggcttgtttattgggtgtattgtccataagcctgccttgcagtggcgtaatctggtgtatcatctttttccagtttgcccatcagaatggtatgaggaccgtcctggggttatggttggcaggtccagccctgcattgctaattcagagcatatctctcccctgctacctgggagcccatagctggacctgggtgagcactgggttttaaatttttttaattaaatgagaagatgaacgagagatggctttacagtaacacactccagattcttactcatcccagccaggaaaacagtttcaatattgctttctttcacaagacttcccatgatgtactgaaggagtagtggaagtggaagagacaaggagatgttcttctccactggacaaggccacatgcaggggtgggaaaaacactggcatggaagctgcaggtgacttgtagcaagtcacaatccttcctgagctctgcatgcccatctgtcctgtgggagtcccttgtcctggtccctttggttgctgggagcctcacagagtcatgcttacagtttgaaaattgtcaagcctaggtgtaaggtcgcatttttctgtttgggccagtgccttatgcttctgataggagcagcagagggaagaggcataagatgagcatgaatacagttggtgtctgcctgcctttgtcccagcaggctcttccgacacatcttgggtcttgctgcagctgtcgctcccccaggggaataatctgggagggtgcagtgagagatctggaaaaaatatcctcaaactccctggccttatgccctgtccacctaagaattcaccatcctggagtggccctactcctaagcagagtggctttcccctcactacactttgtccctcaccctggcacagacactgtgtggtgggagaactgatgctgggaaaagtactgttgcctggcccctcctcctggggccagttggcagccacagacactgtttgacacgtttcccctcccacccgctgcacacagcagatcctgcccagaaggacacaatgcttggcaagttctaccacttccagcgtttggcagagctgtaccatggttaccatgccatccatcgccacacggtaaggtggctgggtcaccagcacctgagggtaccatctcctgagctaggggtcccgggcatatctaaagagcagcagactggatggaatgtaacccactggtcacagtgaactgctgaggaatcttggtctcctctgggaagaaaaagtttgagtttctttgattgactgtttgtctgccatgcatcaagcagtgggctcctgaattgtgatccagagctggaatgggccttgctagttcctcagtgcaggctttgatgactcagggaaactctgcattaaccagcaagaggggtgggagttccatgaggccctctccttcagtagggcgaaggcccagattaaccaaaggctcgagatccctccctggccctgtcagtgatttgtgtgttcttcagcaattcactttccctctctgtccctcagtttccttctctgtgaaactagagtgttggcttggtctccagaaacccaagtagttctttttagtcactccctgattcctttgagaaagccattttaaatctctctggtggcaatggggaacaggtgatgggttgtcaacagcctcttcatccactgtatctcctcaatcacccaacagatgttgagcacttagtacctagtaggcaatgtactgagggcttcattgtatcaagtcatttcctcctttcaaccacactttgagggaaggactgtcacccccatgttacagatgagaatgaagccctagacagagaggtctcagaggttattaggttggtgcaaaagtaattgcggtttcagactgaattttaaatcattataactaggctcaaacacatctttattaattaaaataggaaccattatgatcaacacatttttgccaatgagaaataagtctgtttatttctgtagcataaaaatccatactttgggatttgacgaactcttggaaagcattttctgcatcctgctggttgtggaagcattttccctgcaaaaagttgttgagatggttgaagaagtggtagttggttagcaagaggtcaggtgaatattgcgatgaggcaaaattttgaagtattggttgtgtgatgtgcagtcaggtgggtggagaagaattgggccctttctgtgaaccagtgccagctgcaggtgttgcagttttcggtgcatctcctcgatttgctgagcatacttctcaaatgtaatcatttcaccaggatcagacaactgtagtggatcagaccagcagcagaccaccaaacagtgatcatgacctttttttggtgcaagtttggctttgggaactgctttggagctttttctcagtccagccgtggagctggtcatcacggttgtcatgtaaagtccactttttgtcacacctcacatctgattgagaaatgttttgttgttgttgcatagaataagaaaagacaacacttcaaaacgactatattttcattttctatcagctcatgaggcacccacttatcaagctttttcaccttcccaatttgcttcaaatgccaaacaaccgtagaatggttgacattgagttcttcggcaacttctcctgtagttgtgagaggatcagcttcgatgattgctctcggttgttgtcaacttccagtggccggccactatgctcctcatcttcaagcctctcatctcctttgcaaaacttcttgaaccaccactgcactgtatgtttgttagcagttcctgggccaaatgcgttgtcgatgttacgagttgtctctgttgctttatgacccattttgaactcaaataagaaaactgcttgaatttgttttttgtctaacatcatttgcatagtctaaaataaacagtaagtaataactcattagcaaaaaaacataaagcgagaaatgcccgttgaaatgatgtataacataaccacatttaagaatgtattctactatcaaacagcaaattccagagccaatatgtgagtctcagtagtctggcactggagcctgtgttcctagcctttccctccctgtctccttttagagaaagcaggctagtatgttggtttagtgggtaaactcgagagtcctcacacacaaatgacactgtgttacttatcttctctggccttcagcttctttctctataaaatagggataacagcactatgtacttgatgggattgttttgaggattagacgagttaatattggaagagtacctagcacagagtgaccctaggtggcagctatccttactgctgctccaggcaaggcttcacgccagctttccctgacctgctccctccagctgggcatctagcatttctcttttttcagagatgaggtctctgtcgcccaaggtggagtgcagtgtcatgatcatagctcatggcagcctcaaactgctggactcaagtgatcctcctgcctgagcctcccagagcactgggattacaggcatgagccaccacgcccagccttcccgccgttctttgacctctcaaatgccctgccttccaccttgggcatttctttccctctaatctgtgctgacttctcagcacattttttgcctcttgggaaagtctggcaagaaggactcctgacaggctctgtgcatgccgtcagtctagtgttacatctcttcccacagcagggtcagtggtctcaagggacctcatcttcccttacagtctttggctttcctgaaacgagaccccctcagggtccctcatctttatcaggtgctcacctggagagaaaccaccacaaaaggagcccagactcaacttaggctggaagtcagggcccagctcagcctcactttgcccaagccactccagagcctggctctcagctccttccctcagacttttctctcgctgctccctgtcctcttcctcacctggggcatggggctgagggctcctgtctctaacagctgagctctgctccaggacctacatgggactaggagctaaggggcctcagaccagctggggccctggctcttatcccagctgaatcttattaattgggccattccttcattcaataaatgcctactacgtgacagaccctgtgatgagacctggtgacacggtggtgaacaaaacgttgtccctgcagtcagtcccagtctagcaaacaggacaatccctcaggggaaacgtttagaggcctgtgaagagacttcctggaggaggtgtcctctcagccagaaggagggagagaataaaaatggggcaagtgaagtggaggaggattaggaagggtgtttgtggcaaaggtcacagcctgtgcaaaggcctggaggtgagtggtagtttgtggttcagcatccagggcccagcagagcagcactgattcagggcaagactggaaagggaagttcaggtccttcctggatacatggcatctttcccagaggaaaggactcccctgctacctattctctctgggacgttacttagcttccctacctagtgcagtagaaccacaggcagagttcatcttgttcttaccctggaaaggatgtggtctcaggttttcttgggttcttggagctaacaaaaggtatagaaatttacgtgtgaactaaatagaaaatgctaagctctgaactgaagaagtgtagagcaaagtgagtcctcaggagttcagaccaattaggggttaagctttggtggctcagtgatgagtagggcctcacaagacccttcttaagtgctcacaagaaagaggagttactggcctgctgtaatcctcaccatctaaagctttattagaaatgggcaatctcagtttatatacagtgtgccagatgccttcaaaataaggtattcttaaccttttgtagaccctcacacagaaaattccttatttgtctgctgagcttctggcagcctctaggtacgaagaccaatcactaatctgtgctaactgcctcctgttagtgcctatgccaggagccagggaaatgggtcagcagttgaggaactccgcatgtgtgctcgtttggtggcacatcagtcaagctgctgttggaaagcacagaagaggcatgtgggttcatgctggagagggctaaatgcctctgttgaaagacaggcttatatgaatcagtggttatgtcctaagctgcatagaaggtcttctcttttagagctaattggagacaacttgagtagttcagagaaatggaataattaccaactccagaggcagtacagcttggaagaaagacattcttgggctttggaatcagacctgggtttgaacagcagctcagctctgttctagttggtgacttgggcaaatcatctatctaggtgtcggtttcctcatcagtactgtgaggataaaaatgcataccacaaggttattatgttaaagaccagatgagacagtggctatatggcgctcagcacacagtaggagtaggtgctcaataatcagagccgctcttgttgatgtcactcagaattattggtgtctgccttttggcctggcccagcagcagctcttgaagaactcaatccctgtttgcttttctctcactgcaggaagatccgttcagtgtccatcgtcctgaaactcttttcaacatctccaggttcctgctgcacagcctgcccaaggacaccccctcgggcatctctaaagtgtatcctttctcttatccctcctccgtcccaccaccgttcttgtctaatggccccaagaaattccttccagagcactttcctggcagaaccttcctctctcagcaaccctcagggaagacagagaactcaccctcccgctgctgtttggctatagaggctcagcagggaggcccaggggcccaggccaagagaagatgagttttcagggctctctgagctgaacccagcagtgggtctctggccaacacactgtcccaatccctcctagaacccacagatgagggtgtgactgaaatggaagaagcaccaggccttcaggcttggaaccttgggcacttctccagactggggaggagggagtgtttgttcagcccaggtatacatagcaccttctgtgccccaagccctgggccaggcaccaggtggcaaagctgccatcaaagagggaggtcacaagttagggtctggtttggtggatgtgtgctgtgtctgagggtggaatgaagctgaggtcagggccatggtcagggaagtttacctggaggaggagatgtccatcatgcaagctgaggcagccagggaagatggccaagtggatgttccaggggaggacccagcatatggagaggcaagcaaggcatgtgggagagggtgaggggaccctgggtgggaggggccggagaggcagcaggacccaaggcctgagagcctacctttgggttttcctctcttctgtagccatcgagggccacagtggtaccataagcagagcaggtgcctgaagggcctgtgcagccagatactggatcattaccaggcaatgatccagatttttaaggtcttggatgtcaggagacataattgtccctgttcttttctaaatctcactgtactctcagctccttcccagccgcagccccaccttccctctgtaaggaaaacccactccactggagaagacccagagctccttgttgtaagaattggcctcgctagaggattccaggcccattatgtacatttcaggggaaataccctcaaatcaaggggtgccttcctggagtcagacctctgctgcatgcgtctccgtctttccccgtaggagcagtcagggctatgcctgtgggggctgagcacctgtactcatcctttccagcaagttctgtttgagtcaacagcttgatagaacctctaccctgagccttaccctgtgccatcccctggggacctggaaatggctcctgacagtccctgactttgaggagtcatgctggagacacagaaggaaactctccacagaactgctgaagtggacggggctgcactgcagacggcgggagcaggaacactgggagagatgcgggaggaagggcaggagggcctgggggcagccaacatcggaggtgacctgagaggagagcacaaaggctcgtcagcctctggctgaggagcttcaagggggccccagagcacaggctgccgctcagaaactgcccaccaggccctcggggaagggtgtgcagacagagtggggtacacccaggggcctcagagcagggttgagggtggctccccagggagtctggaccaggccccacctggcagggtgagagcagagtgccctttgtgccaggcatcctaggagggcctggctggcaggtttggtgaggcaggaagagccattttggcctagtcagggtataagatgagccatcagcaggcccagagatgctaagcaaggttaaagtattaatggaaactacgctgtttttatctttggaaaaattcctgggccttgccatccgagaagtacactcacctctcacaagcgcacagagccttcctcacggtctttcctctgccttcccggcaccagcacaagctgtgttccagcctggggctcactccaaggacaggcagtgccagctcctgggcctggtgttgcccctgctgtccttaaccctgttcacggcaggaaaatactcttcaccttggccaagcagagcaaggccctcggtgcctacaggctggcccggcacgcctatgacaagctgcgtggcctgtacatccctgccagattccaaaagtccattgagctgggtaccctgaccatccgcgccaagcccttccacgacagtgaggtgaggatgcagcacccttgggcaggtggcttctcctctcccttgaggccatctcatgccttcttgcctggcctgggttccgtttgaagagagacagctgcagctccctctaggctctgtgccccctgctcaagcctggccatgccagctcccctgtgcttccctgtccacctcctgttctccccgcagtccacctggcgcccgctcacagcccccggccccggcctcagccctcagcctggcctcccttgctccttgccctcccctaggcaagccccacacctctgtgcccaggtggctctgcctttaccccaggcctggccccagagctgactcttactctagaaacctctgccctttctggaaccaggctgtagttctccagcaaatctaccccacactcccaacccacattccttcaacccagccagcttccttctttcacacatcctccctcaagctcagagcaaggacttggttcagacagacctgggttcacatcccggctccaccctctcctagctctgtctccatctttctgcaccttgggttccccctttcccacaggtagttgtgaggctaaatgagccagtatagtccacgtgctccgcacggtgcccggagcatggtaaatggctggctaatggtggcagcggccactgtcattcctgccaggggaaaagtgccgttgagcgctgcctgtgcaggtgtcttgggcacggggacccaagtgacagggcttgggtatttcggcaggcctttatcctgcttccccatggcatggagctcctgggcccggcgccccttccctgcctgcccacccgggtggcctttcctcttggcagccaggccccaggggcctgaagccagagtccagggggaggaggacacgtgcctgccccggcccctcgggagtccgtggctgttttgtaggagttggtgcccttgtgctaccgctgctccaccaacaacccgctgctcaacaacctgggcaacgtctgcatcaactgccgccagcccttcatcttctccgcctcttcctacggtgagtccctgcatcctgagcatgtgggtgggacagcctgtggacagccaggctcactccactgctctctggcctcaggacgttgggcaagggccaaaggcctctgaatgtccctgtttatgaaatgaggacactctgacgcccacctacctgacacaaggagtcactgtcggtgttcccagagataggacccactgctgcccaaagctgaagcacccactctgggaacctggcgcagggctttacataaccaaatgccccagaaagagagtccgatggctttgcattcagaccaggaggctgagataggttatcaaggcccagctcctttgatgttgacagaggatcagaagccccttcccaggagctgagcagaggccacacacacacacagacacacacgcacacacagactgcccctgcacacacacacatacagaaactgcccctgcacacacacacacagactgtccctgaacacacacacagactgctcctgcacacacacacacagactgcccctgcacacacagagactgcccctgcacacacacacagagaccgcccctgcacacacacacacagaaaccgcccctgcacacacacggagactgcctctgcacacacacacagactgcccctgcgtgcacacacagactgcccctacacacacacagattgctcctgcacacacacacacacacacacagagactgcccctgcacacacacagagactgcccctgcacacacacacagagactgcccctgcacacacacacagagactgctcctgcacacacatacagagactgcccctgcacacacacacagactgcccctgcccacacacacagagaccgcccctgcacacacacatggagactgcccctgcacacacacatggagactgcccctgcgtgcacacacagagactgcccctgcacacacacagattgctcctgcacacacacacacacagagagactgcccctgcacacacacagagactgcccctgcacacacacacacacacggagactgcccctacacacacacacagaaactgcccctgcacacacacagattgctcctgcacacacacacacacacacacacacacacacagagagactgcccctgcacacacacacacagactgcccctgcacacagacacacagagaccgctcctgcacacacacagagactgcccctgcacacacacacagagactgcccctgcacacacacacacacagaggctgcccctgcacacacacagaccgctcctgcacacagacacacagagaccgctcctgcacacacacggagactgcccctgcacacacacagagactgcccctacacacacacacacagactgcccctgcacacacacacacacagaaactgcccctgcacacacacagattgctcctgcacacacacacacacacacacagactgcccctgcacacacacacagagactgcccctgcacacagacacacagagaccgctcctgcacacacacatggagactgcccctgcacacacacggagactgcctctgcacacacacagagactgcccctacacacacacacagactgcccctgcacacacacacacacagaaactgcccctgcacacacacacattgctcctgcacacacacacacacacacacacacacacacacagagactgctcctgcacacacatacagagactgcccctgctgcctcttcttgcttttggtgaagctgccagtgggttgagaagcaactctgtggtcaccccacctgcctggcggcaagtcctttgcaaggcctccagccccctcagccctttctctatgccctccagacgtgctacacctggttgagttctacctggaggaagggatcactgatgaagaagccatctccctcatcgacctggaggtgctgagacccaagcgggatgacagacagctagagattgcaaacaacagtatccatgcccttggccagagcctgtgtgtgcggctgtgtgaggggtctggggacaggcgggaagtaggagggcccagtcccaggggatcgcgggccatgctgagcctggccctgtgttcccagagagattggagaggcccacatgggacagggacagggatcagagatgggcagacagctggccagggcctaaggacccagaagtggcaagtggcaccttggtcttcccgtgtgggtctcccaccctcccctgacccctaaaaggcactggctgtgcctctgtctgtgcatagctcctgcatagccaacatgggacatgatgtcatgatgtcggtgttggcccccagctcttccactcaagtcactttcgcatgcaagtgacagagtccaaaactgacaagctgaacaagcaaagggtgtgcaaggaagccccaagcaggagaggaagcttcctggcccagcgctcagtctggtcggtcacaggctggctctgcctctcttggccgcactgtcctctgggcaacttcattctttggcagccccgtggtgcccccataacacagagatgtcaggagcagtgccagccccacatcccctcagccttatagcccccagaaacagccagctttcctctcagctgtggcagtgaaagccccggggcacagctcagcctgccccttggccaggaggatgcaccagggcagttgtccagggcaggccacacttgcaggctggacatgggaggggcttctggcagggaacagcacacacgtggcctgaggcctcgctcccttgcactgactgagtctgcaggcctgggggctgtaagcctgccttccttgcagctcccaggtgctgccacccccaggggccacactgggaggagggaagctcagagagctgcttgctgaaggaaagacggacccatctctgccacccaggctccctcaggtgccacagatgatatgtgctatggtgctggcaggtgggtgctgtgcccactccaacttggtaccagcagtccccatgtcctgggcctccctgcaggacccctgctggcctctgttaccagccccaccactgtgggagaggggcggtttccagggacctccaggtgagtctgacccgccctggggtcagcagggactctcgcccctgtctgctccatcacaagtgcccgcagacccccagcagccactgaatgtttctccaggatccctgggcccatcccctccgtgcctacccgcagtggctcacagggcccgcatgtgcttcccactggccctgggagctatggtgtgtgtggcctgcgaggggaatgggtgagggcagcagggccagcagagtcccttccttctgattccttggcctgagccccctctgttcctccacctggaaaactcttccactggtctggctgcccttgagtcttctcacaggggtgtagggtggaggctagggtctgtctccatctctgcttctgattccatccttgaccagatccctccaggctcccagattctgcggctagtggagaccaaggactccatcggagatgaggacccgttcacagctaagctgagctttgaggtgagggtgcctctctgggtgacctgcaggagggcagcctccatcccttctcctgtgcacatggggaccctcagctagcgcagtggtggaggaggattggccagaacttccagatgtggtggcacgaaggaggggcaggaccccttcctgtggggtgtgggagccatggctgcccccgagggaccatggccaagggcgcaggtctgtggacagggaggcagcttcagctctggtgggaggagcttgccactgttagggtcacctgggtttaggaagcaggtcctctctcaccactgccaaagattccaggatcataatccacacagatgtctcactgtggctgagtgaggacactgtgcctccttcccgcccaccctgcagcaaggtggctcagagttcgtgccagtggtggtgagccggctggtgctgcgctccatgagccgccgggatgtcctcatcaagcgatggcccccacccctgaggtggcaatacttccgctcactgctgcctgacgcctccattaccatgtgcccctcctgcttccaggtaggtggccaccctggtagctcacatgtgcttctcttggccacttttcccttgcccaaatgtccctctgggaggcgtggcccctgggaggaggggcacatccatggctccaagttgggacagaggcttgtctgtcctctcccctgcttgcattccatgtgcatctaaagtggacttcactggcccctgcgctgtccacatcctccccaaatcctgggggcccagcaagcgtgatgtgcccttgaccttcactcagaaaacaagaaaccccacagccccctcccatctccccttccagccctcaaacaaaggtgctgcaggtctgtgtccagccctgaccactgccaagccccctccccttgagaggcagtgcgtcctggccccaggcgtagggctgatgagcactagggcttcagcctggtcttacagctgtcttcccttagatgttccattctgaggactatgagttgctggtgcttcagcatggctgctgcccctactgccgcaggtgcaaggatgaccctggcccatgaccagcatcctggggacggcctgcaccctctgcccgccttggggtctgctgggctgtgaaggagaataaagagttaaactgtc

SEQ ID NO: 15634 - DNA, 30047 bp, Homo sapiens
tataaatgacatcgcatttaagcctgatggaactcaactgattttggctgccggaagcagattactggtaggattttgtcttagtttcctcttaaagtgcttccctaacctccctcttgtgagtactctgaaatttgaccctttttttttttttttgagattaaaaaggcaagggtggaaaaaccttccctattactttttaatagggatggaaatgggctatttaaaacgggcaagtaaactatcagataagaacctgtgaacaataccacctttggggtcattcatctttccctttttactttgagacacccatgaaagagttgaaaacaatcacaatgcctttgaaactggactggtgtcagtttacattttgtcccccagaaaaattcaagcaacaggactgacggtgctgtgtccatgaaaagtcagatagcctgaccccaacttttaggcattggcctatctaaacagttccatatggatgttgtcctatttttcatattttcaaataacataagctccctctggaacctatccaggtatataaaagtaattttcagagaaccccttatgtttgaccaaaaaacctttgtatgatctctctttctgtctaagtctacttcctcttctctgttgtctctagatacgcagactgattaatctccattctttgtatggttaactacataatcttaaaacatggttaaattgttctgcagacttctctccagtgtaaacaatccaaactctattagtttttctacataggttatcttttccaatactctaaccatttcagaaagtttccgcttgatttctcagatggtgtgtgtgtgtgtgttttttttttttttttttttttttggagacagagtctggctctgtcgcccaggctggagtgcagtgacgcgatctcggcttactgcaagctccacctcccgggttcacaccattctcctgcctcagcctcctgagtagctgggactacaggcgcctgccgctacgctcagctaattttttgtatttttagtagagacggggtttctccgtgttagccaggatggtctcgatctcctgacctcgtaatccacccacctcggcctcccaaagtgctgggattacagaggtgagccaccgcgcccggccagatggtgtgtttttaaactctccacatagtgatagatgtcacatggctatcaaatacctaaatccatattacagctgggttttattttatttcttagagacagggttgtgctctgttgcccaagctggtgtgcagtagtgcagtcatagatcactgcagcctcaaactcctgggcttaagggatcttcccacctcagcctcccgagtagctaggactgtggacacacaccacctcgtccacctaatttttatttttttttatttttatttatttttattttttgtagagatggggtttcacttagttgcccaagctggtcttgaactcctggtttcaagcaatcctcccacttcagcctcccagagtgttgggatgacaggagtgagctaccatgcctggcctacagttgggttttataacattccctcctacttgaaagcccagagttctgtgactttcaaattcttggtagcaaatatgaaacatctattatgttgatttagtgcagagctggcattaaaatttaatcatgttgtagctggctctttttatgggctagttttatttaggagggcctgccttgatcaatcatatatccaaattcaggtaaggatgagtataaagaatttccatggagtgagtaattgaacctttggttctcaaggattggtagtatattcctggtcacatagtacatagacctgggtcctctacttcttggttacccaactttaagtcacgttgtttttggttttgcagtgcagtttttattggctacagatttagaatattgacacgtattgttataaaaacaaaaatagcagtagcaaccctgcaggaattctgactaatagatatcacatagataatctgtatttgtctcttttgccaggtttatgacacctctgatggcaccttacttcagcccctcaagggacacaaagacactgtgtactgtgtggcatatgcgaaggatggtaaaaggctgctctgggtttccattctctataatagcctcatcattgttcatttttctctttagtcactttttaattatttctagtaagctggagtacaagttgcaagttcagaagacagtgaagttgctaagacttcagtttggtcattcaatctagcaagtatttattgaggtcatctatgttccaggcactgttcaaggtgcttgagttacttcagagaaaaaaacggtggtccctccccttatggggcttctgttttatggggtggtggtgagaagtgagggaggaagaaagtatgagggaagacatacagtaaacatagtaaaaaggtaaattaagtagtatgctggaaggtgataactgttatggaagaagaaaaagtagagcagaatgagggggattgagagtgctgggcagggcagggggttgggtacagtattgaattagactagtgagggtgggctcattgagatgaggacaggtgaggaaaaagactttgaagtcaggaggcaatgagattgtgccagtgggcatcggggggaagagagctctttgcagaggaagagccattgcagaggccctcaggtgtgggtgtggctgctaggagctggatcaaagagaatcgggaattgtagaggatgaggataaagtggtaacagacatggggtggtcagatcataaagattttgattctcagtcaaaatggaactactgaaaggtcctcagcagaggagggatctgatttgatttgtattttaaaaggatccctctagttgctgagttggaaacaacctgcaagaggtgagggttaggacatctgtgtgaggaagcatcatccagacagggggtgatggtggctcagacctctgtgggggcagaggaggtgatgagaaattatcagactctggatataatgggagggtggagccaactggattgtctgacagattggatatgggctatgaagaaaaaggagtcaagtttttgacctgaggactgaaaggttggagttgccccccccactgagatggaaaagactgcaggtagagaaaagttatggttgaagatcagaaattcagttttatacatgctgaatttgagaaaagttgatgatgtcggagaggggagagaactgctggaacagagttgttgagtaggcaagaggagatgggatctagggcatagacggggtatttgctttagataggggcacagtaggaactgcagaggccagcagatggggacaatgtggtagtaggaatctaatggaaattctcaattccattttttttttcttcagtgaaataggaagcaacagcaactgagagtggcaatggggaagggaggtttcagagagttgaagagaaagggaaaaagtgtaaagtcactgcctcagagaatgggacagcgagtggacccaggaggtgtagtgagatccccggtgacatgaagggccctcttgaagattgtgatcatgaattgaaagtgagattagttggtgtgattgtgtctttttctccagcgattttgagctgcatagttgtagaggcagaagaggtgaatttaaccagaggtggttttgcaagcacatttgaagatgaagtaggagggcaagggagcagaaagtgtatacagataaataattatgtacattaaccttgaattgttggctgaataatgaagggagagaggacagcaatggagaagtagtaggttctggtggtgttgaaggattgttacagttggggtaccaggtgggttgggaaggaagggaagtggtgcatgaaactgagatttaaatttattttaaaataaatccatgttgtcccacagcataggattagtgggaagaaatgggctttggaatgagacagttgtgagttccaaccccaacccaacaccagagttctgtgagtctgagctggttattgagtctgagtcacgatttcttcatgtatcaaatggataacattgagataacattctgtagccactgccaagaagtcacaaaattgtaatgttataattcttgaatgaaccttggagattattccagtcccaggtttttaacttcttttggctgatgggcctctttgataatcagatggaagctttagaccactttctagaaagatgcaaattcttcatgtgtatgcagaatttcatgcatataattttagtctgattagtccagtctcttcactttagtcctgcataaagacataaacaattggccaggcacggtggctcatgcctataatcctactgaaatcctaaagctctgggagcctgagttgggaagattgcttaaggcaggagtttgagaccagcctgggcaacatagtgagactccctaaaatctggcctgggtgacagagctagactctgtctcttaaaaaaaaaaaaaaaagacaagtcatgtgacttgccaaggccatgcagcagattggcccaaagacaaaactaatttcttgcttcatagtcaggtgtgctgtaccatggtagtcatatttgtgtgtgtgtgtgtgtgtgtgtgtgtgtgtgtgtgtgtgtgtgcatgtttgagttcaagttcagaataatgttttagggagacctgtgaggagggagcctggagagctgaactgtttctgtctcatcctagtggctgttgaggaatgtgggtcagtccagggcccagtataaggcccagtaggtacagaagagctattgggcctctggtgcctctggtgtttataagcatagcagggctctttgacctgcaacaccattagggcacttgaggatgtcagagtgtgacccatcagtagtggcatttgcacagcactttgcagagtcctgtcacacacatctcacttgatgcttccaacaactctctgaagcaggcagcaaggggactcttatctccgctcaaagatgagaaaacagacttggagcaattacaggtgatggtggcagaggcaggcctaacccaggttctctgactgcagagtctttgttctttctagtgtatcatgctgcctcttcatgacacctgtataatgattaagaagtcttttagtcctcagaattggttttttcctcttagacctgaagattgagatacactgaattccagctttgctctttaagtctgcttgtttctgatttctcctttaagttcattaagttttttttgtttttttttttgagatgaagtctcgctctgtcgcccaggctggagtgcagtggcgcgatctcggctcatggcaacctctgactccctggttcaagtgattctcctgcctcagcctcctgagtagctgggactacaggcacgcgccaccatgcctagctaatttttgtattttcagtagagacagggtttcaccatgttggtcggcctgatctcaaactcctgacctcgtgatccgcccacctcggcctcccaaagtgctgggattacaggcgtgaaccaccatgcctggcccaagtttaataagtatttaatgagcaaccatgatataaaagtatgtaagacatagtttttttgttcaagaaaaacaatataatatgaagaaataatagaaatagctaatttttttttaattctattccaggcccagttctaagcaacataagggttaggggtgccactgcctgtgcaataaaaaatctgcatgtaatttctgaaccccccaaaactttactattaatagcctactgttgaccagaagccttacctgttacataaacagttaacacatttttaatattatatgtattatatattgtattcttaaaataagctagataaaatgttaattgagaaaaaagaaaaatatatttactcttcattaaatggaagtggatcatcataaaggtcttcatcttcattgtcttcaggttgaataggctgaggaggaggaggaggaggaggaggaggaagagggattggtgatgctgtgccagggagacagaggcaaaagaaaattcacatgtaaaagtggactcatgtagttaaaactcatgttgttcaggggtcaactgtatgtacacatgtacatacactcatttaatcttcacaccaaccatgaggtaaatactaacattgtatccatttttcaaataaggaaatgaaagctcttcagtagcttgtttgggtcatgcagctggtcagtgagatctctaggaattctgacccagagactctgagcccaaagcttatgcttttcatcaccatcacctgctacctaccaggatgagggaggagtgatggaaatagtaagagcagtttctttgtttatttagtatttgcagcaatatcatatggctcaccctaatatctactatttcagctactgtaaaaggtacttggccgggtgtggtggctcatgcttgtgatctcagcactttgggaagccaaggcgggtggatcatgaggtcaggagtttgagacaagcctggccaacacagtgaaacctcgtctgtactaaatatataaaaattagctgggcatggtggtgtgtgcctgtaatcccaactacttgggaggctgaggcaggagaattgcttgaacctgggaggcggagattgcagtgagctgagattatgccactgctctctggcctgggtgacagagctagactccgtctcaaaaagggccagtcgtggtgactcatgcctgtaatcacagcactttggaaggcggatcacctgaggtcaggagtttgagaccagcctgcccaacatggagaaaccccatctctactaaaaatacaaaaaattagccaggtgtggtggtgggcacctgtagtcccagctactcgggaggctgaggcaggataatcgcttgaacccgggagtcggaggttgcggtgagccgagatcgtgccactgcactatagcctgggcaacagagtgagacttagtctcaaaaaaaaggtactttacagatactatcttagttgactcccataaaaagactctgaggaagatactgttcctctgtgtttcagatgaaggcattgaggctcagagaacagtgacttgcccaaggtcaccttccacttgccctgtgaataaagtctaaaagtccttaagatgtacagaatgtggcacatacttacctcttaatcctcgtctctcaccagagtaggtgaagaccccgttatttgctgccatggtaccgtgatcctcttccaaatgcttataaatgtggaacagtgtaattaataacaaattacttgttatatgttgcctctctccagtctgttccttcataaagcccaagtagtatgaaaatgcgaatctgatctatcactctttgcttaaaacctttctttggcttcccattgctttaggataaagagcaaggcctctgctgtgtccctgaggtcccaagagatccttccacaacccacctcacccttccctccgttccatgatgactccgctcattccctcagacatgccaggcttttcctgcttcagggcctttgcacatctgttccatccatgtggatgggtctgtctcctctctacatctggctaagctctgctcatcctttaggtctccactgaaggatctcatccttagagaaatgttccctcatctaaattaggtcccccaggagatgttgaccaaagggtagtttcagtcagacaaaaggagtacatttttgagatctattgcacagcatggtgaccatagttaataatagcgtatatttcaaaactggcacaggaatagtttttttttttttttttttttgagatggagtctcgctctgttgcccaggctggagtgcagtggcgtgatctcggctcactgcaagccccacctcctgggttcactccattttcccacctcagcctccagagtagctgggactacaggcgcccgtcaccaggccggctaattttgtttttgtatttttagtagagacggggtttcaccgtgttggccaggatggtctcgatctcctgacctcgtgatccacccgcctcagccctccaaagtgctgggattacaggtgtgagccactgttcccggccaggaatagattttaaatgttctcactataaaaaaataagtatctgcagtgatggatatgttaattagcttaatcattcttcaatgtgtatgtatataaaataccacattgtacttcataagtagatataattattatttgtcaaaaataaaaatttaagtaaaaaagtaaatcaggttccccagttattctctttcataggatccgtgtcttaccatgttgtatttgtgttagattaatttgatgtgtacttcttacactagactgaactttatgaaagtagggatcatgtgtgttttaatcattacttaatccctagcatagaacatgacagctacatgtagtaggctcccaatacatctttgtttactcagtgtcagacaaagcaggtttggaacccaaatattctgactccaaggtcctgcctcccagtactgataagaactaggaaagaagctaacacttactaggtaccttaaagaactagttttctaaagaattctctctgggaaatgctggtttaagataaatgtaagactttccattttacaaacacttttaggcaagcgctttgcttctggatcagctgacaaaagcgttattatctggacatcaaaactggaaggcattctgaagtacacgtaagtaacttaggtgtacagtattatgagtttgatgcttattgaataattgcagcaaaagcctcttagaaaagatgtaggagaaaacttttttctcttaaattgaacttgaaattaagttgtgggtgtgtgtggttggtataggaaggttgagtagtgaataagttaatgaatatttcttggccacttactggcgtggccagcactgggctaggtgcttttatgtagctcatctcagttcatctgacattgtagactttatcccacccccaacctgtcatcttccagtgtccctgtctcagagaatggccttatatccacccagtgtcaaatgtcagaaacttggggtcagtgtgctccaggcctcctcttactattggggatctgccgtgttcttcccctgttcctctactagttggtccctatttaccctgcagatctcagactcaaatgtcagtttctttgtaaggactttcctgcctctctagactggaacaggtctctttcgaggcatttctcacaattgcagttttaggtttattctggtgactgatcagtattgctcatcggcctgtaagttccataagaacagatactgcatctattttttgttttgttttgttttgttttgagacagagtcttgctctgttgcccaggctggagtgcagtggcacgatctcggctcaccgcaagctccacctcccaggttcacgccattctcctgcctcagcctcccgagtagctgggactataggcgctcaccaccatgccaggctaattttttgtatttttagtagagatggggtttcaccatgttagctaggatggtctcgatctcctgactacatctattttttttttctcactcttgtgtccctgatacaatgcctagcccataattggtactcaccaattttccttccttccttctttccttccttccttccttccttccttccctccctccctcccttcttccttccttccttccctccctccctcccttcttccttccttccttccttccttccttccttccttccttccttccctccctccctcccttcttccttccttccttccttccttccttcctttcttttcagtcttgctctgtctcccaggctacagtgcagtggtaactagctcactgcaactacaaccttccaggctcaaataatcctcttacttcagcttcccaaatagctggaactgcaggtgcacacccccacaccaggccaatttttaaatttttttttttcttggtagagacagggtttcactttgttgcctgtactggtcttgaactcctgggctcaagcagtcctctcaaagtactgggattacagatacgagccactgcacctggcctcttttcaattgtggtaaaatatacatgacataaaatttatcatattaactactttttaagtttacagtttaatgttaaatacatttacattgttgtgcaaccaatctcccaaactcttttatcctgctaaactaaaattctatatccttcaaatacctactcacccttctctcctacccccagcccctgaaaaccagcattctactttctgtctctctgagtttgactgctttacatacctcatataagtagagtcatacaatgtttgttcttttgtggctgagttatttcatttcacgtaatgtcctcaaggctcatctgtgttgtagcatgtgtcagaatttactttctgtgttgtagcatgtgtcagaatttacttccttttttttctttattattatttttttttatgaagacgaggtctcactatgactcctgagctcaagcaatccttctcccttggccgcccaaactgctgggattacaggtgtgagccactgggctcagcttccttcctttttaagtctgaatattattccattgtatatatagaccacattttctttatccattcatctgttgatggacacttgtgttgcttctgcttcttagctattatgaataatgctgctatgaacatgggtgtacaaatcaacaaacaatttttgaaggaatgaatgaatgagtgaagttgtaagtaaagtattacccacaagtgaaggactaaaacgggttgagacgccttgcatggtacatgatttgctcagctttcattgttgtctaaggatttgtcatgtttccagatcttggtctgtgatgtcttcattgcacctccatcttccatttctgggcctccacaaaacagtaagagtaacagccacagataaagcacctaaaggccaaggtgggaggattgattgcttgaggccaagcgttcaaaaccaacctggccaaaagtgagtccccatctctacaaataagaaaacagtgggtgaggagaaggagaattaattctttaggagtaggagaattaatttctgtgctttttgttggtcacttgcagaagagcatgtggtctaaagtcagaggctgtgggctcattattaaaatcttcagttgtagccactgaaatctttgtggtttgctgcatagtaatctacagttgtttacttcccaggcacaatgatgctatacaatgtgtctcctacaatcctattactcatcaactggcatcttgttcctccagtgactttggtacgttctgattcctgatgtcctgtcctggaataactgaaaatctgggctaaaaatgctaaaatgcattcagaatatggtgattttatcctgagagagttaatactacttctctaccttcaatggctgaggggaggctgacagttattctttaaattgtgtggaaaccaagacagtgaatggtgacctttactctggtaagacatcagagactacaggaagggccccagcaaaggaaatggtaacaagattgggagggcacaggcataacttggtgttgctgcctttgggaagccttcccttggtgttgctgcctctgggaagccttccctgactcaccctggcagagacagtgcagttgtcctcacctttgtattgacccacatctatgtttatgtgaaattcttcactgttgcggttctacttcttgtgcaatttgtcgtcattactggtttaggtggctgtagctgtcctccctgaggggctgaacaccttgaggagttcatcctggccacggtcccgtgccagcattacagcactggtgtagtactggcacaaaagaggtgtcagtaaaatgtctgtggagggaggaagggagtgaaattgggcagaggcttgtaggttatttccattaatggttgattctgttttcagctctatcagtctgtgttcgttgctagtggatacaatgaagtcactagatgaggagtcagaggcctaatccctctcagtgttccagttcccttatctaaaaggagcatgctactcactgtgtctcactgatacggttctggttctgaggttcaaaagagagaatggaattgaaagccaattgtataaatacatggagaaaggcctgtcatttgtttaacatattttatagcattttcttcatgtgaagcactggtctgtgtgcttacactggaatattaaaaaggcaaaatagaatccctaccctcaaggagcttgtggtcttaggagaaggtgggattaaaaaaaatataatattaagtactagtatttattgaatgcttgcagtgtgctaggcactgttctaaggattagaaatgaatttctatttgagctttatgacagcccctgaggtgtcaggtattattctcattcccaccctactgatgaaaaagaggtagaggtcccttagctagtaagtggaggaaccagggcttggactttagaccaggtgattgcatacagagcctgctctgctaagcactgctgaaggaggcccaggaggaaggagtttcttccagcttggggctccaggcaggcttagtggaacacagataacatgtgcacacgtcaaaatgtttggaggaagcgttctggaccaggggaaaggcaaaaaataacttgtttgatgttgcacttggccatgtatttgtgcactggagttaccttcttgattgtacttcgcaacttggcaaatagaagaatttgcttatgttgtctagacatacacttgctatgaggcactgagccagggcatctgggacaggggggagcaagccttaggtgaccagtgtgccatgggagaggcacagctcagatagagtcatgtgttgtgattgagacctatgaaagaaaactagattttcagaaagcatcattgttattttaaatgctaggttatactctggttgcagtgtcaaagttataaacaatgaaactgtcatttctttgagagtcaaatccctgaaaagttggctagaactttaccaatctattttatttttcttctgaaagaatgatagattcatagtaagttacaaagatggtaccaagaagtctatgtacttttcatccagtttcccccagtggatccatcttatgtaactattatacaatatcaagaccaggaaactgagactggcacaaagtgtgtatattatatagttctgttgttttatcgcatgtgtagattgccatcagcgtgacacagaactaagccatcaccatgcagttaccacttagtgtcatatctactcaccttacctccagttatctccaaaccctggtaaccacaaatctgttctccatttctataattttgtcattcaagaatgttatataaatggaatcgtacagtatatgaccttttgagattatgttttttcattcagcataaaatcctggagatccatctaagttgttgtatgtttcaattatttgttcctttttattgctgggtagtattccaaccaatccatcttcttttatattattgtgcattgaagggttgtggtctcctgaacagaagtctgtctccaaacacaaatcaagcagcaagatcatctgctgcaggtaagtgcagctctgacgataagatttatgttccttcatcttccacacagactctcaaaatccaattatttcatgcagcagagaaggtcttgtgttaggtagttggtttaggcccctgtatttccttttttcttctttcttcgtctcctcgatgggaaagacttgtgcctttgatcatgaagcaaaagagaactacaagttgccttcatgcagttacttagcaacaagcctcaacatccagctatactgagtggaggcttgttgaaaatgtgaggctgtcattgtccaggcagcatgtgtggggaagaaagctttccctcccacactttgatgctagacctgaattagaatccagaatctctcattgacaggccatgtgacctcaggaaagttactaaatctttctgagctggagctttacgttcctcatctgacagatagggataaaaatactgacttgacgagattgttgtgaaatgcacacaaactcatgagtgtaaagcgtgcaggacagtacctggtgtacagtagacactctaaatggtagctattcttgctgttcagcttctaggagtatatcccttccgttcagcatctgttgagcaccttctacaaagcaagcactgttctaggggttggaagacaccaagtctgttcttaaggtgctctttaagtgggaggggattgagatggagagtgggaagtggtggctggcccagagatgtaggcacaagctaagggctgtcatagaggtatgtacagagggctgggggagctcagaaaaaggcaccaaatggtgccttcacttctcactgtttattacagaactaaatagcattttaagtttgatcctctgactttatgtcaggaccggcaataatgaaaccatatcccagctgttgctgcctcatcagacttttatttcaaaccaaggcatcatcctcactagttttaccttctgtggggtgcttcccctatccccatgccttttgttggttgtgtacacagctggacaaatgatggtcagtacctggcgctggggatgttcaatgggatcatcagcatacggaacaaaaatggcgaggagaaagtaaagatcgagcggccggggggctccctctcgccaatatggtccatctgctggaacccttcaaggtactcttaaagttgtcctccttctagaacaaacaccatcatgaagaagggctttttgtcttcctgaggtctccctacattcaaaggcttctcacctcacttgaatggtctgttttagaacctgtcccatttgtatggattttttttttaatagtcccgctacctgagaatgtatggaatttattaagagcctcctcaaaagttgagtttaggaatgaatcctggacattttagcaaagcagatgagctatttaggacaggccaaagtgtgtgtgtggcgtgtgtgtctgcgcacatgtgcatgcacacatgtgtacgtgtacatgtatatgagtgtgtgtgtgtgtgtgtgtgtgtgtgtgtgtgtgtgtgtgtgtgtggtgtgtgagtgatgcagcaggaccatttccttatgaatcaatagtggagctctttgctgtggctttatttttgcctttccttttttagttcttccctccaagtttgggcagaatatgtgcccacctgttaataaatagctttttcatgagcctttttttgcccttgtcagaaagtcaaaattaagtctacagacgtccctaaagcctagagatacacaaacaattggcacctaccttcttaaattttatacacactttgctttctatgtccatgtgactttgagagtaaactaattatatgctctttttttttttttttttttttttgagatggagtctcgctcggttgcccagcctggagtgcagtggcacaatctcggctcactgcaacctccacctctcgggttcacgcagttctcctgtctcagcctcctgagtagctgggattacaggtgcctgccaccacgcctggctaattttttttttttttttgagacggagtctcgctctgtcgcccaggccggactgcggactgcagtggcgcaatctcggctcactgcaagctccgcttcccgggttcacgccattctcctgcctcagcctcccgagtagctgggactacaggcgcccgccaccgcgcccggctaattttttgtatttttagtagagacggggtttcaccttgttagccaggatggtctcgatctcctgacctcatgatccacccgcctcggcctcccaaagtgctgggattacaggcgtgagccaccgcgcacgcctggctaattttttgttgccaccacacctggctaattttttgtatttttagtagagacagggtttcaccatgttggccaggctggtcttgaacttctgacctcaggttatccacccacctcagcctcccaaagtgctgagattacaggtgtgagccactgtgcctgaccctatatgctctttatatatcctataatattattaaaccatcagtatcctttacagagtcctctgagggtaaacgaaaggtcctacttgtttaccagctcaatgtcattttacagatggttgcctacttgatttagaaggttgtttggaaggttattatgcttcttcctgaataattttttttggcccatgctgtaccatgcatgtctaatgctgtcaaaggccattagcctgccccagagttcctgctgtttgatttgtggctgcagaggacttggtggctctaggctaccatttttaattcatgagaagcaggaggccctgtatacctggtggctgtcctcctccaggtagggttcagaggctccttttattttttatttttattcttttttttttttttttttttttttgagacggggtctcactctgtcacccaggctgcagtgcagtagtgcgatcttggctcactgcaacctccgcctcccaggttcaagcaatcctctcacctcagcctcccaagtagcttggatcacaggcacatgccactacacctgtctaattttttgtatttttggtagagacagggtttcaccatgttggccaggctggtcttgaactcctgatctcgagcgattcacttgcctcggcctcctgaagtgctgggattacaggcgtgagtcactgcacctggcccccaggggctccttgccaggattttaaattatagttttagtgtagttctaggcaatgtaattttgaacaactacttactgtctacagccgatgggagagtttctggatgaacagagagaatgaggatgccgaggatgtcattgtcaacagatatattcaggaaatcccttccactctgaagtcagcagtgtacagtagtcagggtagtgaggcagaggaggaagaaccagaggaagaggacgacagtcccagggacgacaacttgtgagtgtgtcccagtgagtgggaacccttctggtaagggcccaggccccacacagacttgccaggacagatgttaaactctttggccaagggagtgcagggactagggggaactgtgggtgaaagcgccttcaaaaaaaggagacatacccttaaaacttgtgtgtgggtataaagtgatcctgtgagaaactataggaaatactgaaaagactaaaggagaaagttcaacttttctgataaaaccccatcccctgaggaaatcactgttagcaatctagtgtatttctcctcagtcttttcgtgtgttcatataattaactaagtcatattctgctttttttttcacttaacattatagtgtgaaccctttccagtaacattacaaatccttcgaagaacatgatttttaatgtctgaaaagtgtgcccttttgtggatgccccatcactcgacacttcctctattactggacacgtttcttagcctgttcccacactatcccttaccttaccttgcattttctaggatgtatatcagagaggaagcccttaccttagccacagtcttcactcccaaatcctggctgtctagtcattcttctcttcagttgagattgcctgtagggaaaacatgggcaggccagagtggggaaagctggggtagccaggatatctcagtttggcagtagagatctagcttgagactttccaaactgttttacatagtacctgagtttccttggaagaatcccaccctgaggtcatgggggctgggaagtggggaccagtaaaggaggaaggtatggctttgggtccccatctcagtgcctttgattgtttcaacatgagtttttgtttcataaagaatcctactgccccaggaggtaaaagggggttgaaaatcactgatccatctcacagggactgagcccagcccagagccatatgtggcctccccaagagggctcactggtgggctgggctcctggattgtgtttggactttggacatcagtgccagtcacacaaaggtcatctgcaggctccctcattaacatccctctcggtctttgtctcttttcccttagttttgggttagtgcctatgacatttgccactcttggctgggttttacaaacaaggctttaccttgcctgcctacatatccagtggtgctaccaggttaccacaagacactgggatcagaaaagctggaattaataaacaaagaggcaacattaggtggattaagacccagcctcaagggctaggaatgcttttcttttttttttttgtgacagagtctggctctgtcacctgggctggagtgcagtggcacgatctcggctcactgcaacttccgcctcccgggttctaagcgattcttgtgcctcagcctctggaatagctgggattacagacacgcgacaccacgccgaactaattttgcattttcagtaaagatagggtttccccatgttggccaggctggtctagaactcctgacctcaggtgatccacctgcctcaacctcccaaagtgctggaattacaagcgtgagccatcacgggctgccgcttttctcttgaactagattcccaggtagcttgctctccagcctcaggcaagggagtttctcctgtgtgctggtcctacagtcccagccccacagcactgatccccataggttctcagtttcaaagacagttgtttgttttcagagcccattgctcttttttgaaaattagattcagtcagaaaccatttcacctgtgcaaggacccccgcctgcaggagaacctatttttaggtgttaattttctttcttcaggaagagcaagcaagtttcccttctattaaaaaatgtctttgtgctgcaagagatgtttctctgccatctccccacattttctagtatgtaagagaaaagcagtctcaatattgcagccttgcctatcttagtgttgctccccagtaagctctgaaatgagaggtttatcttcttcagctgcagcagtgtccccagcaccataaggtcatagcaggggactcagtgaaacagcagatcccaggaaggctgaacctcaactctgcttcatcccgtaagactgattgatgggttgggccaaattataacttttggcttcagtaaagctgtacaacatttggcaacctgaggccaggacttccttgttcctgttgtttaagcccttagagctatactcatcagcaggctgtggcccttcataacctcttttatcttctgttgattagagaggaacgtaatgacatcctggctgtggctgactggggacagaaagtttccttctaccagctgagtggaaaacaggtatgtagccctgtacaaatccaattgcagtcatgcctgttatattttcattttctgagattctgttactattaattatacattatcattgttagttcctgcttattgagcatttgctgtggtaccagatactgtgctcactgctttgcatactttatcctattttattcttataaaacccaatgaagtgggtactactttccttatcaactttttagaaatgagtaaaccagaactcagagcagtgaaattatatgcccaagatctcacacagctagtaaatggtggagcctaggagttaaacccaggttggtttgactttaaaatctagctcttaattttgaccttactttcctctattcgctttctttcattcaaccagtatttatgagtacccactcaggaaagccctttcataaaggagctgctgacatagagctgggaaagtgatagcctctacctgcaagagctcacaggctggcggagacacacttgatagcaaagagcccctgtgtggtgtggtatgtgacacaatagaaagctgtacagatagacagctttttgggacacaaaagagggtaacatcactacttggtagagatgggaggtcttgttagaggttatctttgagcaggccatctttgagttaggctaaggacattgggaatggtgtttcaggcagaaaaaaaaatagcatgtatcaaggcaggaaggaatgaaaatatatgacagttcagagaatggtgagttgtacagggtgactgcatctcagagtttgtgacctgaaaacagagctgaagaggaacatgggggtatgattttttatttatttatttatttatttatttatttttaatttttttcgagatggagtctcactctgtggcccaggctggagtgcagtggctcagtcttggctcactgcaagctccgcctcctgggttcacgccattctcctacctcagcctcctgagtagctgggactacaggcgcccaccaccacgcctggctaatattttttgtatttttagtagagacggggtttcactgtgttagccaggatggtctcaatctcctgacctcgtgatccgcccgcctcagcctcccaaagtgctgggattacaggcatgagccaccacgcccggcctatgattttttgtttgtttgttttgagacagagtctcactctgtcgcctaggctggagtgtaatggctcaatctcggttcactgcgacctctgcctcacgggttcaagagattctcctgcctcagcctcctgggtagctgggattacaggcatgtgccaccatgtccggctaattttgtatttttagtagagacggggtttctccatgttggtcaggctggtctcaagctcctgacctcaggtgatccacctgcctcagtctcccaaagtgctgggattacaggcatgagctgccaccacgcctggctggagatgtgattataaaggacctgagtagtgtgaataagaagtttgaacatcatatactgtaagtattcaggagccataggtggcaggaagtggcatcacagattcttgcttcagaagaataacttgtttccatggagggtggattaaaatatagagagcatggtagtaggatgacttattagtaggcaggaaatgccaaggattagagtaaaggtgctgggtacagatttcacaccacagccaagcaagtgagaaatgcaacctgtgcagtgaagcctttaattgcgtagcatccttattcctcaaaacatgtcatgtaagagggaagagttttagatgtgtgtagcccagcttttgggccatttcttctacccctgccttaccattggtcatttcttttgtattcgagtaaagaaaagataaagggagcagataatgaagtattttctcagtttcccatggctgatttcctaaaactctcattttaattaactatcatctagtttccctggccctctctattcatctgcttaatgtgtgtacatcatcattcaacagatacttattggcacacctactgtgtacgaggcactggatgtgggtactgaagactcttgggaacaaataaccacactgcagtgggagggaatggggtcttgttgctatggccacagaagaaaagagctcaacatggccgagggccacaggaaatatcttgcatgtatgcagccccagagctcatgttgtggcccaaagtttctgcacgatgagcaaccttaacctgctgagatggtaaccccaacttgtttgggacagtaaaattgttttcttgctgggtgtcttcccttcccaatctaggaagatttagaattcaatataggatgatgaagtaaatcaaacccatacttttgtgttagtctgaggtataatttgtgtatttttgtcatttgaagtgttagtaatacttaaggggatctggcttaataataataatagctaacatttattgaattccaggcattatataaactctttacaaggattaactcttttaatccttataacaaccctatgaggtaaatactgttatcatcaccattttacatgtacgaaaattgaagcacagagaggctcaataatttgcccaaaggcacacatttagtctgtggtccaccctgctgaaacccaggcatactggtgccagaatccatattagaatgtctatcagattagtcttgcaatgaccattcaaaagttgtattgagtaatttcatatgtctgattttatttactttttgagaaaaggcctcaccctgttacccaggctggagtgcagtggtatgatcatggttcactgcagccttgatccccctgggctcaaggaatcttcccactttggccttccaagtagctgggactacaggcacatgccaccacatcctgctaattaaaaaaaaaaattttttttttttggtagagatagggtctcctatgttgtccaggctggtctcaaactcctgggctcaaatgattcttctgccttggcttcccaaactgctgggaatacaggtgtgagccaccatatctggcctacttctgattttaagtggaaagataagaattatatttaaagtgtatattatttaaggttcctaagcaatattggaatgcttaagcaatttgttacatttttcttcttggtgttcactgagctttttgaatctacacattgatatcgttctgtctttcaccaaatgtgaaaacattttggccatgatttcttgaaatatttcttcttctccattctttcctttcctctggaactctaattacacttacattagaccttttgttactgttctccaagtcatcgaggccctgttattatttttttaaatcccttcttttccctctgatcttcagattagaggatttctgttgttcagtattaaatttcattgactcttctgcaacttccaatatttttcttaagctcattcagtgtgtatttgtttcagttattattgcatttttccttttctagaatttccatttggttcttttttcctttttattcattacaagcgtatttttctttatagccttaatcatagttataataactgttttaaaattctcatctgcagctgggcatggtggctcatgcctgtaatcttagtacttctggaggccaaggagggacgattgcttgaggccaggagttcaagactagcctgggctacatagagagactccatccctaaaaacgaacaaacaaattggccagggaggtggcaggcacccattgtcctaacaactctgtaggctgaggtgggagtattctcaagctgaggagttcaaggctgcagtgaactcttaccactgcactccagtgtgggtgacagagcaagacctgtgcccaaaaagcaaacaaaaattcttatctgctatttctaacatttgggtcgtcatggttcagtctccattgatttttttcccttgaatatggttcacattttcctgctttggggaattttgaattgtactcaatattgtgagtaatatgtcataaagactcatatccatcatgttcctctgaagattattgtgtatgtttgtgtgtatatatgtttaagcaggcagtttactttgctgggctcaaaatcaaaactccatgttttcagtggtgtcagcagctgacatctctgtgcagttctttagctgtagctaggctgcttggcatcttgtcacagtttatagttcaagggtttccagatattcagtggagtttatgtgcagaatttaagctcttactttgcttctcttttctgggatttcccacttcactttccgggtgctgtggtcctcccaaattctatactcacccagcatgatggtgaagagggctgccctcaggcaaaaacccttaaaaaaatgagaagttcacctagtgtttgttcccttcttctaaatgtgcatgtgtcttcagtttctgcctgcttttggtcgccctgaaatggttgttgtttatagttggtccagagtttattgttgttactttgtgggaagattggtccgatgggaactagtgagccatttccagaagctgctagccttccatgtcgtgattcataagaatttttagttttcttgttaggttttctagcatcagataagtgctagggaaagttttcgttgctaggcatttgaaattcctatacaggaaaggaaatttgaatgtattaaacttataattgcagtttaaattggtgtaagggaattaatttaactaagttttaaatgggactggatatttaagggattttataatctgttcaaaattggatgccttaaacagtcaaagtcaattggctgttcactttaactagatttataaataggaaaatatttgtaaattgaacttaagaacttaaggagaaaccagttccctaaagttatttcttttataaattgaatattagtttaataatgttaatcacaaatcgtctttttattcacaaaagacacccttggggcagcaaaaaactccagtggtaataaggaacttgggctttagtggggcagacctgattaaccctgtgtctacagacaacgagagaagtgcaatgggataggcgagcacaagtgctgtgggaggatgaggggatggggattggagatgttcctggaggagatgacacctggcagacaaagtgagggaaagagcattcctggctgggtctaggaatggtgtggagtgtagcacctgtgaggatgtggaggcctgaaaaagcattgcccgcttaggaaacttacaagttcattttggctgagagaatgaccttgggggctgagctcgggagtttgacctgcatcctagaagctgaggaagcaccatcaagaaagagaaaagacaacccacagaatgagagaagttttacaactcatatatctgataaaggacttgtatctggaatatataaagagctataaagacagggctgggcatggtggttcacacgtgtaatcccagtgctttgggaggcagagacagggagatcacttgagaacaggagttcaggaccaacctgggtaacagtgggaccccacctctaaaaaaatatatttttaattagctgagtgtggtggtatatgcctctagtcccagctactgggggtggtgaggggctgaggcagaggaattgagcccagaagttcaaggttgcattgagttatgatcatacgactgcattccagcctaagccacagagtgtgacatttctctgtggccaataagcacatgaaatgatgctccatatcattagccatcaggaaaatgcaaattgaaaccacaatgagataattcgcactcactaaaatggagaaattggaatcctcatacactgctaatgcaaatataaagtggtgcattcacttgaaaagtgtagcagttcctaaaaaaggttcaacgtagagtttaaaaataaaaaaatataggccaggagctatgactcactcctgtaatcccagcactttgggaggccaaggtgggtggatcatctgagctcaggagtttgagactagccgggacaacaaggagaaacaccgtctctgcaaaaaatacaaaaattagccaggcgtgttctcacacatctgtagtcccagctacttgggaggctgaggtaggaggatcacgtgaagctgggaagtggaggttgcagtaagccaagatggcgccactgcactccagcctgggcaacagagtcagaccctttttcaaaaaaaaaattttttgccaggcatggtggcactcacctatggtcccagctacttaggaggctgaggcaggaagatcgcttgagtccaggagttgaaggctgcagtgagccgtaattgcaccactgcactccagcctgggtgacagagtgagaccccatcttgaaataaacaagaattaaaaaatgaagagaagtagtatgggtgtagttgcagaataaaggacagtctttaaactgaataaactcagctttataaaatacttttttaaaaaggcggagaaaagaagctgagggaacccattgaactataggaagaactatatttgcagagggaggggggcctttgggaacaaaaccacccacagtctccatcttggcggaggagccctgacacactcctgcactcctggagcacttgggtgggactaggggaggtgccactgactccaggagctgaggtttgggctgtgtagaggatgagtagggagatgcagaggcagagaggcctgtgttcaccatgggatgacacaggagaaaaggctggccagctctccctgtcttcccaactccctctaaagttggcgagaaaaagcccttaattgtattgcaatggttatggattcggaaatggtttttcccttgctgtgtgttctttttcctcagattggaaaggatcgggcactgaactttgacccctgctgcatcagctactttactaaaggcgagtacattttgctggggggttcagacaagcaagtatctcttttcaccaaggatggagtgcggcttgggactgttggggagcagaactcctgggtgtggacgtgtcaagcgaaaccggattccaactatgtggtaagaagagaaagtttgttctgtggggccatggcttgaagaggcactgagcagccgccgtgtctcgagtcacatcactggggtttgtgtctgacaaatgggggaatgcagactttctccagagagctgggaattgacagttctctcaccccgcaggtggtcggctgccaggacggcaccatttccttctaccagcttattttcagcacagtccatgggctttacaaggaccgctatgcctacagggatagcatgactgacgtcattgtgcagcacctgatcactgagcagaaaggtaagaggcaggtccagaccttgggaagagggacaggtggaagcaggtggaaagggctggtgacagggcacttgaaatgacaggaaaaggtttctctttggcgttttgcaaacctgttagccactgggtctgtgtcttgttttcttttttttttttttttggtgggggaagtagggatgccagtctccttgaggatctcatgaaagcaataaatcctctctgaaaaatgtaccaactcagaattttgcacataatttcaaggagtacatgaatttccttagtgagggaggatgatttatgacaggttggagccaggtggttgacctgcatgggtcttcgtggacctttatcctttctggtcagagtcactctggggtgcttctccctcagccctgtctccacttgcctcctggtgggtccttctgccagagatgagcagtggaattggattggcacaggctaggtcagaagatcagagttcccggcctcgcatagtcattctaagccctaagactgcagtctctccctctgtccacttaagttgctgtgctggttaaatagactcaatccacttacttcaggtgtattcatatctggatgtgctggccttagtgcactgctaggtgcctttgcaagggatccaggttgggggttgtcttgtagattcagatgagtgtcctttggtccccctgggggaccctatctttttgaagattctggctgtggtggttggggcaaagccccttgggcagcttcacagtgtcccccttagggacattttctccacctggtctgtagtgggagtgtagagcctggtgtgtaccagaaattacatgtcttccccgtttgtcaaggaggtgggcagggagcggccagaggtgaggtcagttacttaggcaggcttctgatcaccgggggccactagtgctgtgcagaggagtttatatttgtatccagcaagtgatggtaacagtgagtagtttatttccatactcagttgtcagccttggaccatgaagattgtgtcctataggactttggatcccagggttcagcagagttgattgtatgtattagatactctaaagatttttcaatgagagtatctcactttaattgccagtagcgctaagtaaatgatggcttttaatttctctgccttgcaccttacataacaacctcttgctagaactagatatttttttctttgacagttcggattaaatgcaaagagcttgtcaagaagattgccatctacagaaatcgattggctatccaactgccagagaaaatcctcatctatgagttgtattcagaggacttatcagacatgcattaccgggtaaaggagaagattatcaagaagtttgagtgcaacctcctggtggtgtgtgccaatcacatcatcctgtgccaggtgggcagcagcatgttgaaggagttgggctgaattccatttgtgctccccccccagtgatagggtgcccacctcatggttttaaaactggtcactagaaaacaagtctgttccatcaaactaagtggtgcttattggctttcattttcctggcatctggatgaaccagactctatcagcaagtcatgagccataaactggagaatgtttttttgttttattttattattttttaaaaaatatttttcttgagacagacagggtcttgctctgttgcccaggctggaatgcagtggcacaattatggctcactgcagctttgacctcccaagctcaagcggtcttcctcctgagtagctggcaccacaggcacatgccaccacacccaactaattttttatttttagtagagacgcgaggctgtactttgggaggctaaggcgggaggaatgcttgaacccaggagtttgagacctgtccagcttcctaaagtactgggattataggtgtgagccactgtgtctagccaagaataccttgttctattgcagaacatcttgtcatactgggattagatatactttaatgacttaaaacataaattggtgtacagaatgaagatagtttttattgataagcatatacacataaaatttgtatcaactcagtaattgtcaaggaagttttaattcctgaaagattttttttcatagaaaaatatttctcaagattcttagagagtgtctaagtcaatgccaagagaagtttggaaagactttgagagaaggctagcccagcatcttggaagtagaggtggatttagttttacatagttctgttggaggtgataaaagagaagaattccttaggaatcactgtagtgtaaaatactattaaaatctctcaaaagcctagaactgggctgggtgcagtggctcatgcctgtaaatcccagcactttgggaggccaaggcaggatgattgcttgaggctagtagttcgaaagcagtctagaaaacagagaccccatctccaccaaaaaaaaaaaaaaaaaaaaaaaattatttaattagctgggtgtggtggcgcttgcctgtagtcccagctacttgggaggctgaggcaggagaattgctttagccagaaattggaggcagcagtgagctatgatagcgccactacactccagcctgggtgacagagtgagactctgtctcaaaaacaaataataaataaataatcaaagttagaactccaagcggtttagggttgctacaaattacaggatagatgtggcaagtatgtgtacttttgagtgctgcctctggcctaggctgcctgggtgggggtttgcattgaagatctgaggctgaattgggctccgtggggaagccttgcatggagtcttggattaacgatgccaatcgtggggtctacattgggttagatagatggatactgaatgtgtaggtattttctccccttagggacagaaagatctccttggggaggtctgggggcacttattctgttgaatttccatgcagagctgggtttgcttcctaggagaaacggctgcagtgcctgtccttcagcggagtgaaggagcgggagtggcagatggagtctctcattcgttacatcaaggtgatcggtggccctcctggaagagaaggcctcttagtggggctgaagaatg

SEQ ID NO: 15635 - DNA, 201514 bp, Homo sapiens
cttttgaggggctcggctagcttcagcgccgtggggtctgacctggctggatatagtgtaccggcccggcaggaggggcggcccggtccgggttgcgcctcctggagccgcccccgggacgtcagtcctggaggaggcgagggtgagtaggagggggcctggctggggaggctcagatcattcggtccgcaccgccttggcccctgctgcagactcacggccttcctggcctaggctgtggcctgagcctccatcattggcctcctcgcccgctgcctcttctttctgctctaattcctgcattataaagtcagagccaccactcggggcctcagttgaatgagtcaatgacttatccctgattgtctctgagggctcctgtaaggagtagatgtggtacgggatgggatagcacgtcgtaaactggaaaactgtgtgagtgattgctgctaaggcgtggatcgctcctccagtataattacgaaattccctagcaaagcagtcgaggatcctaacttggccccaggtagctctgcggcttcttctgcaaacactcagtgaggtccaggagcccacgcgatctctgcttagtacccaggaggcacactgtgcttttgtggttctccctgctcccgcctttgcttcagctttcctgctgcctggaatggccttacccgttctctctctggaatgctatcttaaatgtcaccatctctgagaacttcccgaacaaccaaccctttagtcctaatcagaattactcttcctatgagtgtgactgcagtacctctagttttgtacggttataattattagagcatttattacacgggcttgttgtataattaggcaaggatgatgacacctttgcattttatagcactttatcaaagtggttttgacttttttctataaaaaatgatttattttcttaaaggggcaaaaaatacattttttcttaagaaaaaaaaagagccctgcataatggctttctcagggtgacaaaattagacagtgatagagccaatactcttaccaaggcggcctaactcctagactagtgctcctatctcttgtccacgcccctgacagagcccaaagatagttgaaatgggaaattttaaaagagcagagacttgtaagtatgaactcattattcaagaaattaaactttgatcctgctcactttttggacttagcactcagcctgtgacctttcatccaacaaacatctactgagtactggctatatacctgttactgtgctaagtgctaagaattatgaagtaaaaagtatatatatataatatatataatatatgtacatataatatatataatatatgtatatataatatatatattatatatgtatatataatatatatattatatatgtacatataatatatatattatatatgtacatataatatatatattatatgtacatataatatatatattatatgtacatataatatatataatatatgtatatataatatatattatatatataatatatgtatatataatatatataatatatgtatatataatatatatataatatatgtatatataatatatatattatatatgtatatataatatatattatatatgtatatatattatatgtatatatataatatatataatatatatacatatatattatatatataatatatattatatatataatatatatgtatatataatatatatattatatgtatatatattatatatattatatatgtgtatatataatttatatatgtataatatatacacacacacacatatatataaaacagagatcacatttttagtgtatttttcaaagggtataaagaactttttttgtggttctgatgtgcctaaaactctgatcacttagaatgaaaaatgacaggtcttagagtttagaacagtgcctagcacatagttgtcactcagcttgttgaatgaacgaatgtgaacatggtctaaccttattattttttgcattttacagaaacctagaaagctgacatagcctgaggacacactgctgattataaatacaactgggcctagaacccaagtgcagttactcccctcccatgttttcacctccacctctattttgtagcttctctcaaataaccttaatataatcctggatatgacagtagttcttctgacatgactgttagactcagacatgactgaagtgtctcacaacaccctcttcctccatattttctgccagtccttaactcaaattgtcagcaaaataaagacgtaaggagctgtgctttaccataattaagaaagtattaatatgttctctcaagggcagaatttgaaccaataatccttgtcgatgacaagacaaataccagctcatccgttataaatttatcttagaaaactctcagatccccaggagtaacagcgattggcgtgacctgctttttggtgaaatcagaaaaggacttgcctaccctcatggcagcaattaactggagctgattaacagctgctccctttagataagtacatatgcttgagtttaccgtgattctgtgactccctacgtttctaacagttgttacctctctggtccttgtaggcattcagctttggaactttgataaagcagcttaagggtttaggaaggatgtttaagatcactgatgcaactattcatctttccttcccatcaggtgtttgaattgttgctgcatttctccagcctctgctttcttaaacactcttgtgatagggatctcactatcttcctatgcggctgatacttattttttattttattttattttttttgagacagggtctccctctgtgcccaggctggagtgcagtggcatgatcttggctcactgcaacctccatccacctcccaaattcaagcaattctcccacctcagcctcctgagtagctaggattacaggtgtgtgccaccacagcccagctaatttttgtgtttttagtagggacggggtttcaccatattggtcaggctggtctctcaaactcctgtcatatgtttttaaaaggttcttacaagctccatgagactaccggtcagaacaaaattgtccttattgaaatatggttcattttagtgatacgatgttccaagtaagatcttatggttaagacctctatctaggtatattttcctggtggaccaaggagagaacaaataaaaatttcactttttgtgagaatgacggcaagacctagataccttttaatttagtatttagccaggtgtgatggcacatgcctgaagtcccagctattcaggtggctgaggagggaggatcgcttaactcaggagtttcaggctgtagtgcgctatgccattcaggtgtccactttaagtttggcatcaatatggtgatctcccaggagtagaagaccaccaggctgcctaagaaggaatgaactggtccacgtcaaaactcctatgctgatcgtagtgggattgcacctatgaatagccactgccctccagcctaggtaacatagcaagatcccatctctttaaaaatagttttttaactaatttttttttcagatggagtcttactctgttgcccaggctggagtgcagtggtgcgatctcagctcactgcaacctccacctcccaggttcaagcaattctcctgcctcagcctcctgcatagttgggattatgggcacgcgccaccacgcccagctaatttttgtatttttagtagagacacagtttcgccatgttggccacgctggtctcgaactcctgacctcaggtgatctgcccgccttgccctcccaaagtgctgggattacaggcgtgagccatcacacccggccttaactaatttttttatttttttctgagtcagggtctcaacctgttgcccagtctggcatgcaatggtgtgatctcagctcactgcaaaccctgtttctcaggttcaagtgaaacttccacctcagcctcccgagtagctaggattacagtgcatgccaccatgctcagctaatttttaaaaacttttggtaggcagggcatggtggcttatgcctgtaatcccagcactttgggatgccaaggtgggcagatcacttgagatcaggagttcgagaccagcctggccaacatggtgaaaccccgtcgctactaaaaaatacaaaacttagccggtcgtgatggcaggtgcctataatcccagctactgaggaggctgaggcaggagacttgcttgagccctggaggcagaggctgcaatgagctgacatcgcaccactgcactctagcctgggtgacagagcaagaccctgtctcgaaaagacaagaagggaggaaagcagggggagaggaggggaggaaaggagaggcgaggggaggggaggggaggcgaggggaagggaggggaggggatgggatttgtagaaatgagctctcgctatattgcccaggctggtctcaaactcctgggctcaagaaattctcctgtcttggcctcacaaagtgctgggattacaggcatgagtcaccatgcccagccctaattaatttttttaagtttatttagtgcttaaatccagctaattctgacttcacaattgagtttatgttatactctttttgtggatcgggctcacttttatttgcaatatcaattctaatgtttaatattatgtggcatcatattacttgtattaacttagattatgtggcatcatattgcttgtgtcactgtaaccctgagccctgtgcctaatgttaaatattgtctttgttttttcctcagatagtccctaagaagagtcctagaagcacctaccctctcattttacagatgagcagatgagcaacttgtacaaaagtcacctaatttgccacctaatgccaattccaggactaggactatagctttttttcttttgagacaggtctcactaagatagacagcctcactatcttgcccaggctgctctcaaacttctggcctcaagcaatcctcctgcgttggccttccaaactgctagtattacagatatgtaccactgcacccagccaggactatagatttttctaatcctagtcaagtatttctagtaagccatatttataaaatacccacttggaactgatgagacaggtttcagaaatgtttgctgcatgcgctcattgtctgaatcattgtttcaggttgctccggttgctaagaagactatgaacaagtcagagaacctgctgtttgctggttcatcattagcatcacaagtccatgctgctgccgttaatggagataagggtgctctacagaggctcatcgtaggtaagcagtccccttaagtacagaaactttaaaagcaactgtttgtcctgaggaagtttgttaatgttagttttaatttgcaatgtactcatacattttaatggaaatatgttattatttatattttcttccaacacatgaacaagaaaggaattaagtcctaaaacttaaaaatatgggttaggattaggtgaaaagtacttgagaaatttctatgtatttagcactaagtctagatagatattctaaggtactaagggaatgaattcatctttatgttaacagatctcgaatgaaacagtggataatcttttaacatttaatatatacccaaagtattaaagtttacaaatgatttaatttttaatgatttaaaattgattcaatgttccccctgtgatttgcatatataagtgatatatagagaggtccaatgcaggagttctagaggagagaataaagagaacaaagaatagctaagaattttctagaaccttagcttcctgctaaagcagagcaaagatccatctttctatcacaaatccagatattcacaagttgcaaatcccaaagagaaaaaaataaaaatatattatttgtagtctttattcacaccagtgtctgatgacatcatgattgacaacttgggctacaaaataaagtccaaattacttgaactttcatacctgttccttccgactttgtttttaccctacatttgcagtttctccaggaacttctactggtgtaccgtaacctctggctaagctagaggttacttctatttcccaataagccatgaattttgtctcactttctccatatgttctgtttccccaccttttttctatctgctactctgttaaccttcttctgtgctaaacaaactcctacttatctttaaagacaaaactattgtatctcacactctgtgaagatttctcttcctctgcttatccttactttacctcagctatctacattcactggaacttgacattttccaccacctccaaatcactcaaacattctaccattcaactaaaactcttactttcagctcacttactgatgacaaacaatagttttccatgctcactgagacctccaatccactagcttctctagttttgaccatcagttttccttctgtcttttccttcctcactactcagccttgattctatgtctgttattaaaatccttctcttggaaaaattccctttttttttttttttttttttttttgccttctgttgcacttgactgttgcattctcaactctggatgtaccaaacctatcttgctaagcagttgaatccagctgaaagattgatagcaccccaaattcatgattacccacttcaaataggcactcagtacttactactcatcataccacattttttctgtaatgaatgtttcatacctctcactctactgaatcctgtgactgccagttccccctcctttcattctctttaatgcagtaggcttactagaggaaatgaagacattaagtaggaactccctcatctttcagtatggtatctacaaatctacctcgatctgtacccatcttctctcttcatcttcctgctaaaacagagcaaagatccatctttctgttaaaggccagttcttccacacatgctctgtgttccatcccctcctgtcttctcagggacattgcttctttttttccccctctgattactatatcttcaacctttcttctatgctaaattctttccatcaacacttaaacatgcttcattgtttccattatttaaaaatcccatctctgtttcttcatctccctttaggtattgccattttcaactttccctcacgactgcattagcgcacaggctaaactgctacaaccatgacttgaataagatagaagtatatttcattctcataatattgcaatcccaactctagatggaccaaacctatcttcctggcaactactaagcagttgaacccagctgtgtaatagtacacagttatgtgggcagtctaggttagatagatatctccatttcacaaaaccatttaggtatactgccaggccttggttcttccattctcaacatgatgcttctatttctgggtcaaaggcagatacgttcattatagtcatagcccagtcagcaggaaggaggaagagagagcacagggaaagcaatttgtcagtaaggaggtagactagacttagaccacaaagccacacctagaacaaaagaagctgaaaaaaaaagtcttgccctggatggtatcatgcccagctaaaactcacggtgctcaattgttgaaaagaagaatgaaagaatgaatggggggcaaatattgctgtctgtcaccaaaaccaagattcttgggccagctgtacccattgtccacacttatttaccttaattcactcttttattaaaacaaaatatactttcttattttgaagtatacatatagagaagtgcatacaacttatatgtacaatttaacaaataaacataaagcaaacatccacttaaaccacctaggttaaggagcagcacattgtcagtaaccccagaagcccctaatgcatccttctctccccactagaggaataggctatcttgacttttataataatcattacattgtggttttaccacctacatatacatccttaaacactttagttaattttgccatttttgactttttgctaaatgttccatgttcacttgaactaaaaaatgtatgtatattacatttttgtcattttcctgctcaaaattctttcattattcccattatacttggaataaaatttgacaggttacttgtatctctttacctgtccatcctcacgttttacctcacgtggtaaaacttgccttctttcagtgtctcacacctgccaagccctttttcatctcagggcttttgcctgaaacgctgttctccctattctctgtctgaataactcttagtcatccttgagatttcaattttaaggtcacttcttcaaagaggcctgctaaccatccagtctcaatgaaatctgttcattgtattccctcttggccctctgtagtttttcttcatagaacttgtttcagattatcactgtatatttatgtgtatgaatattttaacatctctctcctccataagctagtggccttcatgaaagtagtctgggtctgtttaattcatcactaaatccacaaaatccagcacagtacttggcacataagaaatatatttgttgaaggaatgaataaatattttaatcattctttaagtatcttttctcccaagtagtctataatcatcttgagggccaggactaaaaatgaattgagttgaattaaattgaattgaggagcagattgggactaaattccatgagaaaaaaaaattttaagtcaggacgtatgaagaaaaagtaccaagtaaaatgaattcattaatgctttaattaaaaatataaccttcaaagaaaaaagtgcagtatgttataaattaaaaacacttatatttttatggctcagtcatacagattaattaatgtgttattattaaaacctgaaaccttgaaaatccccaaagagaaaatccttaaaaaccaaaaagcaatcatgatgtgaagccagtaggtagctaataaacttatttataaattgtttttctgttttctatcatcttgtctgaggaacttcttattaattactgactgagggtgccactcctcatcttttaagaattgtgccattatgttttctgtgtacctttgctctagagtattttccagcatttgtatatttgtgcaaaaataataactgtttcatcttaaatttcaatgtaattttttttctatgcatatgaatgccaggtggtaatttcaatgtattttaaacatctttttatgtatcacatatttgatgatctctaaatatatgctatttctcttttctaaactagtgacatagtactacagatgaattttttttcttgaatccttgttcaccaactgctcagtgaattcattcactttagcattttctgttttcccctctctgtttccatggagaagtatgtcagtgatgtgtttgactccatggaaacagatgagtgtctctttctacatacacaacgaattaaatcgaacactttctgtgctgcccattgtcctggaggaggactggagaggccttctctgaatgaaacatcatttcagtagcaattcttagtgtttaacctaatacagtggattaatgttttaccataacttactgcttctagattcagatgtattagggcttacttctgagccttaaaatataaacatacatagtaaaatctgaatatgctatggttctcatttatagatatttagctttttctcttaacaccaaactcaaataatttgaatgaatactagaaatgtaattgagaacagaatttagtagattcattttaatactatacagtgtagtattggtagaaaaaagtatagattttagagtcagataaacctgagttttaagttctaactgttatttattagtagtaatatcttggctaagccatttaatttttaagcctcagtttcctcatccgtaaactatagattataatatttcacttgtgtgagagttaaatgaaataatgacagtaaaatatctagcatggtacttgacacatagtagacaataagttaatatcctattactgttattgttatgtcagcttagactaaaataatcaagtttttcatagcttcagatgtctcaatatgaaagagcactaaatgcaacaaagattaatattgtgggttttttgtgaaaactaaacaaaataatttgtaaatatgcatggtgtgtaatgatcaatgttgtcattactgccaataatatttgaggtcgcttgcagtggtatcgtgaccaggaagcaccattctgattctactacaacttttgtttcactgtccatgttctgagcagcataatctctctaaatcatttcctctacttgtttatttatttatttatttttgagatggagtttcactcttgttgcccaggctggagtgcaatggcgtgatctcggctcaccacaacctctgcctccctggttcaagtgattctcctgcctcagcctcccaagtaactgggattacaggcatgtgccaccatgcccggctaatttgttgtatttttagtagagacggggtttctccatgttggtcaggctggtctcgaactcccgacctcaagtgatccgcccgcctcggcctcccgaagtgctgggattacaagcctgagccactgcgcccggcctctacttgtttttaacatcttctgacacagtatttagatacggaagtgagcctcataaatgacagagtagaggtactatttcaggttacttcttcccttacctcaatccctaccttaaaagctagagtcattaaatgtttttaaaatgcttgcctacatgcaaatgtgtttataaatatacttaaatgtttatgcatccatcctaacaatagtaataaaattagctaacatttataaagttatgttttatgtgccagccactgtattgtttggcaactcattaacttaacagtgaaataatatgaagagtttggggtattagtattaccctcatttttaaataaggaaattgagatgcagagaggttaagtaacttgtctaagaagtatcagaactgagattaaagccaagaagtctgattccagagtccattcttttaactgctaaagtatgggacctcaatgtatgggtagatatttttgtacacacgtgcactttcatatgtataaataaataggaatgagaaagataagaaagaaagaaccgattaggtgtgaaccttgcatgatgaaatgaatgattatctagatgggatttttcttaacatttttgtgctatgggcccttctggcaatctggtaagcttctggactcctcagaacaaaaatatatgtatatttttaagagctgaaatgcaatatagaggattacaaaggaaaccagttatattgaaatatcaaatatttttaagttgagacataacaatattctgccataattttttatgaatgtattaaatagcaaggtgttggggcaagtcttacagctatgataattttgaaatagcagtgagtgaaaatgatattttaacatacctgcacaaattataagttatagaaatattttataaaatctcaagtcctctcaaaatacagtatgtctcatgttattattattctcattttgcatgttaggacactgagactcagaagttgagaaatttagttgcacagttaataactggcaaagttgagcctcaaaccaaattatctgatgatgaatcctatgttctttccattgttcccatgttgtcactctataacaataagcagagattttttaatgacagcaaaatgccttcccaagattgtaacagtataaaatatgtaaagtaagaagtgggtgaaatcagatgaaataaatacatcttggatgccatgcaaatataacattttagaacaagcaaataagatacaaatagagactactcttgttacttgtattgggcattgtgttgctgtagctattgtgcggactagcacaactataactgcaagtgacagtcatttcctctaactgctagagttggcgctctggtttctgcacataccagcccattaaccatatgtactcttatgcttccacaagccttaaaataactgaatgcggtagagcagtggctttccagtcatgcttccagctcagctttctggactgtgttgagacagagcacaggcagaatgccagccacgttgagcaagcaccaattggtcatggattagaggccatctccacagttgccagaataattagcacaacacagcacagtagccagctgctttctatattaactgttcctgacaggaatgcaaatttaaatgcactgccatccagtgaatattagtttacatcataagctctacgtttgtacaacatgttacaattaccaaatatttccaaacaatacattgttttattggatcatcaaacaagttgcggtgtagattggacaagtattagctgaatgttataagtgaggaaactaaggaagagagtagggtggatagataaaggcacagacctcgctcagttactggccaggaagcccagaacctaatggtaccctcattattcagaaactagccatgaagccactgtccccctagagctactcaagacaggacctaagtgaggttgaatgctgctttttctaatcatttaggggatatatactttctttctttctttctttctttttttgagacagagtctcactctgtcacccaggctggagtgcagtggtgcaatctctgccttccgggttcaagtgattctcctgcttcagcctcccgagtacctgggaccacaggtacatgccaccatgctcagctaatttttgtatttttagtagagacagggttttgctatgttggccagactggtctcgaactcctgacctcaggtgatccacccgcctcagcctcccaaagtgctgggattacaggcatgagccaccacgcccagccgggggatatatactttcaatttcctcaaatagacaaattttgccttataggcacaaaatattggattgtggtgacataacccaataacatcttctcttctgggaaatacatatatcggttacaaagaaacaatgtatgtcagggaacaaagagaaggcttgaagtttccctgtatcttatataagacttaggaagatgacaggattgacctaaagttctgtgtccttgaaggtgagttgcctattaaccccatgatgctgactctgctttgaccctgaggagcctaatcaattaggacaggggtgttcaagcttttggctttcctgggtattggaagaagaattgtcttgggctacacataaaatacactaacactaacaatagctgatgagctaaaaaaaaaaaaaatcgcaaaaaaaaaaatctcataatgttttaagaaaaattataaatttgtgttgggcagcattaaaagccttcctgggctacatgtggcccacaggccacaggttggataagctcgagttaggattatcccagaatgtgagatggcctctgtttctcagcacttactcttgtgaccatagttcctaatcctctcctttactaaagcttctaaggaggaatgtctctctaggcagaaagtgtaaatgaattactgttatcttgctaatactagctactactatctttgcttaacctaacaagatgccagtagagactgccctttaatcatgaaagacaactagagactagtctcattatggcatattctctataagtatcactgactccagaaggactcaaactgataaaaggaacatgctcttatactacattttagttctgttaatgagtttcagtttaaataaatctttatctataaatacagtgatagaatctttggaatcttctagattagatattgaaggctctagtacaaagaatatactgttgtactacacagagtcttgtgcataagggcttctgttattatatgtgttgaatccaatgcaaaatttgcctccatcttcaaaaaagttctgaaaaagaatatctgcctcctctaggagttacacacaacctgaatacatctgtaaggctctttcaaatttccagagcaatgacctttcttgctttttaccagcgaagtaaattgctgaaaagctaggaagtctttctgggttccagcgtatccaagattaaaatatatgtcgaagtattgcaaactaaaacagtagcttagtttcatgcccaaaacaacccaggcatttatctggtgtcttttttgtttgtttgtttgtttgtttgtttgtttgttttagttttaattgatacatactaattgtatgtgtttatgggggtggagtgtgatgttataatacatgtatagattgtgtaatgatcaaatgatgatatttagcatatgcattaactcaaacatttatcatttctctgtggtgagagcattcaaaattctagctattttgaaatatgcaatacagtattgttaactatagtcaccctactgtgcaatagaacaccaaaacttattccttatatctaactgtacccattgacatttctagcattctattttccaaagaaaacactttcattttgtctattcacttcctccattagcacagttcaggccaagataccttggaagtaactggcttccctcttgttcaacccagatgtaattaccctcagctagtaagagatgaatacttgatgattatctgtaacaaaagtggcaacatttttttcacttacaatacatagctggagccatggcatcttttgtagttattgtttttaactaaaatttattgaggtatataatacagtaaatttcacccttgttcgtatacagttatttaattttgagaaatatataatcatgtgatcaccatgaccatcaagataaagaacaattctatcatgccccaaaatgttagaactgtgtccttttatagccagtttctccccacattccacatattccagtccctggtaaccactggtctgttttctgtctctatagttttaacttttccacaatcctatgccaatgtgtcacatgatatatatgccctttgaggcagatttctttcttttttttttttttttttttttttttttgagacagagtctcactttgtctcccaggctgaagagcagtggtacaatcatgactcactgcagcctcaacctcctaggctcaagcgatcctcccacctcagcctcctgagtagctgggactacaggcatgttccaccatgcccagctaagtgtgtgtgtgtgttttgtagagatggggttttgccatgttgcccaggctggtctcaaactccaggcttcaagggatcttccccccatcagcctcccaaagtgctgggattatgggcgtgagccactgtgcctggtgaagtggatttctttcacttgacataaggcatttgagaattttccatgttgttgagtggatcagtagttcattcctttttattagtgagctatattccattttatggatgtactgcagattattttctcattttgcagtttaaggacaattgggatgtttccagtgtttagcaattatgaataatgctgccgtaaatattcacatacaagtttttatattaacttaaactttcatgcttttatttctcctgagtaaacacttaagtgaaaaattattaggccataattattaggctacagttttaatagtagctataccattttgcatttctaccaacaatggctgagaattctattaatagttctacaactaggttctacatccttaacagcatttggtattgtgaagtttgcttttgattgttttcattttagccattctaatagatgtgcagtggtatcgcattataggttaagtttacatttccctgtgtgttaatgatgttgagagtcttttcatatgcttatttagtgaaatgtctattaaaaccttttggccaccgtttaatttctctttttttattttatttttattttatatatatatatttttattatactttaagttctagggtacatgtgcacaacgtgcaggtttgttacatatgtatacatgtgccatcttggtgtgctgcacccattaactcgtcatttacattaggtatatctcctaatgctatgcctcccccgtcccccgaccccacaacaggccccagtgtgtgatgttccccttcctgtgtccaagtgttctcattgttcagttcccacctatgagtgagaacatgcagtatttggttttttgtctttgctgagaatgatggtttccagcttcatccatgtccctacaaaggacatgaactcatcattttttatggctgcatagtattccatggtgtatatgtgccacattttcttaatccagtctgtcattattggacatttgggttggttccaagtctttgctattgtgagtagtgccacagtaaacatacattgtgcatgtgtctttatagcagcatgatttataatcctttgggtatacacccagtaatgggatggctgggtcaaatggtatttctagttctagatccctcaggaatcgccacactgtcttccacaatggttgaactagtttacagtcccaccaacagtgtaaaagtgttcctatttctccacatcctctccagcacctgttgtttcctgactttttaatgatcgccattctaactggtgtgagatgatatctcattgtggttttgatttgcatttctctgatggccagtggtgatgagcattttttcatgtgtctgttggcttttaatttcttttctttcttttttttcttttttttttttttgagacagggtcatactctgtcacctaagctggagtgcagtggtgcaatctcggctccctgcaacctccgcctcccgggtttaagtgattctcatgcctcagcctcctaagtagctgggattacagacatgagtccagccactgcacctggctaatttttatatttttagtagagatggggttttgccatgttgcctaggctggtctcaaactcctagactcaagcaatctacctgcctctgcctcccaaagtgctgggattacaggtgtgagcactgcacccagcctaagtttcattatccatcttattattctattgtaaaagtttttatttattctggaataaaaggccttatcaaatatgtgttttgcaaatatttcctcccaatttgtggctttttaaaaatttttcttaattgtgttttcaaacacaatttctttatttggatgaaatctaatttattaatttttatggattattcttttgtatcatatctaagaaatctctgcctaacacaaaatcaggaagattttcaccttcaattgcttctaaaagttttatatagttataggttttatttattttttatttttttaacaggctttattcactttatttttcttgtataaaaccctatgttgtagccacagctggagcctgagtccgctgcacggagactctggtgtgggtcttgacgagttggtcagtgaattcctgacagggagacttggtaaatacaatcttccagaggtcgggggtcaggtagctgtaggtcttagagatggcatcaaaggtggccttggcgaagttgcccagggtggcattgcagccccgggctgaggtgtagcagtcatcgataccagccatcatgagcagcttcttgggcacaggcgccgagacaatgccagtgcccctgggtgcagggatgaggcacaccagcacagagccgcagcggcctgtcaccttgcaagggacggtgtggggcttgccgatcttgttcccccagtagcctctgtgcacggggacaatggagagcttggccaggatgatggccttacggatggtggtggccacttccttggagcacttaacacccagaccgacgtggccgttgtagtccccgatagcaacaaacgctttgaacctggtgctctggccagcacgggtctgcttctgcaccggcgtaaccttcaaaatctcgtccttgagagaggcccccaggaaaaagtcaatgatctcagattcattaatgggcagggagaagagacagatttcctccagggacttgatcttcatgtccttgaccaagcggcccagcttggtgacgggcatgcactccttatcctcggccttgccttctcgagctccacggcctcagcccgggccccgtccacggccgcaaccccggccccggatgccactgcggaaacctccgcggaagccaccgcggttccccatcccagggccaccagggcctccggccccccgccccccccgcccacctcccgctgcaccggcgttatcagccatttggtgttttctcggagaagaagcagttataggttttagatttaagtttatgatacgttttgaggtaatttttatatatggtgctattatggactgaatatttgtattcctccaaaattcatatgtttgaaaccctaaccctcaatgtgatgatattaggaggcggggtctttgggagataatttaagtcatgagggtttagccctcgtgaatggaattaacacccttataaaaggaaccccagaaagctctcaagccctctttttcatgtgaggatatcagaagtcagcagtctgcaactcagaagagaggcctcaccagaacctgatcatgctggcatcctgatctcagacttctagcctccagaactgctaggcacaggtgcataccaccaagacagattttttctttttttttctttttttttttttttagatatggggtcttgctatgttggccatgctggtcttgaacccctggcctcacgtgatcctcctgcctcaacctcccaaagtgctgggattacaggcaggagtcaccattcccagccaatttttgttgttgttgttgttgttgagacagagtcttactttgttgcccaggctggagtgcaatggcaatatctcagctcactgcaacctccacctcccgggttcaagcgattctcttgcctcaacctcctgagtagctgggattacagacgcccgccaccacaccttgctaatttttgtatttttagtagaaacggggtttcaccatgttggccagactggtctcggactcctggcctcaagtgatccgcccgcctcagcctctcaaagtgctgggattacaggcatgagccaccacacccagccccaatttttgttttttataagcctcccagtctatggtactttgttacagcagcttgaactgactaacatacaaaatataggttgaaagctttgggtttatttttgtttttgtatatgtttttgtttttgtatatgaatgccaaatttttccagcaccatttattattattattatattattcactcctgttgcccaggctggagtgcagtggcatgatctcggctcactgcaacctctgcctcccaggttcaagcgattctcctgcctcagtctcctgagtagctagaattacaggtgcccaccaccacacctggctaatttctgtacttttagtagagatggggtttcaccatgttgaccaggctggcctcgaactcctgacctcaggtgatccacccaccttggcttcccaaagtgctcggattacaggcatgagccaccatgcctggtctttccagcaccatttatttaaaagattatctattggtttgcctttgcatctttgtcagagtcagttaatcatgtctgtgtgtgtctatttacatactctcaaatctgttctattggtctataagtctatttctttgccactaccacattctcttcattactgtgggtttacaatatgccttgatatcatacaatgtgagttcttcaactttgttctttttttcaaaacctttttattcttctacttcttttgccttttcataacaattttaaaactgcacattcatttctacaaagattgctctgggaagtttttaacaaattattcttagtagtaccttatagtggggattaattatgaatttaatttaattttttaataaagtactatattaggtttttattgctgtgtaacaaattaacacaaacttagcttacaaacaacaaacatttattacttcacagtttctgtatgtcaggaatctagacactgctcaagctgaggcttttgctcgtggtgtcacaagactgcagtcaaggcgtcagccagggctaaggtctcatctgagatttaggattctctccccactgcacattggcagaattcttttttttgagacagagtctcactctgtcacccaggctcgagtgcagtggtgcaatctcagcttcactgcaagctctgcctcccgggttcacgccattctcctgccgcaggctcccgagtagctgggactacaggcgcccgccaccacacctggctgatttttttgtattttttagtagcgatggggtttcaccatgttagccaggatgtctcaatctcctgatctggtgatctgcccacctcggcctcccaaagtgttgggattacaggcgtgagccgctgcacctggtccagaattcacttttttaaaggtacttaatatgtcaaccttattgtttctctatatgcacatttatttgttactgaaaattgaaaaaatagcatgttggaattttcttttaatataattcaaatttttaaaaaccagaaaatctaattagttatgctctaatcaaacttctcaatgttttcttttcattctttccccacaagttaccgtgcttcaaattccagatgttgggattcatctcactgacttaggttctaaaacatatgggagccctgtgtggtggcttatgcctgtaatcccagcacatgataataattcagacttattggtgctgctttgggttcaaattaaaaagtagagctaaagtatattcgagttattcaaatacattcaaacttacacagattccttataaattactgctatcaaggtaagaaggaaaagatacaagaagaaaaagacatcactcatgataggttattattggtatacagtctatcctagcatagactgctgcataaatttgccagcaagaaagaaaagtacaagaataaagtttatgactaaatcacctcattgtcataatttcctattctagcattctcagaaggatcccatctatgatacatgtagaaactgcagccacatttgaatggttcaattcttgattcattctgaaccctcttaggcccaatatttgttagctttcgtttaagctgagaaaaatctgttgagtaacaggtatctcagttttaccatcctttctttccacaaataacgatgtcctttttcctctcctcctgtaaggcaaaccatctctgatgtcctggaaggtctttgcttttctatcttgttgttggggtgaaccttctggtggaggggaagggaatttggtacctgggtggagaatcaagttatcaaggttctttattaacgttttggagcagaagttgtgagaggcctctgaatcatcctgggaatctttctttggtgagcatttgtgaagactttgggatcaaggtgcacatttgtgatgagtcgatcaatggtctagtcatagctctaagctccttctggatctttagtcccagcagaatgtgttgctgaactctcaaattgctacaaggtaccctggaaagaactatgtagcccagaaagagcctgaaaacctaaactccaacaaatagtgatgaacaagttgactacagtttttttttaacaattttaaaattcattgcagtttgcttctccaaggccagcaggaaagtgtctctgctgcttcaaatctctacaatttctacctcggacctctagacactcttttgaaagactcacctgattaggtgaaagcaacccaaactaatctctcttgattaacttgaagttaaatgattaagagacttaattacatttgcaaaatcccttcatatttgccacataacaaaatctaatcatgggagtgacatcatagtcctgcccacactcaagaggaagggatcatacggggcatgtataccaggggctggaagtcttggatgccatgttagaattatcctaccacaagtactgttgagagtatctatatcttaagtggactttgaaggagtatatcttccaaggaatttatccatttcacttaaattgtgagtttatagcatatgacattctcttatttgccttttaatatctgcaggctttgtagtgatgtcattcttgatactgggaatttgtgtctgctctgtttttaatgatcaatctgattagagatttattaatttaattttccaagaaacaacttttagcttcattgattttctctatttttttctgattttaatgtaattgctctctgttcttatttttcttatgtacttccttctgcttgttttgggttaaatttgctcttctgttttagtgttctaaggtagaagcatagataattgatttgaaactattcttctattctaattaaaagcattcattactatatatttccttctaagcttccctcatgtgtggtgcaagaaccttacaacaacatgtttttattcatttaattatgctttttaatttcccttgagattttctctttaacccatggattatcttaaatattttgttatttcttgttattattctgttattgatttctagtttaattacactgtcatctgataatacactttgtatgacttcacttctttaaatctgttagtattcattcatgacccagtatattgtatattttggtcaaggtcccatgggtgttttgaaagattgaatttctggctgtcattagatgaagtgttaaataaataccagttggatcctgttgctttatttttgtgttcagttcttctgtgtccttgctgattttcattttagtggttccagcaattattgagagaagagtgttgaagttaccaattataattgtgttttcaagtgtttctttctattctatcagtttttgctgcctgtatcttgaagctctgtgatttagtatgtatacatttaggaattttatgtattcttggtgaattgacccttttattgttatataatatctctatttgtttctggtaattgtcttttctctaaagtttaccttattagatattaatatacttaactccagctttcatttcattagtatttattatagttttgctaattctttgacttttaacctcctatgttattgtattttaagtgagtttctttttttttttttttttttttttttgagacagagtctcgctctgttgcccaggctggagtgcagtggcacgatttcggcttactgcaagctccgtctcccgggttcacgccattctcctgcctcagcctccaaggtggctgggactacaggcacctgccaccacacccagctaattttttctgttttttagtagagagggggtttcaccatgttagccaggatggtctcgatctcctgacctcatgattcgcccgccttggcctccaaaagtgctgggattacaggcgtgagccactgcgcccagcctaatcaagtcttcttttatatctcagcctttttattgatgtatttacatcatttacatttaatgtaattatgaatgttaagatttaagatttccaatttattgtgtagaacactgcatgttccttctatttttcattcctgtcctcctttccgtttcttgaatatttttagtattccattttaatttatatatggtagagctttttgtaatgctttattaagatataattcacatactatacaattcaaaatttaaagtatacaattgagtgattttgtgtattcagtgttggacaaacgtcaccacaaatgatattagaacactttcattatcccacagagaaacccttcaccctttggctgttactcttcaaatttgtgcccaacccccagtcctaggcaactactcatctactttctgtctctatagatatgccagtgccagatatttcacataaatataattatataatatgtggtattttttgactggcttcttttgcttagcataatgttttcaaggttcatccatgttgagcatatactagaccttcattccttttgctgagtaatattccactgtagagctatacaacattttgtttaaccattcgtcagttgatgaatagcttatggatacttgcattatttccaccttttggctctcatgaataatactgcaatggatatttgtgtaccagtttttgtgtggacatatgtcttcgtttctcttgggtacatacttgggattggaattgctgggtcaaatggttacttaatgttttgaggaacttccagaatattttccaaagtgactctaccattttagattcccaccagtagtatatgaggattttgatttctccatattctcattaatacttgttattatgtatattttttattataaccatcctagtgtatgtgaagtggtatcttatattgtggtttttgttctgttacccaggctggagtgcagtggtgcaatctcagctcactgcaacctccacctcctgggtttaagtgattctcatgcctcagcctcccaagtagctggtattacaggcatgtgccaccaccacacccggctaatttttgtatttttagtagagacgggtttttgccatgttggccaggctggtcttgaactctaggcctcaagtgatccgcccacctcagcctcccaaaatgttgggattataggcgtgagccaccctgctgggtctatgttgtgtttttaaataaatctctttgtatagtttgttttcattggaggttttttatttgtttctgagtgtgtgtgtgtgtgtgtgtgtgtgtgtgtgtgtgtgtatgattgttctaggtattagaatatgtatacttattttatcacagtctgtattttccactttgagtacaacatagaagccttatcactaattaggtccctttacccttctttttgatatagttatcttaaaaatcacctctacataaactgagaaccacatcatacagcaaggttatctttgctttcaatcatcgaaacataactctaaaaattaaagaggataagccaggcatgcactgtagccccagctactcaggaggctgaggcagggaggattgctttagcccaggagttcaagaccagcctgggcaacacagtgagaccctcattaaaaaaaaaaaaaaaactaaagaggttaaaaacagtctattatgtttctcacatatttacattctgcttctcttttttcattcctgatgttctatttgtttcatgagtgttcatagttggttgttggagcacttttttgagagttgttttaaaattcttgtcatataattctaatatatctgtgtcatcacagtgtcagtgcctgttgattatcttttcttgtttaaattaatattttccaaacttttgagttgtttcataattttggattatatctttgacattttctgtattatgagactctggatcctatttaaatatcttactttagtaaacggacaatctgtcaaggtttagaatgaacattctctttcaattttgtggttcaaatttcaagttagttttcagagatcttgcagggctcttctggtttgccccacctctgggctgctcaggcccatttagaaccaaggcaatgatctaactatagttcaattctcagagcttttgctatcttgattctgaccagtttcacacatgggctgctcaaaagtgtcctgactttttgtaccaatttaaagaattacttcctccaactttgtcctctccatattcctatctcctactctctaattggaaaggggtaaaatactacctcattgctatcctttgcttaattcggggcattgatagtttgacagggctcctcccaacggtctctatagtgtccagtggggaaaagaggtgcagtttcttttattgtatgtgttttgagtagagcatagtcaaatggttcactcagcagagttacctgcctcccagtctttttactagagagagtagacttctcttgagaactttggcatctgtgcaccttggtgtttctggattataggctactgtagcccataatgggaggcaaaagcaaacaagcaaacagaaaacgcttcagggaacttaccaccaggttgtctctcaagttccaaagttcctagtccaagatgccttcccttctctgcctgtcatttattttgccttttgccctggggattttagttgtaattagcaggaggatgaggatgctatgtacttgctctatcttgtcatcttgtctagaaagggaaatcaactgtgatttttttttttttttttttttgagatggagttttactctcgttgtccaggctggagtgcaatggcacaatcttagttcactacaacctccgcctcctgggtttaagcaattctcctgcctcaacctcccgagtagctgggattacaggcgcccgccaccacgcctggctaatttttgtatttttagcagagactgggtttcaccatgttggtcaggccggtcttgaacttctgacctcaagtgatctgcccaccttggcctcccagagtgctgggattacaggcgtgagccaccgcacccagcctgtaattcatttttgtatcactcataaaacataccacaatgcctagtgtacaattggcattaattaaatatttgtttcaaaagacaagagtgagtgagggaggaacataagtagctctgtatctcaaaatgttagttcagcataatatgattgagtcatcagtttaaattctagccccacctactttcagtgtgaacatagactggttacttaacttatttgagcctcagtttcctataatatgacaatggtaatatctacttcttaggacaagtaaaaataagatgatatacttaagcatttagcacaatgtttgataataaacagcgaatatagttcctacttatattagtaataacaattatcaaatatcactatctgtttcttatccttataggaaactctgctcttaaagacaaagaagatcagtttgggagaacaccacttatgtattgcgtgttggctgacagattggattgtgcagatgctcttctgaaggcaggagcagatgtgaataaaactgaccatagccagagaacagccctccatcttgcagcccagaaggtgagaagtaaaatttccttgaagagtaaatgttttgtgtgatgtctgctagttgattagtggaactatgcaatggacagataataaagaagtctcaaatgcatgactcataggttttatatattttctctaaaagctgtctttaagctgcagagagtaaaagcacagataactatcagcggctgcatttcaggttcctcaaacagtagaatttattctgtgatctaaagtttattgggaaaaaagtgatcaaatttatatatacaatgtgatgaaacaatgttaccaatctatgtatagggaaaaaataaagaccaaaaagaaatactcaaagatattaatagtggttgggtttaaatttggggaatatatatggaatttttttacttttcactgtttaaaattttttccttaatgagtattacttttactataaaaagttgaaatcccagcctgggcaacatagtgagaccccatctctacaaaaaattaaaaaattagctgggcatggtggcgcacacttgcagtcccagctacttgtggggctcaggtgggaggatcacttgagcctgggaggttgaggctgcagtgaactgagttcacatcactgtactccatcctgagtgacagggcaagaccctgtctctaaattaattaattaattaatttaatttaatttaaaaggttgaaatgtcgcttgaaatatgtggcattaagaagcataaaataaatttattttctgaatgtattttcaactttttaaaatctaaaactatgttgccaatattaatgatttcacatttttaaatgtattattaagagctcagatttttaagattaaacccatcaaacagataaaataggaagcttctacatttagttaaagacttattcacctaaaaactatttttcttccataaaattttggtccataaaatagatttccagtgcctggtatttttctttttgttattttagatttctgtattttttgaataaaaagcaattaaaatgagttagatccagcgggaactattagagttattttctatttaaaaatgtgaaccagatatagctaattaattaaggggttagaaaaatacctttcattagttgaatgcataaaaaaaggctgacattaagttatactactgaatatgctagttatatgcgcttctcagttaggtctgtcaggttattttcaaagttacttctcttgaatttggtttttattatagtaatttttttaaaaatctccctcattttcaatctcagttttaactacttctcgggtatttataacctttcacttaggcttgtcagctaatgaaattattcactcgagaaaggtaactccatttaacttgttatcataaaaaagcaaatagttcagattgggaaaagccgcaaaattaagactttgataccctttagatttttcattatgattgatttaggtgtaaaactcagcttcaaaaatgtagagtgaaggaacctagcttaacatcaagtagattatgtggagcaagtgaggatttcagttgatgatccaacagtataacatcctgtagaagtattatatgacaaagatggttgaaagaaggggaatgtacaaccagacatgttagctgtaatcttttcatcagataccatgcattgttttctttagtttttttgtttctactttgattttttaattataagtttttcatagtatcgaagaataaatagaactatgatttatgtggtggtatttacatagttggttttataacagatttcatgttctttcaagtatctgataattatgcatttccttccttactctgtgttgctgtttgtttttacatgcttgccaaaagcagtaatggatccgaattcccagaaaaggatagtaataattctttagtattctcctgtgtccaattaaatctgggtactgtgttagttcatttgtgctttatacaaagcaccagcattcagagatgaaatatagtatgcaccagtcaggaataagatagtaaatgatctacaaataattttcaaataatagttggagataatatgtcccaggcctgtaatactccttgcccccaaagagacacaagcacaaattctctttagagaaaacatcttcaccttaaacttccaagattttcccatattaaataaaccaaacgtgaactgacaatgaaagatcaccaaactcataagggaacaatctactatgaatgagagtcagcagaaacaacaaacagatttagtctatgaaaaacatcagggattggcatcattagagaaacaatataaaataaccactgatggaatgcttaaagatatgaaagaagaaatcagccaagcacagtggctcacacctgtaattttagcactttagaaaggccaggcaagaggctctcttgaggccaggagtttgagaccagccagggcaacatagagagactctatttatttaaaacaaaaaaaaattagctgggtgtagtggcccacacctgtagtcctagctccttgggaggctgaggcggaaggattgcttgagccctggagtttcagaccagcctgaacaacaaagtgagaccctgtctcaaaaaatatatattttatttaatattataattaaaagaaggaatctggcagggtgcagtggctcacacctgtaatcttaggactttgggaggccaaggtgggtggatcacttgaggccaggagtttgagaccagcctgggcaacatgacgaaaccctgtctctactaaaaacacacacacatacacacacacaaattagttgggcatggtcgtgagcacgtgtactcccagctacttgggaggctgaggtggaagggtcgcttgagcctgggaagtctgcagtgaggagagatcataccactgtatttcagcctgggggactggagtgagaccctgcctcaaaaaaaaatgtaaatacataaaaaaattttttaaaaaaacaaggaatcagaaaaataagaaaccaacaagacactttcataactaggcatcaattctggccataatggcttattttaaactaatttgcctgtcaaaaaaatctgtaaaaactgaataaaatactatatacattgtttgaaggcattgagaacaatcagcacaggcaggatctaagagactacaatcattcaaagaagagaaacacgtaaagtgagtaccacattcatcctggccttttcctttatgacattttccaaactggaatgcaaaagaatacaaccctaacaggaagcagcagccttaccaggctgaagaaactgaggcagagtttggagataatagtggctggaacttgaaagtcaaaatcctggagaggagggaattgcagagaaagaatgcaagaatctggatacaaattcctcacaagtttttaacagattcctaaactgtgcttgtatagggtggtgctctaagaaacctagtattaaacaacagctgggagactagacagctgagtagagattattttaaattatcctatattttcttttatgtttaaatctcttaatatataacacattgatttttgtatggggatccattctcattttaaagcatatggataactaattttcccaacacaacctagttcattaatttttggccatttagtatctgctctctgtcagttccaggcttttgtactacgaactccctatgcatttctgtttttttaaatgagggatcctgaatactagggagcctttgggaaatttgaaaataaaagttacatgatcagtgtattttagggggactaatatggcaactaaagctactttggaagagaaagagtggagatacatagattgctattatagttcaggccaatagagaggaattgggtttaagagatacattatggaggcagaagtgttcattcaacaagcgtttgttaaatatctactatgtaatcatgattatacaactagagagaatatgaaaaaaatgaattacgtatgttagcttatagatggatgctctcagtacccatccctattaatcgtcatttccctttgtttagtgaaccttctgatatattggatatcaaatatcctttccaagtattgtctgtcccacttaattctggtatccatgaatgcagaagtgtgctatttatgtaatcatgaacactcatgtatatgtgtataccttcattcattcaacatgtgttaaaactattatgtaacaggcatcatgttaggccttggaacacaaaggtgaacaacatgattcctgctcttaagttgcttacaaagatcatggatgaagatattaaatgataattaaagctgattgatctaccttgtaatacataagtgttttataaaatatctatagccataatagtcattgttattattgacatgagaagaccaaacattctcatacattatttattatgtttctagtttttgtgtgtgtgtgatagtgaactgtattatgttatcttttcttgggttcattagtgggaaaagctcatattcccaaagcattttgctcacatctctattagagccccattaccttatattgtaattattgcttacttgtctcttttctactaggctggagctccaggcaagtagctctttttgtttgtttttgaatctctctgaatctagtaagttctgacatgtcttggttgaatgaattttattttacttttatagaaagtcattactaatacaaatacgagaccttttgtttattggaaacatttatctactttaaaaatatatatgtttgtggaaaaacttattgaactgtgctgcttggcttagttattttggcacatgttcacttctctggaaacaaattactgttagtccaagaaactgaagaaatggtacccatgagaataaaattaatctcaatatactgaacatctgcacctaatttgtttttcatttagaaccatcagtttaatccaagaaagcaattggtcataccttttctgggcttctcacaaaagatatctaattgttagaaatgttttgctccagggaggctactatttctctgacttctactgatacatttgttaataaggataaaaaagctttagaaatattagtatatgttaatagttatgcatgtttaatcttccaggaggttatttatttggcttcaagaagcttaagactacccactttgacaaattatatcacagtaaacacaaaaattaaagaaccttctggttgtggctgcattgtcctttttttaaattcataaataattctcagttcatctatgaaaattgaatgtttattttcagttttcaaggtacgctgtttccatgttactgatttacaaaaaggagaaagaatacctctgaaacttttcaggaacacttataccaggtaacactattaggttttcttattttgcagatgcacacacaaacacaacaaacaatccacgccccagtccccttcagctctgtattccccctcagtacatatatagctctaccataactcatcaccacagtttattggagattttgtttatctaggtctcacgcccagtaaagctatttgaaggcagtgaccatgtcttatttgatttcatagttacagtcctagcatagcttctgccacttaataaagacagtaatttatttaaggaatacatgaatgaatgaatgaatgaatgaatgaatgaatgaatcagtaaatgtgaatatcaaatagatttaatatgaagggcatggccttcaagactgttgaaatttaaatgaataattatatttattccttttcactatccactccctgcccttacaattttgcaatcaggattttttaagattttctgtgagcttaatttcttaataaacaatgctcttgtatgcctcaatttcttcatctataaaatggaataatacatcctatcttctatgtagggatgatgagtccttagatataaagcattctgtttgttggagaaatttattctcaaggactacattatcaatattattgctattagtcacactacaatgtaggtgcaaacatcaaattactgtttagagatcagcagatgtcagagatagaaaggctctttgggatcttcttgtccaatttgtccttggatgaggaaactgaactctactccttttacatctcttctctttaaaaattactgtactcacattctctttgcctttgcatatgcctggaattttttttttttaattatcttaagcatagagataagaaagaacagggcctggtgccatggctcacgcctgtaatctcagcaatttgggaggatgaggcaggaggatcacctgaggtcaggaatttgagaccagcctggccaacatggtgaaaccccatctctactaaaaatacaaaacttagctgggcgtgatggtgcgtgcctataatcccagctactcaggaggctgaggcaggagaatcgcttgaacctgggaggcggaagttgcagtgagcggatattgcaccactgcactccagcctgggcaacagagtgagactccatctcaaaaaaacaaaaacaaacaaaaaacaatggagaactgagaaaacattaggtacctaatacctcgaagagatcaaactcagtatttcttatttttgcttcagaatttttaaacaaaactatagattcacttgaagtcttccatttatcttccaaaacccttctttccctgtctcctcagtctgtcttgattttgttggtttcaattcccatgcatatgtttctacctttactttatgtgtgtgtgtgtgtgtgtgtgtgtacatgtgcacatacactattatgggtaaaccatattattttgcatctttaaattaatggtattatactgtgtgacatttaccaacttgctttttcaacttaatattatgtatttgaaacttcttcatgttgaaacatgtagccctatttcataaaagattatatccagatgcctaaaagacacatgagatggtacacaacatcattactaattagaagcaaattaaaactccaatgagatactactacatgaccagtggaatgtataaagtaaaaaagtctggcaatcaatattgattgatggtgaagatatggagcaactggagctccccaacatttttgttgagaatgtatattggtacattcactctcgcaaactatctgactatatctgccaaagctacacacacacacacacacacacacacacacacacacacacatacacacatccctcatctcaattcatgctcccagccccggtaatacctaagaaaaataagtgcctctttctactagaagacatgtatgagaattacatgatagttttatttagaaaagcaaacattcctttttttaacttctatttttccataagttattgggggtaaaagtggtatttggttacatgagtaagttctctagtggagatttgtgagaacctggtacacccatcgcccgagcagtatatgccgcaccatatttgttgtcttttatcccttgcccccattccactcttccccccaagtccccaaagtccactgtatcattcttaggcctttgcatcctcatagcttagctcccacatatcagtgagaacatatgatgtttggttttccattcctgagttactttacttagaataatagtctctaatctcatccaggtcattgcaaatgctgttaattcattcctttttaaggctgagtagtattccattgtgtatatctatacaccagagtttctttatccactcgttgattgatgggcatttgggttggttccacaattttgctattgtgaattgtgctgctataaacatgtgtgagcaagtatctttttcgtatgatgacttcttttcctctgggtagataccgagtaatgggattgctggatcaaattgtagttctacttttagttccttaaggaatctccacactgttttccatagcggctgtactagtttacattcccaccagcagtgtagaagtgttccctgaacgccccatccatgccaacatctactgtttttttattctttgattatggccattcttacaggagtaaggtggtattgtgttgtggttttgatttgcatttccctgatcattagtgatgttgagcattttttcatgttttttggtcatttgtgtaacttctttataaaagcaaatattcttaatagtgcagacaacccaaatacgtaccaacaggtgaatgagtagctaaattgtgatgtattcctacaatggaacactgcatgaatgaactgctgacacgttcaaccacataagttaatttcatagacattatgttgagtggaacaagtcagacacttataaaaaatttatttgctgttcatatcaacctcaggaacaagaaaaactaatctatggtgagtcaaatcagatttgtggttacctaaaagatgggtaatatactgagaagaatatgaataagctttcaggggtgctgaaaatgttctggatcggtgtgtgtgttggttacattaaaaggtaccagtctgtatgcttaagatttatgcactttactgtatatgttatattctcaatttttaaagtattatttaaaaaatgataaaatgttcagaacttggtagacattatttgtagggaaggtaagggaggacggaaccaagaatggttcctgacctagactgttaagcactcaggtcaaatttcccccatccttagcctcaggagctatatgaaagccctgtgtctatgctcttatccaggggttcttagatgaacatgcagcagaatcacttggagaacttgttaaaacatagacgtctgggccccaccaccagtgtttttaattcagcagggctggtgtggggccagagaatgtgcttatctaacaagctcccaggtgatggtgatgatgtaggcaacacactttgagaatcactactctattctgcttataccatttgtctttgctgcattttcaatgctattggctccataacctctagatacctatcctgttttactggggactcttttgactggtattcctagctcttgatgacatgactcatagaggtaggatatactagtccaggtacaattttgagaggaagttatcgagttcagttgtgaaaaatggaattttaggcttcggtgataatgactagtatgaattgtgatagtttgcatctccaaagtaaggtcttggctggagttattagtatacatatagaaaccatagaagtagttgaagggctcaggtatggtttatagatgggaagaggactagaaatagaaaacaccaatatttaaggtttatttacagaaaataaacttacaaaggagacagtacaagataggagaagaactagatcagagtggtgttatggagccagagggacaggtttcaagcagaagaggatccatttgtttcatcttttttactatgatgctaagatttgaatagttccttttccactaaatgactcaataaatggatggatataaatatgataagaattaaaaggcttccactggatttttcagttagaaagtgaccttagcaagagcaatggtatttagtggacacacaagctagatatatatcactgttgagtaaacaggaaatgaggatatggagacagtacgagtgattgattaatggggttattgatcaggaaaagtatggacggaagaaattgtggtgggaaaatttttaataaataataatctctcccagtataaccgtcacccactttcaataaatattaattcataaacttgtttctgtagacttcaaactgttttattatatattctattatttcatccataaatatttcagtatatttataattcatatatccccacgatatcattgtaccaaaaagaaattagtgataattctgtaatattattaaatacctaatcagtgttcaaattttcctgattatatctcaaacatttttttacagttgatttattcaaatcaggacctaaacaaggtctatacattgtatttggttgataagtcttttaagtctcttgtaatctaatagatgagagatatttgaacacgtttaaatgttaaggaaaaggagacatcaaaaatttaggagaaagaatggattattgatggatcaaagtcgctggggagatgggaacagaaaggacagtcgggtctgggcacagtagctcacgcgtgtaatcccagtgctttgggaggctgaggtgggcagatcacctgaagtcagaagttcaagaccagcctggccaacatggtgaaaccccatctctaataaaaatacaaaaattagccaggtgtagtgacacacgcctgtaatcccagctgtgcgggaggctgaggcaggagaatcacttgaactcaggaagcagtggttgcagtgagccgtgatcgcgccactgtactccagcctggtcagcagagggagactccttctcaaaaaaaaaggacagacagttggaaagtttagatacacagtaggaaagtttgttcaatgaatgagtatgctatgaacttagaatgtatctgaatattcttgacaatcaattataaaatatgaaaactggaagggccttggaaattattcttattttacacatgggaaaacaaggagttctaggttttcttttgattagagggagatgttttgtccctaaagcaggggagactggataggaaaggaaaccttaggaatataggggaccactgctgctcctctcacacctccccagaccctaacacccttggttccattaaactcctaaacttgggcttcaggaacagaggaagtgagaaagctagtgtttaatgataacttgttttttcactgcataacaaggaccttgttattttctggtgctctgcagagtaaatatagcataatgaaaaagaaatggtatctggtatcagaatttataagatctatattcgagtcataattcaaagacatttggtactctgtgaccttgagcaggtagtttaactctctaagcctctgtaaaatggagataatatttctaacatacttacatcataagattgtaagtatgaaaatacattgaaatactgattgatgtgtatgccaaagaccctgaaaggcagcaaagttatacatagtgtttacaaatatatatgagtatgaaacatctgaaaaccatataaataatctcttttgcaaatataggtactttttccaattgtatttaaaagttgatgtgattaattgatgtgattaagaaaatggcatttcatttaaaattgtagctgaattcaattctcatattttttcaatgaaccaacaaatactaaatttaaacattaaggttctactgaattttttgtaggatttttttgctgttttttaactttaaaaagagttaaactttaaaagactgagagtcaacgtaataatatatgtgtataaagtgctttatttataagtaactttaattgagaataacagcaagtaggtatagccatctagtgactttaactttctttttaaaatatatgtaactcctcagccaggcatggtggctcatgtctgtaatcccaatactttgggaggctgaggcaggtggatcacctgaggtgaggagttcgagaccagcctggccaatgtggtgaaaccccatctctactaaaaatacaaaaattagctgggcgtggtggcacgtgcctataatcccagctactcgggaggctgaggcaggagaatcgcttgaacccagtgggtagaagttgcagtgagccgagatcgtgccattgcactccagctagggtgacaagagcgaaattccgtctcaaaaaaaaattttatatatatatatatccttatacatttaaccctcagagcaacatctttttattctttaattggaaacattagatttgagttgaagaaacattatcatatacttcaaccattaatgtttctgtacccagcttctaccctttccggctctgtcatttgctcaaacaaatctgtcttatttaaatcaaaagagttgcatataggcacttttgataaagagtctttaaccttgaaattttattgatttcgacttttgtttttaaattatttttattgatggtttccttttttttttttttttttcctttcaagagagagtctcgctctgtcacccaggctggagtgcagcagcacgatctcggctcactgcaacgtctgcctcctgggttcaagcgattctcctgcctcagtctccgaagtaacagggattacaggggcctgccaccacgcctggataatttttgtatttttagtagagatgggtttcaccatgttggtcaggctggtcttgaactcctgacctcaagcaatccacctgcctcagcctcccaaagtgctgggattacaggcgtgagccaccgcgcccggccttattgatggttttccttgtcaaaacattatttaatcaaaacagatgaaagcatgtagggagagatttcttttacaaacatattttgtgcttctttgttttatattatagggtacagaaatgacttatttgttgttgttgttttcatgatgcacaatgtgacctaatttacctaggcttactcttttctcagttctcgtacttctgtgtttctctgattcattgatatattgaccacttgttcatttcagaattttctctggactttgatactgcagtaacttatttttctgctactcctttgatagttcattgttttctttattaactcctttcctttaactcccatttctgccccaagataaaagtctttctatatattctacctttcagaggtctcatctacttctataagtttcggctattttccctcaaatatttgtctctagccctagcctctccccttattccagacttatatttccagctatcttctagaaatctctacctggatatcttcccaaaatctcaatttcagcatatctgaaacaagaccttaccttttaacctgtaatcagtcccgtcatctgatttttaaaaacaatttattgaggtgaaatacacatagcataaaattaaccctttttttgtggggggagatagagtctcactttgtcacccaggctggagtgcagtggtgtgatcagggctcactgcagcttcaacctcctggattcaagtgatcctcctgcctcagcccccaagtagctgggactataggcacgtaccactacgcccagctaatttttgtattttttatagagacaggggtttcgccttattgcctgggctggtctcaaactcctgagctcaagctatcagcccgccttggcccaccaaaatgttaggattacaggcatgagccaccgcacccagacaaaataaccactttaaagtgagcaattcagagaaattttgtacattcgttatgttgtgcaaccactacctctatctagttccaaagcatttccatcactctcaagtaaaaccacttatccattaaacagtttgtctccattgccctctctccctagcccctggcaaccaccagtatgcattctgtttctatggatttatagatatttcatgtaaaaaggaatcatatatgacctttgtttcatgcacgtctgtgtaaagagaccaccaaacaggctttgtgtgagcaacaaggctatttatttcacctgggtgcaggcgggctgagtctgaaaagagtcagtgaaggaagatggggtggagctgttttataagatttgggtaggtaaaggaaaattacagtcaaaggggggttgttctctggcgggcaggagtgggggtcacaaggtgctcagtaggggagcttttgagccaggatgagccaggagaaggaatttcacaagataatgtcatcagttaaggcaagaataggccattttcatttcttttgtggtggaatgtcatcagttaaggcaggaaccggccatctggatgtgtacgtgtaggtcacaggagatatgatggcttagcttgggctcagaggcctgacattcctgtcttcttatattaataagaaaaataaaacaaaatagtggtgaagtgttgggacagcgaaaattttgggggatggtacggagagataatgggcgatgtttcttagggctgcttcgagcggaattaggggcggtgtgggaacctagaatgggagagattaagctgaaggaagattttgtggtaaggggtgatattgtgggactgttaggagaaacgttcgtcatttagaattactggtgatggcctagatacggttttgtatgaattgaaaaactaaatggaataagagaaggagaaaaacaggtattaaaggactaagaattgggaggacctaggacatttaattagagagtgcctaaggaggttcagcatagttctgccagcaaagattatttatttacttcaagagttaagagtggcagtttggggatagctccaggagatatcagctgtgatggcttggagaaacagtgtaaaccagcagtgtaaacaagagcagggcatgtgtgagtagttgagaacagtgaataggagtatgattagacagaagatagtagggatgacaagttttttggggcacagtccaagttggtcttggaatgatactggggcctaataaaaaggagcatctatacaggagcttaaatgagctgtaccttgtaacattctgaggacaggcctgaattctgagaagggaaagtggtaaaagtattgtctagtcctttttaagttggtggctgagcttggtgaggtgtgtttttaaaagaccgttagtccattctacctttcctgaagactgaggaccgtaagggaaataaaggtttcactgaataccaagagcctgaaaaaatgcttggctgatttgactaataaaggccggtctgctatcagactgtatagaggtgggaaggccaaaccgaggaattatgtctaacagaagggaaaaaatgaccgcggtggccttctcagaccctgtaggaaaggcctctacccatccagtgaaagcgtctacctagactaagaggtattttagttttctgactcggggcacgtgagtaaagtcaacttgccagtcctgggcaggggcaaatctccgagcttgatatgtaggaaagggaggaggcctgaacaatccctgaggggtagtagaatagcaaatggaacactgagaagtgatttctttgaggatagatttccaggatggaaaggaaatgagaggttctaagagacgggctagcggcttgtaacctacatggaagaggttatgaaatgacgacagaatagaatgggcctgtgaggctggaaggagatattttccttggtctaagaaccatttgccttctgtgggaagagattgataggtggaagtttcagtgggggagtaggtgggagtgactgacgtgaaggagaaaaactggctgtgagggacagaagttggaatgctagctgcttgtctagccacctaatcagcgtaagcgtcgcctagagcaatgggatctgatgccttttgatgccccttgcagtgaatgactctagcttcctttggaagttaagcggcgttgagaagcgtttttattaaagagggattaatgatagaggacccttgtttagtgaggaaacttcttgcatggtggtgcacgatatgaaaggcatatttagagtcagtataaatattgacgcatagtccttttgcaagagtgagggcttgggttaaggcaactagttcggcttgctgagaggtagtggaggggggcagagcggtagcctcaatgatagatgtggaagatactatagcatagcctgcctttgctggtgagtggcatttaggcctggtggaactgccatcaataaaccaaatgtgattagggtgaggaacaggaaagaaggaaatacggggaaatggggtgaatgtcaggtggatcagagagatacagtcatgagggtcaggtgtggtatccagaataatgtgggaggccgggttgaagtccgtgccaggaacaatggtaattgtgggagactcaacaaagagtgaatatagctgaaggagccagggagcagagagtatatgcatcaggtatgaggaagaaaatagattttggaagttatgagaactgtagagagtcagttgagcatactttgtgatttttagggcctttaaaagtattaaggcagcggcagccgctgcatgcagacatgagggttgggttaaaacagtaaggtccagttgtttggacagaaaggctataggacgtggtcccagctcttgtgtaagaattctgaccttactaaccatgcctaggaaggaaaggagttgttgttttgtagaagggattggggtttgggagattagccggagacgataatcagggagagcacgtgtgtttttatgagaattatgctgagataggtaacagatgaggaagaaatttgggcttgactgaagtaatgggggctgtctgtgaagccttgcagcagtacagcctaagtaatttgctgagcctgatgggtgtcagggtcagtacaagtgaaagcgaagagaggctgggatgaagggtgcaaaggaatagcaaacaaagcatgtttgagatctagaacagaataatgggttgtggagggaggtattgaggataggagagtatatgggtttggcaccacggggtagataggcaaaacaatttggttgataaggcgcagatcctgaactaacctgtaagccttgtctggttttaggacaggtaaaatgggggaattgtaaggggagtttataggctttaaaaggccatgctgtagcaggcgagtaatagcaggctttaatccttttgaagcgtgctgtgggatgggatattgacattgagcagggtaagggtgattaggttttaatgggatggtaaggggtgcaggatcggtcactaaggagggagtaggggtgtcttatacttgtgggttaagatggggagatacaaggggaggatgtgaaggaggctttgaactgggggaaaaggcagcgatgaggtgtggctgtagcccaggaatagtcagggaagcagataatttagttaaagtgtcggcctaataagggaactgggcaggtggggataactaaaaaggagtgcttaaaagagtattgtctaagttggcaccagagttggggagttttaagaggtttagaagcctggccgtcagtacctgcaacagttatggaggcaagggaaacaggcccttgaaaagaaggtaatgtggagtgggtagcttccatatcgattaagaaggggacggacttaccttccactgtgagagttacctgaagctcggcgtccgtgatggtttagggggcttccgaggcgatcgggcagtgtcagtcttcagctgctaagccgagaagatctgggaaggagtcactcagagagccttgggccagagttctaggggctctgggagtggctgccaggtgagttgaacagtctgattttcagtggggtcctacacagatgggacacggcttaggaggaatcctgggctgcgggcattccttgtcccggtggccagatgtccggcacttgtagcaagcttcttggggaggaggttctggaggaactcctggctgctgtggttcaggtgtttggaagttcttgtgtgctggtgatgtggctgggatatgtctcacagtggaggcaaggaattgcaacttttttctattattgtacaccttgaaggcgaggttaattaagtcctgttgtggggtttcagggccggaatttaatttttggagctttatttaaagtcaggagctgactgggtaatcaaatgtatattgagaataagatggccttttgaccttttagggtctagggctgtaaagcgtctcagggttgctgccaaacgagccatgaactgggctgggtttttcatatttgatgaaaaagagcctaaaggctaactgatttgggagaggtcggataaagaaaaaggagcattaaccttgactatgcctttagctccagccactttcctaagaggaaattgctgggcaggtaggggagggctagtcgcggaacaaaactgtaagccagactgggtgtgaggaggggagatgatagaaggattatagggtggaggagctgaggctgaggaagaattgggacttagctcggcctggcgacaagcagcctggggaggaggggaaaggtcagatgggtctgtagaaaaggaagactggaaagactcagcgacgcttggggttgggactgaggggacagccaggagggaaagaaggaggattggggaggaatcacattgggaacagagactagggagggaacaacgtgtagaagaatgcctggacgtcaggcacctcagaccatttgcctattttacaacaagaattatctagatcttgtaggatggaaaaatcgaaagtgccgttttctgtctatttggaaccactgttgagtttgtattggggtcaagcggcattgtagaagaaaataagttgtttaggttttaggtcaagtgtgagttgaagaggttttaagttcttgagaacacaggctaagggagaagaaggaggaatggagggtggaaggttgcccatagtgaaggaagcaagcccagagaacagagtagagacacggagggaaggggtttgggggttcttaccttccagaaaagcaggaaaggggtcggggcatggagatataaggggttggggtgcagagataagaggtcagggcacagaaataagggatcagggcgcagagataagaggttggggcgtggaaataagggatggggtgcagagataagaagtcagggcatggaaataagggattggggtgcaaagataagaggtcagggcatggaattaagggatcggggcacagagataagaggttggggcatggaaataagggatcagggggttcttgccccctagaaaagtggtacttgccactaagggtgaaggagaaggggttggggggttcttgcccccctgaaaaagcagagaaggggtagagacacagagagaaggagttgggaggttcttgccccccagaaaagcagtacttgctgctaagggtgaaggaccaaggcaggcgtccccgtgtggtcagacacctctgaaacgtgggtgagtaatcaggcagtcgtccccacgtgattaaacaccaagggaagactgtcttccctagtctgtgaccagcgccggagttttgggtccacggataaaacgcgtctcctgtctctaccagaaaaggaaaggaactgaacttaagagaagggagagattgaagggtggtaccaagattgaaaggagaaagtggttgagggatagtgagagaggttggagaagagattaagaagaggcggcttacctgatttaaaattggtgagatgttccttgggctggtgggtctgaggacccgaggtcgtaggtggatctttttcacggagcaaagagcaggaggacaggggattgatctcccaagggaggtccccccgatccgagtcacagcaccaaatttcatgcgcatctgtgtaaagagaccaacaagcaggctttgtgtgagcagcaaggctgtttatttcacctgggtgcaggcgggctgagtctgaaaagagagtcagtgaaggaagatggggtggggccgttttgtaagatttgggtaggtaaaggaaaattacagtcaaaggggggttgttctctggcaggagtgggggtcacaaggtgctcagtaggggagcttttgagccaggatgagccaggagaaggaatttcacaagataatgtcatcagttaaggcaagaacaggccattttcatttcttttgtggtggaatgtcatcagttaaggcaggaaccagccatctggatgtgtacgtgcaggtcacaggagatatgatggcttagcttgggctcagaggcctgacactttgtgtctggctttttttcacttaggataatgtttttgaggttcatccaagctgtcacatgtatcagtacttcattcatttttatggttgaataatattttcttttataaaaccagtgacactatatttaattattaaattttttaaatgagtctagagtttaaaagacagtttgttaggtgaaattaagtgatttagaaaggaaagagaaaataacagaggtagtatattagaataagcttctagttgacaatatatagctaacatatggatgaataatattttctgttgtgtgtatataccgcaatttatttattccttcatccaagtgctgtttccactattgtgaatagtgcttccgtcaacgtaggtgtacatatacttgtttgagtacctgttttcaattccttcatttgattgtccttcatcaacttatggtactgtattcttttagtcactggagtttaaaaactgcatggcatgtagtaggtgctaaatatatgttggttgaatggatttattaaattaatgtgttgaattgttatcattctcttctttcccctttacctcttctgtctaatcacatgttaattcaattatagacttaactctgccacaaactgtataacattgggcaaaacacaactatatgcttagttttatatgcttagtcttctgtagacctctataggccctctacatactcagtcttctgtaaaatgactttcttgaaccacaaacataaagtcaaagacaacctgggaaatacatcttcacttacaacagagggcaaatatgaattgctccttggaattggtaagcaacctagagaaaaatcagcagtcagtttacattaaaagaaattcaaatgaccctcaagcatatgaaaatatgttcaaatatacgtataaaagtcatgcagattaaaactgtgctaaaatattttttctcacctattgcctcattgtgttggtgaggctgtggataaataagttttttcatactctgctcctgggatagttatctaaattgcaaatgcatataccctttgaccaggcaattccatttctggtaatttatcctaaaaataagcctgcacaagtgaaaaatgatatatatagaaggttttttatggcagcaatatttacaaaaacaaggttggaagcaacccaaatgcccatcaaaaggaatctggtttaaaaaatatggtacatttatacaatggaaaactagggaactgtgaaaagaatgacgatggtgtctattaaaatgaaaataccttcaagatgtattgttaagtgaataagagatgggttaaaaataagagtatgtaaaattaagactataaattgctaagaaaatttaaaaaataaacaaggccaggtgtcatggcttacacctgtaatcccagtaatttgggaggccaaaacagggggattgcttgaagccagaagtttgagaccagtctgggcaacaaagcaagaccctgtctctacaaaaaaaaaaaaaaaaaaaaatttagccggccatggcaacgtgcacctgtaatcccagcttctcaggaggttaagtccaggagtttgaggctgtagtgagctatgattgtgccactaccctctagcctggacaacagagtgagaccgtgtctctaaaaaaaacagaaataaaaaaccaaaaaggttaagaatataaaaactttctaaagacatataagaaactaataaaataatttatccagagtgagggtagaggaaggaatgatgcagactagagcagaagtaggagaaagcttttattatgtacctctttatattattttttgaaccatctgaatgcattttatgcaaaaattttaaggtaaaagtaaattattttaaaaatgatggcagcaaaaaggttaatagaaatagacatgtttgagcaagactgggaaatggcagaaaattccaagggaaagagatagacataaggtaacttcaagtttacaaaggatataatgccataggcaacaagcaccagacaaattactctagtgcaaagaaaagtaattaaactgtgcagcaacatttaaacagctgaagcataagtaaaatattagcacaggagaagaggcagtagaagaattagattttatgtttaacacattaaaatgaaaagattttaattaaagctgttatttaaagctacaaaaacattttaaatgaagaatatatattgtaaatcacatccattctttatatattctcgacctctacttcagtctttctataaaaccaacacatgtacattccatccatgtcaagaaaagtcattttttatcttagtgacttacatggtgcaacatatgtatgaaaacaactttagatctgggatttgactgtgttatgtaaatgaactaatattgttaaagtgacagtagaactcccataatcttgtctgaaggtaacagactgccatgtatcaaatattgtcattgtttttcttcaactctttttgttatataggtaagacatgttcactgtagcaaaaaaaaaaaaaatgggttttgtgccattactcataccttttgctttagttagttaaacattttcagtggatactactaggcatctctgtggctgtatccactcattagtccattttaaaacaatttaataagtgcccattctaccacaagctatgtagcgaatgggtatctgaagagtaagcaagtagtgatagtttatgagtttttgactgttggtatgcttccaaaagaaggcaccaaaagacatttgtgatgcccacattacttagaaatgtagggaaatcttagtatttgaaactcttatgtcctagaatcttaagaaacctctggattgagatggtgatgttaggcagctcttgcagttgacttcaatgctagctaggctactttctccaagcagtgagaaagtcctaaagagtcttgcttcattttattccaacttctggagtttttaaaccagcattgtttgtgttcttccatatgtagaaactatctctaaacctatcctctcattttccagtttagaaggtgctttcagatatttaggatcttattagttactttcaaattagtattccaatcaaaacgagttgaaataaaaacctgtctgtcctttaacactttgattatagtttatgtacttctatttacatgggtaaaatgtatagtcactaggaataacatgtcaacacatcttgattgaaatcgccactttgaatttttctatcatgtttctagtatgaaaaaaaacttcatttagcttcatagtagcttcatagcagttggaatagttgtatattatgtgttttctgtatacataaactgaactataatttgaaaaagttcttcaaggtcaccttgtcacttgcagagtgacaaattatcctgatttgctgattctcatcttagtgttcctgatactgctgcactgggagaaaatttacatactttcctaaagcttactttctcagacttcttgttcttctggccttgagtaattcccagatccagttttcctgtcaaacctccaaagaagtactgaagggtttctttctcataggtcagattcaggatttgaacccaaagcttctttctttaaatacactgttttttctttatcatacctctcaaacatagtagagcagccttgaagattttgttttaaaatctacatggctgtggaattttgttttaaatatgattatgtttcctacaatcatcttcattttctaatcatcttcatctcttctctgactcccatttttaccaagtcatgaaaatacaagcatctgctttccatgaatagatcagagatctcacaagcctagattcccatggaaaccaatcaaaaactaaaaggaaaagaaagagtatatattgaatttcgatgaaacctacagcttgtttttcattagactcatgctggtttcttttaaactctgggcacagggccagcaaatatttttatggctggtaaaaagggacttcaaatccatttactttcatttaaccgtttaaaaattaattttgtatataacatcaattctaaagaaaatttgagcattaattttctaattaccttatgtcatagggccattatttgtttatgtaatttcctcttcttgttttttctcctacccatagtttatgactcataaaaggatgagagggaatcaggatgattattattcctatagtgtgaatattgtcaacacttgggcacgacatttttcctatgaccaatcataggaccaataaaggaggtctctttgtacctcctttagctgttaagctttcacaaggtgcaaatgatcatttacaaatgtgacaacagatgataactaaaatgccaaagtgagggggattaagagaaccagagaggggatggctggggaggacaggttgtaattttaaattaagcaatcaaaatagtattcagtgagacaggttgtaattttaaattaagcaatcaaaatagtattcagtgagatggtgacatgtgaagcaagacttaaaggaggtgagaactttagccatgtgaacacctgagggaagagcattcattccaggcagaagaaacagtcagaacaaaggccttcagatgggagcatgcctagaatttttgcaaaataacaagaaaattagtataaattagtcttcatgcctttaatcccagcactttgggagaccaaggcgggagggtcacttgagcccaagagtttgagaccagcctggtcaacatagggagactccatctctacaaaaaaatttttaaaaattcgccaggcatggtggtgcatgcctgtggtcctagccactcaggaggctgagatgggagtatcacttgagtccaggaggttgaggctgcagtaagccataatcacaccactgcattccagcctggacaacagagtgagaccctgtctaaaaaaataataataaatatatatataccttataatgaatgagcaaaaggaaagcgctaagagatgaagaaagagaaagaatggtggcctgatcctgtagggccttataggccattgtcaagaatatgttttcactctgaatgagatgaggagggtttgaggaaagacgtgacatggtctgacttatgtatttataaaagaatcattctggccaagtgaagacattttcctccagttttagtactatctattccttcacccattcctcatataatatgctttcaagtttccttctcatcctgatcattttcaccagatatgcacatatttgtctaaattcccttgaaaatgtgatacctacaacagaatacaatgccagtctgatgagctcagagtgttacatgactataactgttgacattttagcaacaaaatacagctgattcatatttaagatttttcaaataaaaactctaaatctgctttatacttacaactgcctaaactacgtcctatattaatatggccgtggttgttggacccaaaggcagcatcttattgtatccatattttgaactttcccagacatacttaggtaaaattgaccattgtatcctttgttcctccagtaccttgtgtactcaaccactgttataccaccttttacactgaaatatatttatttgtttacatgttttatttctccacagatgatgaacatcttaatatgtaagagtgtcttagtcatcttatttccaatatctagtagtacttaacgacactcaatcaatgcttgctgaattgaattgggttcatcatgtaacctacccaggtcctcttgattcttgagtcggccattcagtatagttgtcatctctcccacttatgagtcaccaagattctcatcctaatctttgatattaaaatagatactgcttatagaaaaccttaatcattgaaacactagtactaaaataaacttcactaatttaaaaagttgttttattcatttattatacttgtctaaattatgtcgtcagtattaactcagcctcttgaaaaattttgtataatctatcagaatccacttgctcaccattccaattctgatgggtatgtcattcatttattcattcattcatttgttcaacagataaatttttagtatttaatatgtatcaggcattacactatatctcaaagtattttaaattcaacctttgtctaaatatgtggtctttcagattttataatagtaaaattaacatttcaccaatataactactcattttcaggcaatttattagacatatactcatagtttatcttaaacaattacagatttcagaagatatggtttgggtccttttattcaagtctttcctgtcactttgtcagtcatctcttttcaagccattttcttttaaggaatttgggctgaaatattagactgtactttgaagtaatgactgtaaacttcatgtatgtaactttggttatttcagtgttgtacagattgttaactaattgtgtgtgtgtgtgtgtgtgtgtgtgtacaggtgcacacaggtgcatgctttaaattgttatttaattggattataatgcttacacatattgtaaaatgttaaacataccaagaaggtttgcagtgaagaatctcggtgtaaggaaaactttctatctgcaagtcaaaatatagaagtgataggaaaaagactaataaatatggctacatagtgataagaaagactttttccttccagaaaatgtggcaagcaaagttaaaaaaaaaaaaagacaaattggaaacaatatttgcaaattatatcattatcaaaggtttaatactcctcatatataaggtggagaagaaaaagaccaatgatcctataaaaatgagtaagagtatatctagatagttcacagaaaaggaaatggcccttcaatatatgaaaatatgctcaatattgttcgtcataaaagaaatacaaattaaaatcacaaagagataacatgcttcatgtctcagattggcaaaactccaaaagtttgacaacatgttctgatggcaaaactgtagggaaatgagcattcacatatccctgaaggaaatggaaatggtttccttagcctgttttgtgttgcaataacagaataccacagactgggtaatttataaggaaggaaatttatttctcccaattctggagactgggaagtccaatatcaagttatcagcatctgctgagggacttcaagctgtgtcattccacagtggaaagcagaaggacaaaagagggcaagaacaagtgagggaaaagggggaccaaactcacttatatcaggaacctactcccatgaaaacagcagtaatccattcataagggcagagccccaatggcctaatcacctgttagggatcccacctcgatactgtcataacgatgattaaatttcaacatgaattttggagggacattcaaaccatagcattggtataacgcttatggagggaaacataacaatatccagcaaaattaaccagaatatgcatttacctttgatctgtcacttctgggaatctattctatacatatgtggtaaaaacaagaaatgtatacacagggttatttaattgcagcattatttgtagtagagaaagcttgaaagcaaatgcactttttttgttgtttttgtttttgagacaggatctcactctgttacccagactggagtgcagtggcacaatcatggctcactgcaatctcgacatttttgggcttagtgaatcatcccaccttaggctcctgagtagctgggattataggtgtgtgccaccacaaccgactaattttttttttttttttttttttttttttgtagagatgggttttcaccaagttgcccacactagtctcaaacttgggctcaagccatctgccctcttcagcctcccaaagtgctgggattacaggtgtgtccaccgtgccctgcctgcaaatgtacttttagagagctggctacataaaaagagtatattcacacaatggaatgctatgcatctgtaagaagtaatgagaaatgtttttatataacattataaaatgatctggaatgaaaaaagcaagcgcagaatattgtgtatgatattctctattttatatataactatgaagtgacctccaggtttattgttaagagaaaaaagtaaggtgctaaagagcatgtgtaaccttttttccaggaaagaggagaaaaatattttcttatatttttaaaagatagaagagtaaatgaaaaatgaatgaagactcttacctaaagggagaaggagataatgtagaggacacagggatcgaagctagtcttatctgagtatatcttgttctatagttttgattttggaacttcgtaaattatttccataattataaagtttaagtgtctacagcctggatgcagtggctcacgcctgtaatcccagcactttgggaggtcaaggtgggcggatcacttgaggtcaggagttcaagaccagcctggccaacatggtgaaaccccatctctactaaaaatacaaaaattagcagccaggcctggtggcacagtaatcctagctactcgggaggctgaggcacaagaattgcttgaacccgggaggcagaggttgcagagagccgagatagtgccattgcactccagcctgggcaacagagtgagactccatctcaaaaaaaaaaaaaagaaaatgagcagtccttaaagattgatagacaaataaaacaaagacacctgtgtattaagttggtagcttaactgcagagagaattattcaagtgaatttattattttttatttttattttttatattttgagatggagtctcgctctttcacccagggtggagtgtagtggtacaatcttggctcactgcatcctccacctcccaggatcaagtgattctcctgcctgcacctccctagtagctgggattacaggcacgcaccaccatgcccagctaattttttgtatttttagtagagatggggttttaccatgttggccaggctggtctcaaactcctgacctcaagtgatccacccaccttggcctcccaaagtgctgggattataggcgtcagccactgggcccagcccaagtgactttaaaacatagtaaatttgactctgcagtcctggtaggaaacatcctaaggacaaagacagctacaaagaaatcctaaaatgtgttcagtaaacatactgttagtaataatactgttactgttatcttgacacaacacaaataagtggatcactatataaaggtaagatgaagcaagtgaatatgtcaatttcattagtaaccaagattttcaataagaagtatacaaatataaactattgatatatgtgtctgctaaaaatttatatttctgaatttcatagcactagctactgaaaaagcctagaagtaatgactaaccccatgaaggatcacctccatcacccagattgtgtctctcaataccactaaaaggaatcagaactccttagagaagtggctgcttagaaattgggacaagtaatatatgaaatgagcctggctcatctggtcatgctggatggcaagatatctaacaaagcctactggagtcatgtcaaagggccacagaagccgtgttaaaggagcttccaaagatggacaatttgagtagcaaaaatacagttgcttcaatggaaacaaacatgttaaaactccatgagttaggaatactttttttttttttttttttttgagacagggtctcactctgtctctcagtctggagtgcagtggtgcggtctcggctcactgctacctctgtctcctgggttcaagcaattctccagcctaagcctcccaagtagctgggtttaaaagcatgagtcactgcacctggctattttttttgtatttttggtagagatggggttttgccatgttgcccaaagtggtctctaattcctgacctcaaatgatctgcctgcctcagcctcccaaggtgctagtgtatttaaaatacagttgtttttatgtgtttcagtttaacttcccctccttcccatccttattgatttaactttttcaaaagttgaaactacatgaaaagataggtttacaagtttcagtcacttccatgtcctgtctgtctcattttccctgtcttttgaggacaatcaactatattgatttctggtttacccttcatatgtttcatatatgtatgtttccttgttgcctctttttcttctaatatatgctcttgtgcttcagatagtattaagatttttaaaccagataaaaaaggaagaaaaaagcagtaaaagtttacatgttccttgactctagattctgtgactagaaatggaccttataaaccactcaaactaatatatatgtatatatacatatatatatatacacacacacacatatatatatagggatattcattcatcattgtttataatggcaaaatacaggtaaattattcattgttaaatataatctatttttcatacagtggaatactttttagccactttaaaaaattaatctatatgtactatcatggaaagatctccagggtatactgttaactgaaaaaaaagctagctgcagaagaatatgtatagtagaaacctgtttttataaataaataatttttaaaataaccacagttatacatatgtatcatatagattgcaaaaatttaaagaaatagtaaaaatttcttttttttctttttttttttttttgaggcagagtctcacactgttgcccaggctggagtgcagtggcacaatctcggctcactgcaagctccgcctcctgggttcacgccattctcctgcctcagcctcccaagtagctgggactacaggcgcctgccaccacgcctggctaattttttttgtatttttagtagagacggggtttcaccgtgttagccaggatggtctcgatctcctggcctcgtgatccgcccgcctcggcctcccaaagtgctgggattacagcgtgagccaccgtgcccggccaagaaatagcagaaatgtcttatagtggtattatgagaaaactcatagtttaaattataggaaaacattttcacaagaggcatgcattattttagtctgaaaaaagttcaaaaacagactttttaaaaattctaaattttattttgagccagactttcctgccacccttcaatggtgacaattccttgcaattcctgcagttccttacatgttttattttctttgaaatttaactgagtttcagatctttggcttcaaagaggagactaaatcctgttttccttcatttcccaaatcatttttcattatctcctacaacaaaatgctaccttttctgacacttttatggtctccttttaaatgtttctaatgcagaagaagcttacttgttctcaccacccatttgttaaatttattttcatatctcttagtatttcttaatgtggtgtatatcacagaacatttgtcactcaataagggcatagcatatccaatttttcattccagtttttattattctgccatctgtattgcttttatttgggaagtttcctatttgtaaagaatgatagtttttctttcctcttagtagatctatcttgtttatattctcatgtttagtgaagacctcataggatatattttagctgatcaggggaattctattatctcttttctgtagcataaatattacattccattcttaaaatattgatttgattggtaatgcaaaaagctttagcactccagaaaaaaatatattttcatttataactttcaatgacagagttcttattacacttcaattctctaagtatattgaataaagagtagagaattgttcttggagttggacctatattgattctagtccctgctcatttatttattagctctgtgacatttatctctttaattctgagtttcctcatctgaaaatgagaataataatgatacctatattaccacattcctatgagaatgaaatgaactggtgcccacaaacttcttacttagctcagttcctggcaccaaaatagtgcccagtgaatattaactattataattatcatctagtccatgctctggactaaatactttggggaatacaaaggtgagcaaagttaactctgatggagtagatgagctgtatttatgctatagtttgaatatttgtcccctccaaatcccgcgttgaaatttgatccccagtggttggaagaggggcctaatgggaggtgtttgggtcatgggagcagatctctcatgaatggcttggtgccagaggtaatgagtgaattctcgctctattagttcatgtgatagctggttgtttagaagagcctggcatccttccccgttctctctctccctctctctctcttgcctgctgtctaccatgtgacatagctgctgctccttcaccatcccccatgattagaagcttcctgaggtccttattagaagcagatactggcaccatgcatttagtagagcctgcagaaccataagccaaataaacctgttttttaaataaattgcccagcctccggtattcctttataaaaatacaaatggactaagacaatctacaaagaattcaagtataaggtagaatgcatatgtgctagagaagaatacaaacaaaatggtatggaaagatagaggaagggaatattcaatgagaagttttagggaaggtttcatgaaggagagagaatttgaactagatattgaaaaatcagaattaattttcaaaggcttggagataaatagtatattctgcagagataaccaagtaaatgacatacagatagtcaatggctctgagtggctctactagctacatctttttatgttaataggttttttacttttttcagagaaaattatatccagcatttttaatctttagactaataacaccaggtagacacaaagctattcctggaacattgctttattatagataggaattccataaccaattacctcctatttgctagaacacactaacacaaatacataaaaaatacagactaaactataatagaaggcagttttctctggtgtttgtagcacctctcttctactaatttaaaatatcttcatcactgaggatgcctcctattaaaatgttatatctgagttatactaataactatgaaattaccaggtgtctctgcttgagtagttggaattaatttttttgcctcataactctggagacttctcagaaagtgtagctaaaggtttattcatcaaaatccccttctaatgaatcgactctgatgattctgctgttgtcagaatggatgttctaggaagttgtcatcacacttgaccgtaatgaaaatgctgccctggaccatctccccaaactatgtgtcctcagtattgtgggaagaacccacttcatgatttctaaccagggtagcctctggaagtacaaatgattgctgtaaaattatgaacagagcagcatcaggctttgctctgatgtatcttatgaagcctttctacttccaaatgaagactatgaagagaaccttgaaacaatgcccttctgggagctcattcagcaagcatattctgagggcatattctgttccactctctacgcatggaggattcttgtggtgaggaagacattcttcattggttttaaagagctcaccatttagcacagtcagccgctgagacaggactgctagataactacagaggttatgcattgcaccatttgtacacctcgtacaaccctatgaggtagccctcagggttcaaatggaatgcatctatattttgaatacagagtgatatataataacaagaaatcctggatgtctaattgactgtcttcccaaacagcatagcagattacctttttagtctcatcatttatgtgcagattatgaaacacatttattagtcaatagagtcccttcctgcatttatacattctcctcataactcagttgttctacttcacttccataaggctgacttgcaagtctgaatttatagttgtgttctctttcctaaatttagttcagttatctccctccataatttacatttaaatatcccactgtaacctaaaacatagcttcctttgttaatttccccgttgttacgaagaaaagtattattcctcagtaatttgggctcaaaatattaccctaatctttgactccttctgtcttcctcagtcccaagacacatcaaaggctgatcaaagttagccgggcatggtggtgggcacctgtaaccccagctactcaggaggctgaggcaggagactcacttgaacccgggaggcggaggttgcagtgagctgagatcacaccactacactccagcctgggtgacagagtgagactctgtctcaaaaaaaaaaaaaaaaaaaaaagctctgttgatcttgtttgtcaatcatcccacatttattgttttcttcccattccctttactaccatttagtctaggcagttgtcttcttatgacaaaaatttcataaattggctgggcatggtgtaatcccagcacgcctgtaatcccagcactttgggaggccgagttggggggatcacctgcaataaggagtttcagaccagtctggccaacatggtgaaactctatctgtaccaaaaatacaaaaattagctgggtgtggtggtgggcacctgtaatcccagctattcgggagactgaggcaagataatcgcttaaactcaggagacgagatcgcaccactgcactccagcccagcctggacgacagagcaagacttccatctcaaaaaaaaaaaaaaaaaaaaaaaaaaaacctcataaattgagtgttgtgctccaaaagaatttgaatatgatctactttaattttgtcagtctgccagaagtgggccttataattcgttccttaggagaactcacgaaaggtaggaaattgaggaaatttgggtgttaggaaggttttgaagttagtttacaaagaacataattggagccccagtgactaagaccataatgctgttgagtggctggccagatggatggatggatggatggatggatggatgggtgggtggatgaacatcaattttctagaccttggggcagaaggttaggattggattgcaggagcaagacagaaaactgaattacattatctggtcaggcttcgcttaggttgatttaactcttgctaatctcactaatgagttagacttaaatcttgccttgattagagtcaaggtaagccccaaaactgaaggaaggagagcataccctacagatagagaacttcaactgggaaaattggaaggtcacaaggaccccagaagataattatcaatcccattcattgtttgtcaactaaaaaaacttcaaactaaaacctccagagtaataaacagttagacttcctgcaaggagcatctcacacagaagatagagcctggaagaaaaggctgggaactgacatgaagcaccatgtaggccacaaaaaggagccggaaataatagactaaatggtataataataagtaacgggctggtagcacaatcaactagagttcagaaatgcagtctatgctctaactgatttcctttcctgaaatatttcatatttgcttgggtggctctatagtcatttgggtccatcatggaaatttgtatcattaatacacattttctgttaatacgaataacataaaagtggcttagatgacaagcacatctattattttacacatcaagcagtcttacataacaagaggtaatatccagggttgattaactcagtggctcaatgatattagcaaggacctgggtttttaaatctttattctccgctgtaatcaggatgttggcttatactcttaagctagctttccttggagttaatttcaaggtggctgcctaaatttcaggcattgcatatagaccacaatatctagaagcagaaaaatcaaatacccgtatcttgtttatcttttcaacatggaaaatcttctcagaagccctgtggcagatgctctttccattcctttgattcccaggcctaatcctatcccttggcaaggaaaatgaaaacttcctgattgctatgtcattcaaagtcaccttggcgggcaccagtaatcccagctactcaggaggctgaggcagagaattgcttgaacctgggaggcggaggttgcagtgagccgagatcatgccactgcactccagcctgggtgacagagcaagactccatctcaaaaaaaaaaaaagtcaccttctgagtttggcaaggacccagccttctctgaaggacatatctacttaaaaggagaccaaccaatatcagggttctgttggcctaaaagcctagaagaggatgggcatatatattagccaggcaatccatggtgtcagccacaatgtctgttggacacttacagagccttgtgaacctaactactttcaaaagcaatggccataggctgtaggtcaccttcatggaattccatctagtggcattgccctttagctctaggctacaagaaaaccagctctacagactctttcttgccactggggtgaccctaacttttaccctaacttgatgttctttctatttttttttttttttttttagcaaatgtgcatatttcctcccaaatgctcccaaatgaggaaacagtcaaatcacttagctgttccagtaacaaacgcgggcaccacctcacatgttgttaccccacaaacttaactgagaagtgtagtgataaaaagcaatcatctagtctctgaattcagaatttaaaaagcaatgatctgaaaattgaaagaattcatttaataacaagatatttattgagcacctactaatcataaggtactgctctatatatgtgggatatagcagtgaacaaaacaaaacaaaaatccctgacttcaaagatcttacattttgttggtgggaaacaaaccaataaacaagcgaatacatttttaaagtatatattatatcagatggggatacatgctatggaaaaaaaataagacaggtgagggtgatagggagtgtagggatttgcaaatataaatagggtgatcagggtagacctcacttaagaaagtaatatttaagcaaatacttaaagattatgaaggaacaaacctttctgggagagaatatgccaagtgcaaggtccagaaatgggcacgtgctttgtatttacaagaaacagttagcaaggaggccactgtggctctagtcaagtaaggatgagttcagagatcacagaaggcctgtatgctatttaatgattctacttttacgctgcacaagagggtatggttattgaagtgtttgagcacagaaaatatgatctagcttatattttgaaaggttcattctaactgctgtgttgaggatggactgtcaaaggatgaaagcagaagagagactaattaggaagctgagagttgatgttggcttggaccagaatggtagtggcagaggtggttagaagtccaattttatttttttctaatttgtttattttaattgacaaaaattgtatatatttatgtgtacaacatgatgttttgaaatgtgtatacattctggattgactaaattaattatgaggtagtacatatgttaattatatataactacctcatatttatacatggtgtcaacacttaaaatctactctcttagcaattttcaagcacataatacattgttattaactctagtcaccgtgttgtagccaatattaaatatatcttgaattttctgcaaattatagatgtgaaaggaagagtcaatgactttgacactaagttttttttttaagcctcattttttaaaatgttttcttaaggagaacttcaaacatattcaaaaatagaatagtaaaatgaccctccatgtatcatcactcagcttcagtaattaccaggtcatgctaatcttatttcctgtattccttcattaacttctcctcttcccatgttaaagcaaatctcagatattgcagggatatcattatatcaatatgtatttctaagaggaaatgaccttttaaaatgtaatcatgatagtacttttcaaaaaatgtaacaagaatcacttaatatcatagtatcataaaatggccaattgatgttccaattaccattgtctcataaatgtcataaatgtttttgtttatttacacatgtttgaattggattccaaataagagctatatattgtgattggctgatatgtcaagtcttttttaatctatagtttcaccctccatctctctttgtttcttttggctttttctttttttttttttttttacaactttttggctattgtggcttaacccctgccctaacttgatgtcttagtctagactgattgcctcagtaagatgattctcccttcaggtgtgataaacctattcctcagtcctatgtatttcctgtaaattagctgttggatctaaagacttgatctgattattgttcaattttttttttcttttttaaatttctcatttttatgggtatttagtaggtatatgtatttatggggtacatgtaatgttttgatacaggcatacaatgtgtcatagtcatatcagggtaagtggggtatttatcacctcaagcatttatcattttttgttagaattactgttcaatttttggcaaactgttttattattatggtacattcattcttaggagggacataatgtttcactgtgtctgtttttatgatgttaacaattagtggtgctcagtgcctagagcccattgttcattaggagttgcaaaatgctgatactttaattctaccatctatcctacagttattagctggaataattcattaaagagaaacttccccatatctactattagattactcaatggtacagttcatataggaaaggaaggatgaatgcttgattctccctctttatttaccaatttttaaaataatgaattggtttcctggcatcctcctaggataatcaattaattttttttcatttttaatatcattatgaacaaggcctagaattttttagtatcattttaacatatttactatatcaatccattgaagttattatccttaattagtattcaaattactctgtttttggcctgtgggaggcctgtcaagtagacttcttgatccatttgacatgagcctagtatttgatagcttacttgctatctgctatgtccaaatattccagattcatttctatattttttgttttagacctggaatcagctatttctccaatagctttacttttagtaggaaaaagtatttggagaacacaatctaggatctagggtgctcactgctaccaggttggtgattgtttctaggcttttatagtggacagagcttgcggatttttttaagcaataaaaatatttcatcacttcctattctaattctgggctaaaaggttttaaacttaacctcttcttacatctctactccttttgctcacccagtcaagaatgatagaatatcacattgtctagatgaaaaacctgagatgcaagagcttgagtaatttatcattaaatggcagaaccagggttcaaatatgtatctgtttgactctaaagtctgtgcttaaagtcatctttagaaaatttgtgtttagccagagctcctttgggaagcctaggcaggatgaggggttgagcccaggagttcaagaccagccctggcaacataggaagaccccatctctacaaacaacaacaacaaaacaaaacaaaaactagccaggcatggtggtacatgcctgttgtcccagctactcaagaagctgaggtggaaggaccacttgagcctgggaggtcagggctgctgggagccgtgctcccaccactgtactctagcctgggcaagagaatgagaccttgtttaagaaaaaaaagaagccacagatcccttgctgcaaggcgtagcatttttagcagaactgccaggtagagaattcaattcaactaacacacactgagcacctattaatatttttatacaaagtcctgttcacctgtatgatactggtgtctattaacaaatttgatttgttgatttatctacaaacctagatttatccagaatgcaaccacttttctcaacattccctttaccaccactttggtcctagccaccatcatgttgggttagattattgtagtaaccttgcttggataattataatagtgtcctaactggtctcctggtttctgctcttgccccctgcagtctatgcccaacatatcaaccagaatgatcctttaaaacttaagtcaaagcatgtcagtcctctgctccagaccctttaaaggattttccagttgagcgcagtggcttacaccagcactttgggaaaccaaggcaggcagatcacttgaggttaggagttcaagaccagcctggccaacatggcgaaaccccatctctactaaaaatacaaaatttacccagatacggtggtgtgtgcctgtagtcccagctacaccagaggctggggtacaagaatcacttgaacctgggagttggagtttgcagtgagccaagatcactgcactccagcctgggtggcagagggagactctatctcaaaaaaaaaaaaagattttccatctcagagtaaaagactaagtatttcctgtgatctatcaagccttttatttcatgttctgaattctgttgtttgtatgaccttatttctaatcttccacatatttcctccacatacaccactctgacctcagtgctgttcctctagtaggtgagtcaagctctcaccacaggtttttgcatttgttcttccctctcctaggaatgctgttccagtaggaatctctgtgttgaactcccttgctttcattagtttcttattcaagtcactgtctcagtgaacccttttctggcaatcctatctaatacccacctcacctcacacattgtattctccctactctgctttatgtcttttcttagcacttaacactatctaaaatactatatattttacttatttatcttgcttattgtcttttgccccactataatataaactccctgaagttggggttttatttttggtctgtttattcactaatttatccccattgcctagaactagtagttggtgctcaaaaaatatttgttgaatgaatgagtgtacttctaaagttatagctttaataattctcccaggtgatccacgatttcttacatgatgcatatattgtgggcaaaaaacatactatgagattccagttgtctaatattagaatatttttaaaggaagaataatcctgttttgctatctttctttttcttatacaatccttcctccccaccccagcgactcctgcttgtacttcatagaatatttcctctcttggaactagatatttctttctcttttctttctttttttttcttctggttaaatagccacagactgtccatttgagctgactcttgctggaaagtgagtcagtgcagcctagtggagagcagaggctggagcatttgcatctccagaatgtttgtattgacaaatggcagtcagttattgacatttttatcccttggtgatacttcaattggcttatctttgctggtcaaatgccttaattgttctggcctttaattcagtcaaagttggagctagagcagaggggaaagagaaggagccagactaacagaacatcaagcttgagctgggaggctgctggcaacgatcagcctgtcataatgttatgatttgttcatttttataccatttattagcctttacttgttgtgccatttggcctccagggcagataaagtgctgtctaatttggtaggtttgcttctgtcagagcagcctcgacagggaaggtgttagctgcagtgacaaataatcaatagctgtcgttgtcatgaggaacgtgagcagttgggcctttcatctggaggattagaggtctaattggattgagaatagggagggtgggctgttgggtaaccctgtcagccttgtgaagctgtcaaatatcggccttattcatggtgaagggaataaggaaccttgtgctttcagaactgaggagaaaggcatgtgaaagccctttatacaaaggaatagctcctgaagttgattcagctaacatatgcttccttttaaacttaattaaatatccctttagataataaatctatggaactttaaatgacatttttaaggttggatgtgtaatatacacacacattcacatataacgctatacaaatccaggttggttcttttgtctttgctgatgccagaagataaaccacttgaatggaggtgaaaaatgaaactttatgagagaaattgcataagttgtcatctcattgtcagaattaacaagtgataagcatttttaatactattaatagaaaaaataagtgagacattaaactgatagattagttaataatgaagtatggatatgtgacagttatttttctcccctggtcatttagaaatgtggtttcctataaaacaaatctttcatttattccaacctgaactaatccaaaaaatgaagaattatgcattggctaaattacttcttcaaaggaatgcctaattttttcttccttagcaagtgacaggattgcatttaagtgatatcaatggtatcatgtccaactcagtcccaaaatgtttttgtatatccctacatacttacgctgtactcctttacatttatggtataatgccatcatttggagtatgaatggagaaggtatttgagaaaaatgagttagctcgttctctaatctatggagctcttaatactacctctgcaaggccaagtaaatgactttaaattccactaaatttcatagaaattgagcaaatttaataatgataaatgttaaacacaattttataaaaaaagtataaacttctttatgagtccattctctatgtacaaattaaattcagtgcattgctgttgtccaaaagcaggtataattttaaaaaatgtttttacaatgtggtaggtactaagagcatttgtaagcatcctctatacagtatatctttatgaaagccctgaataaaggtgagttgacagtaatgccaagagtatgtgaataggcatttctaacttatggattatatacttagtccatttctataaacccatggtcccttttctatagtcattcaaagcccagctaaccaatttgaaataacttcaaaaaatactccaaaagaactaaatgtgtgtacaaaagacactagatggatgaacctggttatctcattgggcccttcaaaccctgaggtccatactatttattaccattacaaatgtttcattaagttcttcctgatcagtgctggtttgaaaattctatgattttactcacttgtgtaatccacagtgaaggtcagcaaaattctcaatactactgactaagaatttagaattatggttatctaaagaacttgctttgcttgatctaaactagaaatatttaaaatttcaaacaattatttgtgattacagaaatttctcagatttcatgcagttcttctagagctctatctgtggaagtatagttgtgagtacatttatacttaagcagaattactcataggaaatggtaaggtcagccaaacacaatggctcacatctataatcccagcactctgggagaccaaggccagaggatcagttgagcccaggagtttgagaccagcctcagcaacatagtgagaccctgtctgtacaaaaaaaaaaaaaaaaaatttaaattagcagtcatgttggttcacagctgtggtcccagctacttgggaggctgagagggaggattgcttgagcctaggaggttgaggctgcagcaagctgtaatcacaccactgccctccagcttgggtgacagagcaagattctgtctcaaaaaaaaaataaaataaaaaaggaaatggtaagatcagatttgatatccttgcaaaagaagttcaaagtttaaataggtttaaataggtttgtgtttggggttttgatcagaacatactttctatgacctataaacaaaattgttgctcttgaggttagatgagaatattttgttgctttgtaactccttataatccttattattcactcaacaaatatttgtgcaaaagccactgtgctaagttatggaaatacaaccatgacagggactatcctgccctcagagaagttcatagtttaatggggacaacagacaagctaaatgggtaatgaaaatgtagtattcctgtgttaaatgctaggaaaggagtaagcctaggtatatcataggaaaatgtaagagaggcatctaagccatcctggggtgttgtggtgaagaatggcttccttcaatagatagcaactatgctaagtggagaggagaaaagagagaggaagcccattcccaaggagtattccctccattcccttggagtattctcaaggagggaaagaatatgtacagtcacatgccacataatgacattttgtttaacttcagaccacatatacaatggtggtcccatgagccgtcacacccagcctgttttttatctttcatagaatatttttactgtattttttctatgtttagatacgtttagacacatgaatacttaccattgtgttatatttacctagagtattcaatatagtaatatactgtacaggtttgtagtctaggagcatcaggttataccatatagcctaggtgtgtaataagttataacatctaggtttgtgtatactatgatgttcacactatgacaaaatcacctaatgatacattttgcagaacatattcccattgttaagcaacatatgactatagctcaatatgtatgtattattgactatgaggtagaaaacgtggagagatgatattggataagtaaagtgggatcagaccatgaagtgtctgtcctacatggaggacaataaataaatttgaatatttactgaagagttagatttaaaacttgaatattatttaaattggactaaatgaaagggatttgcaactaactcaccactgcccttctgatcaccaaattcatatacctttcctacttcctcatacctcttgacaaaattggtacattttaccttctttatgattttctccatgcatctctttcttttctctgatgtatatcaagtatatcattggcaaaagcattggactgatataaatcagaagacctagattcatgacttaggctctgcttctttctaacggtgattttaggcaagttttaagtttaaatactctggacttctgtttcctattttttaaatttgtggcaatacttaggttcttacaggagttaaataaattaatatatttgaaaggactctgtaaaacctttgattatgttaagggacacatagtctaaagagtcctgacttagatcacaaaatgataaggcccttgagcatgtaaaaaaaaaaatgtattcaagcagattgaagttaaaattaagaaatgtcaaccaaaacacttaggtaacagttctaagaataacattggacccttacttatgaatcttagcccttattatcccataattattcatgaacaaatttacccctgttattctatgagcttctagaatacagaatcctatcaaatttatctttatatcttcctacaatgccttgcacaaaataggtgctaaataaataccttcaaggaatgaaacaatgaattcttgtagagtcagaattcgttctggatacagtttaatatctaacatacttggatcattttgttttctatttttcagttttgtgaagatgtttaaaaatactactacttctctaaaatcttttatttttccaactttggaatctattaatgagatatagcatttaactcagcaagaaaggacagaagcttggtactggtctcatctacttggacaaggaaagctctaagagaagctggttacagaggttcagcaggaggggacattgagctgcacaaagattatagtttacctgtaatcaagggcagctattgttagcacaagatttaaaaacaagtagatagagagtcagataatacttgtgagtccactacaggtaggcagtggtcaacttgaaattctgtccaagagtaggagggttccaatcaccagcaagaatagagcttaagattgagtggctattcgacccagtgagtcagattattagttcaatagagtgaattggctgcatgggggaaaatatgaaagcccagtgataatcactagatttgaaatcactagataccaagtcccaggttataatagttggatggatggctcaaggtgtgtgctttcttagtggtcagtgcagggctaccattgtcttagaataacttagttagaaggatgaagatgattgagatggcctaagtacttctcacatcatcaagattgatacagcagtactcaaccatctagaaagccttttaaagtagcaatggcttttgaaaatggtgtagtagctcctattggatcagccctccagtagataacatttataaactctgaacaaaatataaaaacaactatctggaggaattgaagagtgaccaagtaggcagaaattgcattgtaatcagcccttggaagaccgtaagaagaggatagcactgggtgagtttccacttttataacagggcctactcagttcttcaaagaggatgaaaactgagtagaaatctgcattcttactttttgaagaatcaaaggacagcatttggggcaatggctgtaagtcagaagagatgtttcaggctgggtgcagtggctcacacctgtaatcccagcactttgggaggccaaggcaggtggatcacttgaggtagggagttcgagactagcctggccaacatggtgaaaccccgtctctactaaaaatacaaaaaattagctgggcatggtggtgcatgcctataatcccagctactcaggaggctgagacaggagaatcgcttgaacccgggaggcagaggttgcggtgagccaagatcatgtccttgcactccagcctgggagacagagtgagacttcatctcaaaaaagaagaaaaatgaaaaacagaagagattttccagaacagagaaattcatataagggaaggcctaacctctacatataaactgccaaaatctctgactaacccctaacctaaacatagatggggaaaaattcaggcagccaagctaaggctaaaataactcatcagcgatttagctgctgcctgcctatgcaggaaaaacataatttagagtttgggttcagccaaggtatctgcctgctaaaacaaaaaatgaatagtcttcagcataacataacagaatccagaatctttacaacacatcattttcagtgtctaagatattctcaaatattgctagacatgaggacaaacagtaaactgtgttccatactcatgagaaaaagtaacaatggagaacaactatctttgttgttccagattttaatgagcagacaaggaatttaaagcaggtcttttaactctgcttaaggatgcaaagaaaaatatgttcgtaatgaataaacagataggatgtcttgcagaaaaatagaaactctataaaaagaactaatggaaattctagaactgaaaactacaatatctaaagattcactagaagggcttatcagcagattggagatgaagagtcagtgaacttaaagatagatcaatagaaattaaccaatctttaaaaaaaaaaagaagcgaatatactaagaaaaaagtgagtctcagtgatttgtaggacaatattgaaagaccaaactgtttgtaattacaaagataggagagagagaatggggcagaaaaataattaagaaaatgatggccaaaaattgcccaaacttggtgaaagacatacatttaaatattcaagaaacgtaatgaactccaataagataaatacaaagaaaatcttggccaggcatggtagctcatgcctgtaatcctgcactttgggaggctgaggcaggcagaccacctgaggtcaggagttggagatcagcctggctaacatggtgaaaccccatctctactaaaaatacaaaattagctgggcatggtggtgcgtgcctgtaatcccagctactcgggaggctgaggcaggagaatcacttgaacccaggaggaggaggttgcagtgagccagaatcatgccactgcactccagcctgggcgacagagtgagatgctgtctccgaaaaaaagaaaatctcacctgaaaataccataatcaaattgctgaaaaccaaagatgaagagaaactcttaaaagcagccaaagggctgaactgagctggttgccttctgttactgtgggagaactcacttcatcccaacttcttcatactttcacttctggagctcatattcctctgacatcttccagaaaaacagtcttaaagccttagccttttttacagtccagctcttaaattttttcctcccctttttcaataataacatgagtgtgcatccagcttgtccccaaaacctgccttgctctgaagcatccaactgtaaagactctttgccaatgtctgtgatttgtgggcccaaaacaaactatccatccttgcatatatcttctgctgagatgcctcacacagagtctggacagctctaattctttcacgagtcccaaaggcagacaactcacttctgcagagaagagcaccgcaaaaaaggaagacaaagtcctggtcaagaaacagatgaccagaactgtgttctcttccacccagctgtgtgtactcagtgatagatttcagagacagaaatacctcagcctccagcagatgcaagaactttacagcatcctgaatcttagctacaaacaggttaagacttggttccagaaccagagaataaaatataagaggtggcagaaaaacagctgcccaaagaatagcaatggtgtgactccaaaggcctgagcacctacctaccccagcctctattcttcctgcctccaaggatgcttggcgaacatgtctgggaacctttcaatgcagagcaaccagacctgtagcagttcggcctggggcaaccagacctggaacatccagtcctagaacagccattcctgaacactcagacctggtgcacccaatcctggaacaatcaggcctggaacaatcccttctatagctgtggagaggaatctctgcaagtcctgcatgcggttccagcaaattcttctctcagtgacttggaggctgccttggaaactgctgaagaaagctacaatggaatacagcagaccactaggtattttagtactccacaaaccatagatttattcctaaactattccaagaacatgcagcctgaagatatgtaaagatgagtgaaactgatattactcaatttcagtctgggcactggctgaatccttcctctcccctcctgcctccctcataggattttacttgtttggaagctacatgttctgccttcatatctttgtttcctttatgcctatcaagtcgattttgtggagggtggggtatgattggagccaaatcagagagttttctttttttcctatgggatctttctggagaaaaaaggttttaataaccttggctgctaaggacaacatgatagaagctgtctctggctatagataagtagatataatactagtttgaatatctttaggatttagaacctagcgtcaagaataggaagtaaaagtacaaattgatgtggtgaaggtatagtcccattttctgggattgggggtctttgcttatttttatttttatttatttatttagagacggagtctcgcactgctgcctgggctagagtgcagtggtgcgatctcagctcactgcagcctccaccttccgggttgatgtgattctcctgcctcagcctcccaagtagctaggattacaggcacataccaccacacccagctattttgttgtatttttaatagacactgggtttcactatgttggccagactggtcttgaactcctgaccttgtgatccgcccgcctcagcctcccaaagtgctaggattacaccatgagccaccgtgcctggccttacttactgttaaaaacccaattattaaggtgaaggattaagctgtaacatacttcactgatttcatcagcccctttggctctgtgttttactatagcccctaattggttggttatgctaatatttatagacagcggtcttgtatttgctacatcacaatgacatcagtactagtttgcctggtttaagtacaaatgaataaaacaaccatatcacctttaaaaaaaaaaaaaagcagccaaagaaaaagacatgatgatgccctaaccaagggaaaccgtgaggcactgtgccatgagcaacggtgcattccggtccagatactacgcttttcccacaatctttgcaacccacagatcaggagattcccttgggtgcctacaccaccagggccctgggtttcaagcaaaaaaccgggcggccatttgggcagacaccaagctacctgtgggagtttttcttcataccccagtggtgcctgggaatgtcagcgagagagcaccattctctcccctggaaagggggctgaagtcagggagccaagtggtctagctcagcagatcccactcccacggagcccagcaagctaagatccactgactcgaaattcttgctgccatcacagcagtctgaagtcgacctgggacactctagcttggtggggggaggggcgtcccccattactgaggcttcagtaggcagttttcccctcacagtgtaaacaaagccaccaggaagctcaaactgggtggagctcaccacaattcagcaaagctactgcagccagactgcctctctagattcctcctctcttggcagggcatctctgaaagaaaggcagaagccccagtcaggggcttatagataaaactcccatctgcctgggacagagcacctgagggaaggggcagctgtggatgcatcttcagcagacttaaatgttcctgcctgctggctctgaagagagcagcagatctcccaacacagcgctcgagctctgctaagggaaagactgcctcttcaagtgggtccctgattccggtgcctcctgactgggagacacctcccagcaggggccgacagacacctcatacaggacagctctggcttgcatctggcaggtgcccctctggaacgaagcttccagaggaaggaacaggcagcaatctttgctgttctgcagtctttgctgcagatacctaggcaaacagggtctggagtggactttcatcaaactccagcaaacctgtagaataggggcctgactattagaaggaaaactaacaaaaataaaagaataacatcaacatcaacaaaaaggatgtgcacactgaaaccccatccaaaggtcaccaacatagaagaccaaaggtagataaatccatgaagatgaggaaaaaccaatgcaaaaagcctgaaaattccaaaaaccagaacacctcttcttctgcaaaggatcacaactcctcaccagcaagggaacaaaactggacagagaatgagtttgatgaattgacagaagtaggcttcagaaggtgggcaataataaactcctctgagctttttctgtaaaggagcatgttctaacccaatgcaagaaagctaagaaccttgaaaaaaggttagaggaattgctaactagaataaccagtttagagaagaacataaataacctgatggagctaaaaaaacacagcaggagaactttgtgaagcacacgcaagtatcaatagctgaatcaatcaaatcgaagaaagaatatcagagactgaagatcaacttaatgaaataaagtgtgaagacaagattagagaaaaaaagaatgaaaaggaatgcacaaagactccaagaaatataggactatgtgaaaagaccaaatctatgtttgattggtgtacctgaaagtgacggggagaatggaaccaaattggaaaacactcttcaggatattatccgggagaactttccccacctagcaagagaccaacattcaaattcaggaaatactgagaacaccactaggatactcctcaagaagaggaactccaagaaacataatcgtcagattcaccaagagtgaaatgaagggaaaaatgttaagggcagccagagagaaaggtcaggttacccacaagggaagcccatcagactaacggtggatctctctacagaaaccctacaagccagaagagagtgagggtcaatattcaacattcttgaagaaaagaattttcaacacagaatttcatatccagccaaactaagcttcataagcgaaggagaaataaaatcctttacagagaagcaaatgcagagagattttgtcaccaccaggcctggcttacaagagttcctgaaggaggcactaactatggaaaggaaaaactggttgcagccactgcaaaaacataccaaattgtaaagaccatcgacactgtgaagaaactgcatcaacgaataggcaaaataaccaggtagcatcacaatgacaggatcaaattcacagataacgatattaaccttaaatgtaaatggtctaaatgccccaattaaaagacacagactggcaaattggataaagagtcaagacccattggtgtgctgtaattcaggagacccatctcacgtgcaaagacacacacaggctgaaaataaagggatagaggaatatttaccaagcaaatggaaagcaaaaaaaaaaagcaggggttgcaatcctagtctctgataaaacagactttaaaccaacaaagatcaaaaaagacaaacaagggcattacataatggtaaaggaatcaatgcaacaagaagagctaaatatcctaaatatatatgcacccaatacagaaccacccagattcataaagcaagttctcagagacctacaaagagacttaggctcccacacaataataataggagacttgaacaccccactgtcaatattagaaagatcaatgcaacagaaaattaacaagaatattcaggacttgaactcagctctggaccaaggagacctaataaacatctacagaactctccaccccatatcaacagaatatacattcttctcagtaccacattgcacttattctaaaattgaccacataattggaagtaaaacactcctcagcaaatgcaaaagaatggaaatcgtaacagtctctcagaccacagtgcaatcaaattggaactcaggattaagaaactcactcagaaccacacaactacatggaaactgaacaacctgctcctgaatgactactgggtaaataatgaaattaaggtagaaataaataagttccttgaaaccaataagagcaaagacacaacgtgctagaatctctgggacacagctaaagcagtgtttagagggaaatttatagcactaaatgcccacaggagaaagtgggaaagatctaaaatcgacaccctaacatcacaattaaaagaactagagaagcaagagcaaacaaattcagaagacaagaaataactaagatcagagcagaactaaaggagatagagacacgaaaaacccttcaaaaaatcaagaatccaggagctggtttttttttaaaagattaacaacaggtagaccaccacccagactaataaagaagaaaagagaaaagaataaaatagacacaataaaaaatgataaaggggatataaccactgatcccacagaaatacagactaccatcagagaataccagaaacacctctacgcaaataaactagaaaatctagaagaaattggtaaattcctggacacatacaccctcctaagactaaaccaggaagaagtcgaatccctgaatagaccaataacaagttctgaaattgaggcagtaattaatagcctagcaacctccaaaaacccaggaccagacagattcacagttgaattctaccagaggtacagaaaggagctggtaccattccttctgaaaccattccaatcaatagaaaaagagggactcctccctacctcattttatgaggccagcatcatcctgacaccaaaacctggcagagacacaacaaaaaaagaaaatttcaggccaatatccctgatgaacattgatgtgaaaatcctcaataaaatactggctaactgaatccagcagcacatcaaaaagcttatccaccatgatcaagtcagcttcacccctgggatgcaaggctggttcaacatacacaaatcaataaacataatccatcacataaacagaaccaatgacaaaaccacatgattatctcaatagatgcagaaaaggccttcaataaaattcaacaccccttcatgctaaaaactctcaaaaaactaggtaatgatggaatgtatctcaaaataataagacctacttatgacaaacccacagccaatgtcatactgaatgggcaaaaactggaagcattccctttgaaaactggcacatgacaaggatgccctctctcaccactcctgtattggaagttctggccagggcaatcaggcaaaagaaagaaataaagggtattcaaataggaagagaggaagccaaattgtttctgtttgcagatgacatgattgtatatttagaaaatcccatcatctcaacccaaaatctccttaagctgataagcaacttcagcaaagtctcgggatacaaaatcaatgtgcaaaactcccaagcattcctatacaccaataatagacaaacagctaaatcatgagtgaactcctattcacaattgctacaaagagaataaaatacctaggaatacaactatcaagtgatgtgaaagacctcttcaaggagagctataaaccactgctcaaagaaataagagatgacacaaacaaatagaaaaacattccatactcatagataggaagaatcaatatgatgaaaatggccatactgcccaaagcaatttatagattcagtgctatccccatcaagctaccattgactttcttcacagaattagaaaaaactactttaaatttcgtatggaaccaaaaaagagcccatatagccaagacaatcctaagcaaaaagaacaaagctggagacatcatgctacctgacttcgaactacactacaagcctacagtaaccaaaacagcatgattctggtaccaaaacagagatatagaccaatggaacagaatagaggcctcagaaataacccaacacatctacaaccatctaatctttgacaaacctgacaaaaacaagcaatggggaaaggattccctatttaataaatggtgttgggaaaatggctagccatatgcagaaaactgaaactggaccccttccttacaccttatacaaaaattaactcaagatggattaaagacttaaacgtaagacctaaaaccataaaaacgctagaagaaaacctagacaataccattcaggacagaggcatgggcaaagatttcatgactaaaacaccaaaagcaatggcaacaaaagccaaaattgacaagtgggatctaattaaactaaagagctttggcacagcaaaagacactatcagcagagtgaacaggcaacctataaaatgggaggaaatgtttgcaatctatccatctgacaaagggctaatatccagaatgtacaaggaacttaaacttacaagaaaaaaacaaccccatcaaaaagtgggcgaagtatataaacagacacgtctcaaaaaacagacactgtcttcaaaagacgacattattgcggccaacaaacacatgaaaaaaagctcatcatcactagtcattagagaaatgcaaattaaaaccacaacgagataccaccatctcatgccagttagaatggcgatcattaaaaagtcaggaaacaacaggtgctggagaggatgtggagaaataggaatgcttttacactattggtggagtgtaaattagttcaacctttgtgaagacagtgtggcgattcctcaaggatctagaaccagaaatactatttaacccagtaatcccattactggatatatgcccaaaggattataaatcattctacgataaagacacatgcacacatatgtttattgcagcactattcacaataagacttggaaccaacccaaatgcccatcagtgatagactggataaagaaaatgtggcacatatacaccatggaatactatgcagccataaaaaggatgagttcatgtcctttccagggacatggattaaactggaaaccatcattctcagcaaactaacacaggaacagaaaaccaaacaccgcatgttctcactcataaatgggagttgaacaatgagaacacatggatacagggaggggaacatcacatactggggcctgccgggggatgaggggtaagaggaggcatagcattaggagaaatacctaatgtagatgacaggttgatgggtgcaacaaaccaccatggcacgtgtatacctatgtaaccaacctgcacgttctgcacatgtatctcaaaatttaaagtataattaaaaaaagaaaagacatgatccaatatagtaaagcatgaatacaggtgacaacatactcttcagtatcaataggcacatgcagacagtaaaataatcgctttaaaatgctgaaaggaaaaactgtcaatctagaattctgtatctggtaaaactatctttccagaataaaactgaaataaggacaaacaaaactaagataatttatcccaaacaaacctatattaaaagaaataatggtcgggcacagtggcttacgcctgtaatcccagcactttgggagactgaggagggcagatcacctgagctcagcatttcaagactgccctgggcaacatggtgaaacctcgtctctactaaaatacaaaacattagctgggtgtggtgatgcgcctgtagtcccagctactcgggaggctgaggcatgagaattgcttgagtccaggaggcagaggttgcagtgagccgagatcgcgccactgtactccagcctgggcaacagagtgaaactctgtttcagggaaaaaaaaaaaaaaaaaaaaaagcaccagaaaagataaataggtagctaaagataaacaattattttttcttaatttctttaaaattaatattgctatttaaagcaaaaattataaaactattatggaatttatagtaaatataggtataatacatatatatgatatctacagcataaagtatggggtggggataatgcaactatacaattgcaagggtcttgcattttgtataaagtgatacaacattaactctaaatagactttgtaaagttatggatatgaactataatacttggaggaaatactaaaataataatgcaatgaagtatcgctttttttaattcaagagaaaaaattttaaaggaattcttaaaaattgcttgagtttcacttcccaagattctaattcaattggtctgaggtagaaaccagacagtaatgctttttaaaagctcctcacctgattctaatatgtttaaaatgccagtgttgggaatgtttctagcagtgctaaatcaaagttattggatgtagttgtataagagagaagtatatgttgcatgtaacagagagtatatgttgctggaaaaccatgcagatcaccagagcactgttttacctcactgaaaagcattagttcctgtgaatccatagaccacttgcttcgtgttgatgacaaagtcctcaccattttgtaaaaaaatgaagaaaagatcattgtagtatttaacatatataggtttgtgtagtatttaacatataggtttgtgcatgtctgtgcacctatagtctgtatgtaataagtctgtcttcctgttactacagttcttgaaaatagttgggtggccttttgctacattgggaagacatatttagaataatatgacttcgtatataggctacatggtatacaaaaaaatgcatgtgggggaaagtaaggggagcactcaaagagatctttcagagcatctcaagcagagattcaataagaggcctatttaagaggtcattggaagggagatgccataattcttaaagacattgcatgcaggaaaaaacagtgattttgaatatttgccacaaatggaaaatgacaggagtagatactcaagttacaattaatttgtgatcctttgctataaagctatttcttacctgggcaattctgtgtaatgcatgccatagatttattgattgtcagttattaatgattttcctcaggcacgaaagatgtaaatagatgttggtgaaaagctaccagctgtcctttcaggaaggacagtcctttatttcctttttgagggcttacacttttttatgaaataatgttgataatagatttactttttaaaatgaacttagattgcaaaaatgtaaactttatactgtcatctttatatttgttccaataatattttttaatgattattattattgagttaaaatgtgcatacaagaatgtacagaaaaatatacaattagatatgtgtaataaatgtacctactcacatcaccaccaccacagtcaggacataaaacatttaggcaacaccagaaagttccttttttccccactttcaaccagtcaccacctccatggttaacaccattatgatttttaacacaaaagattagttttacctgttcttgaagtttttataaatagaattttttttttgctgtctacaagagaaacacttcattttgtatatgcatagaaatatatatatatatatatatatatatatatatatatatatattcattttagtagcttttatagtgcaagtggtttttggttacatggatgaattgtgtagtggtgaagtctaagattttagtgcacccatcacctgaatagtgtatgttgtacccaatatgtagctttttattcctctgcccactctcacccttcccctttctgagtccccaaagtacattatatcactctgtatgcctttgcataaccatagcttagcttccacttataagtgagaacatacagtatttgatgttccattcctgagttgcttcacttagaataatggcctcctccatccaagttgctacaaggacattatttcttcctttttatggctgagtagtatgccattgtatatatgttccacattttcttcatctgctcatcagttgatgggcacttaggttgattccatatctttgcaactgtgaattgtgctgcaatatacatatgcatgcagatgtctttttaatgacttactttcctcggggtaaatacccagtagtagaattgctggatcaaatgggtcaaatggtagatctacttttagttccttgagaaatcttcacgttgttttccatacaggttgtactaattttttttttctttgagatggagtttcactccgtcacccaggctggagtgcagtagcgcaatctcagctcactgcatccttcacctcccgggttttaaacaattctctgcctcagccccctcagtagctgggattacaggcacccaccaccacgcctggctaattttttttgtatttttagtagagacggggtttcaccatcttggccaggctgattttgaactcctgacatcatgatccacccacctcagcctcccaaagtgctgggattacaggcatgaatgaccaaccgagcccagccaggttgtactaatttacattcctgccagcagcatataaagtgttcccctttcaccccattcatgccaacatctcttgttttttgactgtttaataatggctgttctggctgggctatggtgatattatctcattgtggttttaatttgcatttcctgatgattagtgatgtttagcattttttccagatgttggccatttgtatatcttttttgagatgtctattcatgtcatttgcttactttttaatgggattatttgggttttttccttgctgatttgagtttcttgtggattctggttattagttctttgtcagatgcatagcttagaaatatgttcttccattttgtgggttgtctgtttactctgaaaattatttttttcactgagcagaagctttttatttttattaggtctcatttatttttgtttttgttaaatttgctttggggggtcttagtcataaatttttgcctagactattgtctggaagagttttccctaggttttcttcaagaatttttatggtttcaggtcttagatttcagtcattcatccatcttgagttgatttttgtatatggtgagagatagggatccagtttcttttttctacatgtgcgtatccagttttcccagcatcttttattgaatagggtgttttttccccaatttatgtttttgtatgctttgtcaaagatcagttgtaagtatttgactttatttctgggttctctattctgttccattggtctgtacatctattttcataccagtaccatgttgttttaattactatagccttgtaatataatttgaaggcaggtaattgtgatgcctccagatttgttctttttgctgaggattgctttggctgtccagactcttttttggttctatatgaattttaggattgttacttattctgtgaaaaatgatgttggtatttttatcagaattacattgaatctgtagattgctttgggcagtatggtcatttttacaatactgatgcttccagtcaatgagcgtgggatgtgtttccatttgtttgtatcatctatgatttctttttttttttttttttttgagacaaagtctcactctgtcacccaggctggagggcagtggcgtgatctcagctcaccacaacctccgcctcccaggttcaagcgattctcctgcctcagcctcctgagtagctgggattacagatgtgtgccaccacacccagctaatttttgtatttttagtacggatgaggtttcaccatgttggccaggctggtctcaaactcctaagctcaggtgatgcacagcctcccaaagtgctgggattataggcgtgagccactgcatccagcctcatctatgatttctttcagcagtgttttatagttcatcttgtagagatctttcatctttctggttaagtatattcccagttttttgttttgttttggtggtggtgttgttttgcagctatttcaaaagggatttagttcatgatttgatgctctgcatggtcactgttggtgtatagcagtgctactaatttgtgtacattgattttgtaacctgagatataattggattcatttatcaaatctaggattcttttggaggagtctttagggttttgtaggtgtacaatcatatcattggcaaagagagatagtttgaccttctcatttccaatttggatgtcctttctttctttctcgtgctgattgctctggttaggacttccagtactatgctgaatagaaatgatgaaagtgggcatccttgtcttgttccggttcttccagggaatgctttctaattttccccattcattaagatattggttgtgggtttgtcatatgtggcttccttctatacttagacggaacatacctcaaaataataatgtgttgagggtttttttataaagaaatgctagattttattgaatgctttttctgtgtctattgagatgattgtatgttttttatttttaattccatttatgtgatgaatcgtacttattgacttgcaaatgttaaagcatccctgcagccctggatgaaacccagggtgaattatctttttgatatgctgttggattcagtttgctggtattttgctgagggtttttgcatccatgttcatcagggctattggtctgtagtttctttcttttttttttttttttgtccgttagatcctttcctggtcttggtatcagggtgatactggctttgtagaatgagatagggaggattacctctttctcaatcttttggaatagtttcagtaatattgataccaatttttctttgaatatctggtagaatttggctgtgaatccatctgaccttgggcgttttttgttgttgttgttggcaatttttaaaattactgagtcaatctcattgcttgttattggtttgttcaggatttctgtttcttcctaattgaagatggggggctgtgtatttccaggaatttatccatttcctctagatttcctactttgtgtgcatagaggtgttcacagtagtctcaaatgatcttttgtatatctgtgatgtctttttgtatttctgtgttacagatattgctgtagtgtctccacgttcatttctaatggaacttatttgcatcttctttttttttttttttttttttggttaatatagctaatggtctatcaatcttgtttaccttgtcaaaaacacaggtttttgtttcattggttcttttatattgtttatgtttgtttgtttcaatttcatttgattctgctctgatctttgttatttcttttcttttgctagtttgggtttttgtttgttcttgtttctttacttccttgaagtgtgacaataggttgtcaatttgtgatctttcagactttttgatttaggcatttagtgctaaaaactttcctcttactactgcttttgctgtatctcggaggctttaataactgtgtcactattattcatttcaaagaattttttaatttccatcttgatttcattgttaactcagaaataattcaggagaaaattgtttaattttcattacttgtataattctgagaggtccttttggagttgatttctagtttttctccactatggtctgaaaagatacttgtttaccttattgatacttgattatctttgatatgattttgaattttaaaaatttagtgagacttattttgttgcctatcatgtgttctatcttggagaatgttccatttgctgataagaagtatgtgtattcttttttcttttatttatttatttgtttgtttttttttaatagacgggggtcttgccatgtcggccaggttggtcttgaactcctggtttcaagcaatctgcctgcctcaccctcccaaagtgctaggattacaggcgtgagccactgtgcccagcaaagtatggggtagaattttctgtattggttaggtccatttgttgtagagtgcagtttaagtcctgtgtttctttgttgactttctgcctggatgatctgtctagtgctgtcagtggagtgttgaagtcccccactattattgtgtttctgtccaactctgggagctccagagttaggtgcatatatatttaggattgtaatatcttcttgttggattgatccttttatcactatataatgactttctttgtctttttttcttttaaccattgttgctttaaagtctgttttgttaacatcagaatagctactcttgcctgcttttggtttccatttgcttggaatatctgtttccaccctttaccttgagtctgtaagaatctttacatgttaagtgagtctcttgaatacagcagatatttggtttgtaatttttcaaccattctgtcagtggaggatatagaccatttacatttaacgttaatattgagatgtgaagtactatttcagtcatcattgttgactgttaacctactttgttttcttcatgtgttattgttttataggctctgagttttatgctttcaagatgttctattctggtgcatattgaccttttgtttcaagatttagagctccttttagtatttcttgtagagctggtctagtagtgacaaattctctcagtatttgctcatccgaaaaaaaactttttttctccttcatttatgaaacttagttttgctggatacaaaattcttggctgacaattattctgttgaaggaggctaaagataggaccctaatcctttctggcttgtaaagtttctgctgagaaggctgttgttggtctaataagttttcctttataggttacctgatgcttttgtcttactgctcttagaattctttccttcatgttgattttagataccctgataattatatgccttggtgatgtcctttttgttttcttttttttttcttctgagacagagtctcactctgttacccaggctggaatgcagtggcatgatcatggctcactgcagccttgacctcctgggctcaagcaatcctcccaccttagcctcctgagtagctgggactataggcatatgccaccacatcaggctaattttttaattttttatagagatgggttctctctatgttgcccaagctggtctcaaactcctggtctcaagtagtcctcccacctcggcctcccgaagtggtattacaggcattagctactgggtccagctggtgatatcctttttgtaatgaatctcccaggagttctttcagtttctcgtgtttggttatctaaatctctagcaaggtcagggaagttctccttaattattccctcagataagttttccaaattttttgtttgtcttctccctcaggaacactagtgattctttggtttggcaattttacataatcccatatgttttggagactttattcatttcttttaattatattttctttactcttgtctgattgggttaattcaaaagctttgtctccaagctctgaaatttttcttctactagttctagtctattgttaaaactttcctgtgcattttttaattctctaaatgtgtctttcattttcaaaagttctgattggtttttctttaaaatatccatctctagaaaatttatcactcatatcctgaattatttttttaacttcactatgttggttttcacctttctcttgcatctccttgagtagcttaacaatcaaccttttgggttctttatctggtatttcaaagatttcatcttggtttggatccattgctggagagttagtgtgatcttttgtgggtactgtagaaccctgttttgtcatattgtcagaattatttttctggttccttctcacttgggtagactatttcttctagtatttttgaatttatttttcattcaactgtgttttttaatttttttattcccccttaaggatgtaactttaatgtttacagtttattatagcccaatttggctcttgatgatttccggtgtgaagactctgagttccttggttatagagaatctttgtctgatggctttctcagatgctgtttgtagtagcaaggtgcttggtgtgtgagcaggttcactgtcttaagttttccatctggctcacagggtagaccgcagcccaccatttctttcagagggtctgtgatttctgtcagttttcctgttaagttcctgtgttgcttcttgaacaaaagttcacagtatgactctctacacactcttttgtctttccaagtaggggaggcatgctaacaatgctttcagtccaccatcttggggaaaaaagagtgtgtgtgtgtgtgtgtgtgtgtgtgtgtgtgtgtaaatggaataatgcagtatgtattcttctgtgtctaggatctttcactcaatatttttgagatttatccatattgttgcacatatcatagcttattctttctctgttgctgaattatattctgttgcacaaatatatcataatttgtttatacattcatgggatgatggacatttgggttggttacagtctttagctattatgagagaatcttatgaataaactgaaaaaattaacactcttgtacaagtctttttgtggacatttgtactcatcaaataaatacctaaaagtgcaatgatctttaatagtgcctgcatattttttgctttagtagatactgcctaatggttttccaaaatgttgctaccactttacactctgaccaacaacacagtatgtgagagtttcagatgccatatatcttgggcaatatttcgttttgtcagtccttttactttgagcatttctagtgtgtttctcatttttgttttaatttgcatttacctaatgactgatgaagttgagtaattttcatatgcttaataataatttatatattttcttttgtgaagttgtgtgctcaagtcctttacccatttttttctgtattatttttagatgctactacaataagacactaaccaaagtttttaaataagatttcagattagattacctatgataccaatgtcttttttttttttttttctgatacaggattttactctgtcacccacactgaagtgcagtggtagaagcatagctcactgcagccttgaactcctgagttaagcattcctcccacctcagcctcctgagtagctggtactacaggcatgtgccaccatacccagctaatttttaaaatttttttgtagagatggggtgtcgctatgttgcccaggctggtcttatactgctggccatgaacaattctcccaccttggctgcccaaagtgctgggattacatgcatcagtcattgcgcccagtcagcaatatattttgattgattttttaaatctcttttgcacagattctttataaaaattttgcaaaaatatacataacatgaaatttgccattttaaccatttttgagtatactattcagtggcattaagcacattcacagcattgtgccaccatccccactattccttctgcgtatttagtattttcttgaatgtaattgatatgtaacaaattacatatatctcagatgtgtaatttgataagttgtaccatatttacacatcttcaaaagtttcctcatgaccatttgttatcctttcttcaaaccactctctgcctccaccctccctccccaagcaaccagtgatctgttttctgtcacaacagattgatttgcattttcaagaattttatgtaagtgaaatcatataaaactattctttttgcctagcttctttcactcagtataattattttgaaattcattcatgttattattgcatataccaatgatttatatattatcattgttcagtattattctattgtatggatatattacaaattgttctcaagctcctggtctcaagtgatcctcctgactcagcctcctaaagtgctgggattgcaggcatgaacaaggtaaaagtttcaagtttacaggcgtaagcaacagcacctagccttggatacactacagattgtttaaccatttgcctgttggtgaacatttgggttgttttctgttttgggctattactaatgaagatggtaagaacattcatctgtaagcatatgctttcatttctcttgggtaaatcattataaatgtaatggctgggtcatatagcaggtgtacgtttaacttttaagaaaatggtgaacagttttccaaagtgcttgtactattttactttcccactgatagtgaatgaaagttctatttcctccataccctcactttcttatgaggatactttgtatagtcagtctttttcatttgagccattctaaataaagccatttattccatttaggtttgtagtggtattaatttgcatttctctaatgacaaatgatgctgagatcttttcgtgtgcttgtcatttgtaggtctttgatctttttgcattgatcttgtttctgcaaacttgctaaagttcttcattcattctattagtcgtttcatagattttttagtctcctacataaacaatcgtcttatatataaattaaaatgagggttttttttttcaaatctttatgcccttctttcctcccttctttcctttcttccttcttttctttttttcagccttatttaactggctaacacctccattacaaatttaaatagaagtgattagagtagacatccttgccttatttctgatcttaggaagaaagcatgtagtatttcaccactaaacatgaaattaacttcaatttttaaaagatgtccttgagctaaagaatacaggaataacaaatgtagggggaagctactacctctgaggcttagggagagtatccaagggaggagcaaacttggaagctgagattcaggcctggtaggaatgagtgtggctgtgcccctggttggtgaagttcactggaatgccaagggccagagctagagagctggggctgatgagcagaaagttgcccactggggtagtggtgaaacttactggaatgtgagacccactgagtctcctatagacctccgacatctgcatcataggagcaaaaagagcacattggaaccagtgtgaagagccccttcctctgctattatttgtagtgtccctgctgcgcctgctacagataaagtcaaatattgtggcaactgcaaaggagaaattttcacagggtctagtctcacaaaacatggtaaagaagctgatttggagctgagaggcaaaaaactgataaatgatacactgattgaggaaactttcttttgattctagttcgctgagaatttaaaccaagagttggtgttgaatattgtcaaatgccttttctacatctattggaattatcatatagttgttgttctttatttattttgctcattatatcaattgtttaaaaaaatatatagagatggagtctcactgtgttgcccaggctacacttgaactcctaggctcaagcaatactcccacctcagcctctcgagtagctgggactacaggcacacaccccaccacacgcaacacatcaattgatttttttttttgagacgggagtctcgctttgttgctcaagctggagtgcagtgatgtgatctcggctcactgcagcctccaccttccaggttcaagcaattctcctggctcagcctcctgagtagttgggactacagctccgcaccaccacacctggctaatttttgtatttttagtagatacagcattccaccatgttggccaggctagtctcgaactcctaacctcaagtgatctgccctccttggcctcccaaaatgctgggattacaggcgtgagccaccacacctggccacatcaattgattttaaaatgtgaaaccaaccttgcacttctgggattaagtcctactttttatgtattgctcaatttaatttgctaatacattaaggatttttgcaacagtgttaaaaggaatattggtctatagtttagttgttttttttcttcttataatgtctttgtcaggttttcctatcaggatttgcagacttcataaaataagctgggaaactgtcttatcttcttctattatttataaagttgagtaagactggtaagattggaattatttatttcttaacttttttgtagaatttaccagtgaaaccatctagtcttgctggagttttttcttttcgatttggtaggaaggtgttttggcaacaaacctactttcttttatagatttagacttttcagattttatttcttcttacctccattttagtatgctgtctttttcaatgatttctccaaggcccctcaggaagaaatttagaacaaaaagtgatggtcagaattcagtcctcaattctcctttgtctgaggcctgtgtgatagctgttggcatttttcgtctggtgggagtttctgataaacaactcaagaacatatgttaagatgttatcttttagtttccatgggacatcagaataccttgtgactctggcttgcttcggaaactgtttttactaccttcttgcttatcaggttgctcatttacttttcaaggctagctgggtgcctggactttcccttgaagggactcaaaatggttcctttatttccatgctgaggggggcccagcaggtccctgaaaggggtcgctgttctatctcaatctttttctagcttcttatgctggaatcttaggtcaatgattttatataatcattattatgataaaattattataaaatattatatataatatataaatatattatttataattacctaattgtatacatagttttcttaaatacatataattatttaagcctgtgaaattttcctaaccactgctttagctgcaactcacaagttttgctatgttgcattttcttcaagtttgaaattctgaggggagaaaacacacttcacctgtttgggtttttttctgctctctcactcgacacaaaatcaacacagaagacttcagtgaccaaatatatggagacctctccaccagcaagcaagcagtcagttctgtagcagacacccagctggatatcccctaattcaattctaacactatctacccagagatggtatcagataccacagattgaagtctcagtgtccagactgcctcatgcttcagacaccagttacaagtcaaggccccctgaacttctgaccaaaccagcttcaagttggggttcctacaactccctgtctagtttcaattactttgctagagtggctcacataactcagggaaacatgtttactagtttattacaaaggatatattaaaagatacaaataaacagctggttgaagagatacatggtctgggtaccatagctcatgcctacaatcccagcactttgggaggttgaggcgagaggatcccttgatcccaggagttcaagaccagcctgggcaacattgcaaaacactgactctatcaaaataaataaataaaatagaaaaaagaaaagataagctgcataatgcaaggtatagaagggtcccaagcacaggagcttctgtctctgtggagtggggtgcaccaccctcccagcatatggatgaatttcttgttcaccttcctataagcctccacatattcagctatcctgtaccccatccttttgggccttttatggagacttcattggataggcatgattaacaaccatgtagaaatgtgattgggccaaaaaggtgtgatctaattgtaatagattgagggggaaacccattaaggcctgtctgttcagattcatcttggcctctctgcagcattccttcctccagggtatggggcaaagctcttttgaaacagaggtcttgtaacctacagtcagacaaggtaggtcagagaatttctttatggccagaggcagaggaagagtagagtatatttttagtttctaagggcctgccttggggagaaaaaggatcaggtgaaaggaaagcagaaggtcagagagagagattgttttctgaggcctgtttctgaggcctaaagcacccaacattttaacaaaagactgtaactaggtctgtgggagttaagagccagaaaccgtggacaaaaatctatgtctatatctatatcactgtcaaaatcagataattaaaatttatacaacattatcctcagaccctattattatcccaataatatccttaggtattaagttcagaatcacacattgcctttgtcaaacctatttagtgtccttcaatctagaaaagtttcttaatctttcctcaactttaatggtgttgacacatttgaagattgagggctagaatttttttttttttttttttttttttttttttttttttttttttttttttttggagacagtttcactcttcttgtgcaggctggagtgcaacggtgcgatcttggctcaccgcaacctctgtctcccgagttcaagcgattctcctgcctccaaagtagctgggattacaggcatgcaccaccaggtcccgctaattttgtatttgtaatagagacggggtttctccatgttggtcaggctggtctcgaactcctgacttcaggtgatccgccctcctcagcctcccaaagtactgggattacagacatgaagatgtgagccaccgtcgcctggcatttttttttttggagacagactcttgctctgtcgccaggctggagtgcagtggcatgatctcggctcactgcaacctccatctctggggttcaagcaattcttctgcctcagcctcccgtgtagctgggactacgggcatgcaccaccacgcctagctaatttttgtatttttaatagagacagggtttcaccatgttggccaggatggtctcaatctcctgaactcatgatccgcctgcctcagcctcccaaagtgctgggattacaggtgtgagccaccatgcctggccctggctacatattttatataatgtccctcaatttgggtttgttaggtatcttctcatgattagatttgtgttgtccacattcgcagagacgtcataggagtaatgctgtgttcttcctattgaatcctattatgtgtcacaaaattttgatgtttttcatcactaattacattcacttgctcacttaattaaggtacttgtaggctttttatctttataatcagtaaatattttgagggacagtactttgaaactatgtaaatgtcttattgtttactttatctgctactaatgtagccactccaactttcttatcactcatttcaggcaaatgtttttctattattactttcaacctatctgtgtctttatatttaaagtgtatctcttgtagacaacataagcatctcttatagactttcttttttatctagtctgacaatatctgcattttaattgaaacattagtccatttacatttaatgaattcttgatatggttgattttaagtttttcatcttattatttttattttgagccatctgttattgctcctttcaatctgttttctttttctcttttgcattaatcaaatttttaatttttcattttagttcttcaattggctctttacctatacctatgtattatttttaagaggttgctttagggtttacagtatgcatctttcacttaccgcattggaatattatactatgcctcagaaaacttaactatatcattttattgttttctggtagccatcggttccgatgagaagtacaccatcatccctgttgttcctatgtgtataatggtggtggttgtttttctgacttctttcagtgttttcttttttagctttggttttcaatagtttccctatcatgtgcatagaggtagttttctttatattaaccatgctttggattcactgagtttcttggatataaaagttgatatttttaccaaatttaaatcatttctcaaatactgttatctgttccattctctcttcttctgtgacaccaattacacataacattagacttttctatattgtcctacaggtcattgaggttctattgatttttgaaacattttttccttgtcttcaaatttaattatttctgttgatctaaactgaaatttattggcttgttcttctattttttagtctactattaagtccatgctatgatttttacatttcagatatagtactttccaattctggaacttccaattgtttctttttatgtaatttttctctgctgagattccctcatttgtttggtaattatgaccatctttttctgttaagtctttgaccatatttataaagctattgtaaattccttgtgtgctaattccaacatctgggttatcttaagatatctttattttggtttttttctcttgaaattgagtcctgtttttctgtttgtttgcatatggagtaattttttatagcatactcagaattgtggatgataccttgtagggactcttgattctgttatcttcctctaaagaatgttgactttttgttttgtaaaagttaaagctgactaattacactgaacttgttgagtgtctcggtttttcccttagtctagttgaatctattagaccaggtccacagtcctggtacatagtctatacttttaaggcatggcccttctgagatttcagtgggaagtctgaaatatgtactaagacctctaactaagtggaactcaaactccaaattctacccctatgccttgggtagtagctgaaatctctgatcagcttttcaactttccttttgtgggtttctgcagacatcttggagtctcccatacattgtcaattcagggatcagccaaggattttaagggagtctatatgcatatatggggcttcccctttttggctcttttacccatctcttttattccatcattttaatcttatttaccacatctaatgtctaaccaactgaagtagcctaccaatcttcctgattcaagtctttcccctctttaaaccattcttcacactgcggccagatttcattcactcatttactcatgtaacaaatagtcaatgagcactttcctaaaagacaatactgtcaagcagtcaagctactgcagctgctaggctggcttgccacatagattcagctgttaaaaagaccataagtccaaattgatttagacagtttattgcttatggcacagcaggtagcatgagcttcatgtctgcattggttctccttgcccccaagtcccataagggtggtatggaggcaggtccacgtagatgctgcaaaggcagagggtcagtgtcacacctgaggaaacttgaactttaaaaacctccaatcttacatcaaggctgtgagcaaacctgcctatcctttgccaccaaatgaaacattatctttattatcctggttagcaaacaaatctgtcctctaacctgaagggaggtaccatttttagcttccaaagcaactagttatgcagacgtctttgaaaagatagtccaaattaccagatatgcagaaacatgatggacaattgcttccaaacaagtacaaggagaaagcaaaccacttaggtcaagttttgagaatgatttcagagatatcagaaatgtgtccatctgctccccaaccccagttatcattctcctttccatctgcaaagataaaagaatctcaaccacttgctaattatagacataaatttccacaaaaggttttaaatatttcatcccacaacaagatataagactggaagccagaattaccttggaagtgttgggctagcactcctttacactaaactggaaaggtatagtctgcaaaagcaggcattacctgtttataattagcaatttatgtatactttaaacagctatccaaaggaattgagttaggtttaatcagaagagtaagagactagagacatgcactatggttctagctgcaagggccttacacccaagataaggagaatgggcgcatatacttaaagagggcataatcttacaagccagtgttagtatgctgagtgtcccatacaagcaagtctggccatagtgcttctcatattcagaggcgggtacagtcattagggggtgcttttatagaacatttcagtttccattattcttctgactgggtgttgaaaagcagttattacaatagtttttttttttttattttgacttcctgatgcatctgcagatgtgcactgaacttaatactgtagtcacaatggtgactttacatcattcagggagtcattccttaagcctagctagagtccttccacttactttataagtacataattccctgtattaaaatctttcctgcctaaaatacctaaatggcttctgtttcctgtactgaacctgcctaatacatggaggaattgaaatttcaggtggatcttaaagatatggtcaacttttgacatagaatgagaacccagagagaacttcaggcagagggaatagagtgagcaaagattaaaaggcagaaatggccatggcattttttagaaacattgaggaaactgattacagaagagaatgatagagtttcctgttatacaaatttctttatttcctatcaaatcctaaatgttttcatctctttttcttttccacttccttttcttctttctctcttccctctcctttctttccgcatatcacttgtctatcgctttaaccttccatgtcacacagtagcattcatagacattgcttacttattttgggggccttcagaattaaagaagttgctgcacctccaaagttttgttctttccactgaatattccactattaggtcagcaggctcattcttgaacttggctctattactaagcagtctcattcataaatttagtctccttagactaactagatttattgtgggctatcagaaatcctccccagatgtgcatgactgcacttggaagctttgagctttacagccctgtttactgccacctgattctaaccagagcaatatctcttatccattggcagaaaagagttaaggatgtgatagggaatttgagttagtggtaggcatgaaagtaatgtgatgggcttgtagaggatgagtgcaaggcatgttggaggcaataacatagatatttcaccatagctctcagcaaattatatctcctaaggtacaaagcataaagtccaacatacatttgatgtttagcatctatagtatttggtgagccattgtgaagcacataccagttacttttgataaagtagcttgaaagaactcttgatttttttttaaatgcttgcttcaaacataccctgtaattttgttttcctgccccatttactgttactcattctcaatcttttatattgcctattactcagtagctcgacttcttgttgttaataactgtagtctcgggtaactttttctttgtctttgtgaacatttttttctcaagtttattttatccaggctaggtatttaacagctctgtgtttcttataaaaagaaatacaaattataaaagctaaaatgaaccttgaaaaacatttactgcagcatttcccaaagcttcctttttttttttttttttttgaaacagagtctcactctatcatctaggctggagtgcagtggcatgatctaggctcactgtaaactctgcctccccagttcaagcgattctcctgcctcagccttccaagtagctgggattacaggcatgcgccaccatgcgtggctaatttttgtatttttagtagagacaggtttttaccatgttggccagattggtctcgaactcctgacctcaggtgatccgcccgcctcagcctcccaaagtgctgggcacgcccagccccaaatcttctttcttaaagtaatattcacatgtaatgttgtgtaaaaaaatgggtcccatggtcagataagtgtaggaactactgcatgtttctccttgaaaatttagcatgtataagcattctagaagctctgagaagttgcacagtgaagaaacccattaattttttaagtccaaaatttctcataatcatttgatcccaatgctttttttttccagcataaactaacagcatttaaggaaacagtgatctgtaaaacactttggtaaataaaatactagtttataacttaaatgaatttcctcatttcacaattgaggaaactgaggcccagaaagttgttttattcatcacaattaaaaacaatgccttacacaaagaaggtactaaataattgtttggtaaattgaatgatatatttatgtttagataactagttagagccaggactaaaacccagctgtcctgacaagttagacctatagcatttaataaggataatgcagttcacttctattcactgctatttaagctgatgataaaaacattttataattgctattaaaaaagcatcatatgctggtttaaaaggcaaactaaagaagttgaatagttggctgatgttttaaatcgacttagaccacaggtatctatctctttagtttttaacagtgtcaaatattggtctcttgatattgttcagagcactctgggttttgaaaaaacagttcaagtatgtgcaaaggcatctgaaaggggaattttctgaagctttttctactcccatgattctcacaaaattcttcaattcattctagtctagaaagtaatggatcttccataaagatgtgctaatcccaaggtgatcacaaaaaaaaagattttcccacctctgaacaggtttcttttgttgttgttgttgttttgctacttttttttaagtatgcttagcatgttataccaaaaataatgtttcttttttatataaaatattgtactatatatataagaaatacctcagaatttctgtttttaaggactccattttggcatgatattttttggtcattacctacttagctatgtcatattttaatatcaccaaagaaaatatcttaaaatgaaattcttgaattgcgcttgacctttccggttgacagtcagcttaaattatatagtatctcccattatctcacaacagatgtcatctcttaggaatgcttcctttcattgaagacactgtgacaataggaaagggatgtggggtgaaaaaaaagtcacgtatcttttgtttatctgcaaaagtctgtgcatagtttttattgctgaaaataaacatgtatcatgattggtgtatgggggttcacattagtatcagaagtttttatggccactctgctggtgacctagtatattgtgctgttttctcaactgcctttgtaaacacagtagccttaatagatcattttgaaagaagctgccatcctgctgcatctgttggtagcctttctcaggtttctgacatatccttaatctgatgctcagccttgtcatttggatcaatagtaaactagataagatgtcttctacttgcaaggctatggctataaaatgtatttgaaaaataaattcactttttatgtccatgccacaaacctggggagtactaatttgtcattctctctccatctgtctgtaaacagtcagttaaattggttattgatgagaagaaggtgaattatacttgaaacaagagtaatatagaaataaacttcatagtaaatgtcttagattcctacaaaaaggtgacatattttagctgttgtcttaactttaatctctagaataatgagcaatttgttttatattttctattccaaatcatcaataataattataattaattataattataaattatactttacaaaccactcacatatagtattcaatcttgataatctctataactatccattttacaatttgtaaagcatttatttattcaaaaaatgtttatgtagtgcctactataaatgaggcactgtgctaggcactacaaattctctatacaaaacaaaattgtgatgatagaacatgttagaattgtagcattttaatgttagaaggaatcctagaaatcatctactactaacttctcattttacaggaaactagatcttagacagtttgtgaatcatgctcaaccagctatttagtgactttttttctattataggatataaacagataatcttttaaaagtaaacccatagtttaatctttttgaatgtatatttcctcatctaagtagtgagaatacttctggttttcacaacaagaatactgtgaatattaagtaaggcatgagtagggagcattttgaaatttaaatataatctgaggataagaaacaactccttgtagacaagaggaaaagagtatgtaaaaatgtaaactgcgattacctcaggtttaagaggtgcaggctgatcactgttttcttctttatactttatttttgacattcctttaatggacatgttattacttttataacaaaaattttaagttttttttctttttttctaactttatgttttgatataatctcaaatttacagaaaagtttcaagaacagtacaaataattttcatatactctcaaattcctcaaatgtgcacattttgacacgtgtgctttatccttctctctactttgccttgatatatgggaatgtgtagatattgccttctgaatcatttggagtaagttgcaggtgtgatactcctttgcccctaaatttcagtgcatagtttctaaaaacaaggacattctcttacatagccacagctcaattatcacaatcaggcagttaacataaataatattatctcatccaaaaatcttacttagattttgcccattgtcccaacaatgtcatctatttaaaaaaaaaaaaatccaggatcaggcactccattcaatcatttatgtctttttagtcttcattaatctgcaacagtttttcagtcttttgtgtatgtatgtgtgtacttcatgatattcacatgttgtaagtatacaggccagttaaattgtacagtagccttcctttttaatttgtctgatatttccttataattagattcagattatgcacttttggtaagaataccacaggagtgatgttgtattcctctcagtgcctcatatcaggaagcatgtgtcatcaatttgtcccagtaatggtgttaattttggattattcacttgaataaaggagctcctgccaggttcctctgctgtgacgtcactattttttccattgtaactataaataataagtatcttgtgggagctaatttgaaactatataaatatcctggaaccgtccaacccactctattgttagcatcgtttgaccactcacacctgagttggttgttatgatgatggctgccacatgaaagagttatttatttattcattcattttttattttttgtttatttatttatttttcaggcagagtctcactctgtcacccaggctggaatgcagtggcactatcttggctcactgcaactgctgcctcctggattcaagcgattctcatgactcagcctcccaagtagctgggaatacaggcgtgcaccaccatgcctgctaatttttgtttttttagtagagatggggtttcgtcgtgttggccaggctaatctcaaactcctgacctcaggtgattcacctgcctcattctcccaaagtgctgggattataggtgtgacccactgtgcacagctgcacaagttatttttaaaaccactgcttatttaagatatacagttagatgtatacttagatgaaaactatgcaaatcctctctctttttaaacaaaaaaactaaaaaggattagaagagttttcacagaaatgctagcagagcttgtgttaggcttagggtaataaaattgttggtaaccttttttcttactttgttttcccaatttttaatagtttttcaaaattttcaatatatgtaaagcataaaatttctaatttttgaatgtgtttctaaaatttatgtttgtttatttccatttggtccacaaagggcttgagggagatactaaaatattgatttcagaattgtagtgtgcttgcacttgaaagaatagttagattacagttaaaacatagctataacaaacaggacatctaccctggcataaactacagattgacacaactaaaatagtctttaatctgcaaatctttattcctcacttcagccaccaagctgtagcattatgctttctcaactcggttgcttctcttagtttcaaataaaaaggtctaaaatggtggcagacagatgaagagcagtatagagttcagggattgacttgcagatggaggtatgttttgatataattttttaaagatggctaaatttgaaactagaagatacaattttgaattcaagcactcactgtgaggatttaggctaccattttgaaaatggataatagttactaagtcagattactagttatggtcagcatttgattaaaccctttaatgcatggtctgaatgaggttcattaaaggttttttagtataatcgaatttacttacacatttgtctgtatatttgtcttttcccaccatctaagaaatcccatccatagtgtggaactgaagtagagaaggcaaaagatggattcaatcagttgtttgaaacaggtcccccaaaggcacacatcttcgcagagtaggtgaattgatttttctaaactgcatgctaggatcaataaaactaaggtacattgttggaaaactaaagatggagcctacaagacttggggtgcttcaaaggaaccaggagttaaacaaaatttgttgcatttagcttctgagtttaatattaaaatatgatgttttaataactttgcttgcagtgtcactgagaaggctggtcagggtcagtaagaagaacaggctacacagattatcatggacatcaaacaatgagaacattaggagcaaatgaaagctgttttgtttacagatactacttttatgatgagaggagagcaatgatggtatctgagaaagaaaccaatatttgttgagtactcgctgtgcactggtcacttttttttcttttttaccaatgggaaatctgaggctttgagaagtaacttgctcacagttattaataatatagccaatgaagtgcccagatctgactggttccaaaatccattctcattttattacaccgtactgcctccccatggagtagcatttttggatcccctaaagcgaacatcaatatgctaggaaaatgaattacttgtgcagtattgggaaaaaggaaatggatgtaaaaactgttaccctgtggttaaggaaaataaaaattattagaaattaagtcattgttgagtcagttagaataaaaaacatttagttttgaagtagctatagggagcaggtcttctgccttttagaattagaatcatagagtcaaaggacattaagctgggtgggctttagatcagaatccaccctccttatttttcatgtgggaggaaacagaggctaggaaaaattcagtgatttgcctttgggtgtgggagtgttctggctgagacctctctcatgtccctcccttacttaaatccttcagtactggccgggtgcagtggctcatgcctgtaatcccagcactttgggaggccaaggcgggaggatcacaaggtcaggagatcgagaccatcctggctaacacagtgaaaccctgtctctactaaaaatacaaaaaattagccgggcgtggtggtgggcgcctgtagtcccagctactcaggaggctgaggcagaagaatggcatgaacctggaaggcagagcttgcagtgagccgagatcgcgccactgcactccagcctgggcaacagaacgagactccgtctcaaaaaaaaaaaaaaaaaaaaaaaaaatccttcagtactgcttcagaagactgaaaggaaaagcccaaactccttgaccctgcacttttcgtcatcgagttcttgcttatcttttgggcttcagtgtcctgtgtctccagttctactctatcctcagacatactgtgtttttaaagctttcattctagtcacctctttttcatcctccacacacaatgccgtcgcacattcagcttccttcctactttaagctggcttaattgcatatactttcaacatgcagctcaggcactgttttctccaataagcttctactgacccctcaaggctgggttaggtgcccctctacagagttcttactaccgtgtgtccttacctctatcatagaactgatctcattgtatgacagcagtgaatagcattgcatatggtttcactttctattacggtcaaagggagggatagtgtgggggttattggagcatgtaataagtggatccaagagacatgatatacacaacttactaatgttggcttcagaatatgcatataggaggagcttatggggacaaattgattggaaggagtgggagtaagatttgaagctgtctttatatagcactttacataaaattcagaaaatacttattgccctccatatcaaagaaattgggagcaggaacaagatggagacattgaggagtgtcaaagtgttagtaatcctaagttaagatcctgttcaactgccatctctttcatgaagtcattctgttctaaccccttcccctcttcacaaggacatcttggggaagtcacaaggaatgacttttaagtacatcatctatcctgtctttgtgttctgtttttgtatcctttttgtgcatttacccttccttgcttataattttgcattgcatacaagcgtacatctgtataaagcttccccaactcttagcatggagtctgatacagagtaattacatcaaaaataaccattgaatgttgaatgaatggtttaattaggtcagtgcttctcaatcccggttgcatttttgaatcacctaccgaaaatttaagaaatattaattccaaagtcccagaaattctgattttgttgatctaggatgggaacagactttttttttaagctcctaaggattgagaactcctagattaggttctttgtttcaacagtggttctcaaagtttaggattctagaccagcagcagcagcacttcccagaaacttgctacaaaatgcagattcttggcccctacaccagtgaatgacaaactctgcgggagggcctatgtgttttcaagccctccagacgatcttgatgcatgctagagtttgagaacttcttttgctagagtttaagacaaaaaaaaaatgttgtccttaaataaaataccaactgtgagaaaccaaatatactttataatcatcctaaaaggttgtaccaatttaaagcaccactctaaataaatcagagtacctcacaagcacaacagaattatccttgtggaaataagcatcccagcattttataacttttttcaatatttatttttggttagtttcctatatataaaaggctctccaatgaaggcattaattttcataataatctaaataaaataggctatattagtcaggaagagcacctgaaaaatctggcattggataaggaagcctcagagtcaagaatacctttccataatttcctctcatagagaaaagcctttttttgacagtaacattttctccttctctcatttgtgctgtttgactccgtgccacttgatagctctgtctattcctatggaaaccaagttagtggatggagccaaggcttggagaaggcattggggggaaatattagaagagttcagccttagagcaactaaagatgttgcctttccctcagtcaaatcctctttgagagccagaactatttcaagccagagagatgttcttggctgatgtattgtctagctgctctgccagatggatgaacatcttaaacttggaaaatagcaaataaagctcctattctgtctttggagcacattcttagcctttgcttacagaattgtcaaataactaaaaaatatatttttaaagatttgcttaagatggcaggttagtgatgtggttctcatcatatttgttaagtacttagaaattttagcaataaaacacagaattaagccttgacaatcagaagtttaagtaaagaggaagaatgtcggtcagtggaaaaagcaatgcagatttcattttatttctgtagctcagtgaatttatgtctttcatgagttgattgctgtaactgtttgcttccctataaaatcactttaaagactaagcaaccagagtacaaacagacatctaaatcaactgaaataagaaaattatctaagcatacaagaaggcattctcctttctaatccatttctgctctacattttatatggcactggtagctaactcatgattgcattgtactgagccatttatgtggatatttatattatgtttatatttcaagaagggtgtagagattcatatttccaatttatattctttgatttatgtcagaaaattaatgtcttctgagaaaacagttgagacaactattaatatagatgcctcataaatctatatcttgaatctagccatctcttctaatgttcaggtctatatgtatctgcccctccccaacaaccttttctttttgctagacctctctgcatagattcccttcaggtgcctcaaactccactttagaaaaaaaaaacagaactcaaaaatttttatccctaaccctatttttttctcccatctcttcagttgttggtaacaccctctatctggtagccattcaggaatcttcttatgtatttcactgatctcttcccttatttccatttagctctcaacatttctattgtgggttgctgtaataacccccttactgctctgcttgcctaaagattttttcccctcaaatcagtgcttcacataacctccagtgtcttttctaaaaacacaaatccagtcatgtcatttccttcttaaatcttctctttttcctgtcttagtttgcttggccttctataacaaaaatactttagactggatggctggaacaacagacatttatttctcacagttctggaggctggagagtccaagatcaaggcaccagcagattctgtgtctggtgagggcctgcttcctggttcatagatggctgtcttcttgctgtatcctcacatgacagaagggagtgaaagagctctctgaggtctctttttaggggtactaatcccatttatgagctccaccctcgtgatgtaatcatcttccaaatgtcccatatcctaataccaagacattggcgttagaatttcaacacatgaattgggggggtttgggggttggggggacatatattcagtctgtagcactcctttttaccaatatgatcaactttaggctccttatcataacatattagactatccattttataacccctgctcacctctctgatcttacttttcacttcctcttacagtgcatttcttttcttttttctttttttttaattagagaaagggtctcactatgtggctcaggctggtttctaactcctgggctcgagtgatctgcccaccttggcctcccaaagtgctgggatacaggcatgagccaccattcctggcccttacaatgcatttcatattacaatgatattgaattatttgcggagtttgagatgagattttaccctaaatataagctaagaagttagtctgttactgtttcatggatgctaacaatagatacgagactccgcagtcagagacaaagtagtttactactcacaacacagcaaaaagaatgagcaccacgtctatgcttcccttgcccccagagaacatgtggaagttgcagaggctgcacacagtgggttttcatcacaactgaggaacaccgaacttcaggaatctaccacttttatagtaagcacttagtaagcccagaggaagacattacctcatctctccagttgcttgttgcaaacacaaccctgaaaaattacctaagtaaagagtggccaagactttgcattcttggcatacccagtaagaacgtttaggaatgcttcaggcccatggtagattgactcttccaacaacccatccctcagcccagcattgtcttgacatgagtatgccactacatcagctacttttatttatcttaccaagagagactaggaccatcgctttaatttgtctcatacagcacttacttaacaagactccaagtagcaggataaaaacatcctgtaatattggtatcaactatgtccctcagtatcttggactaaatcaactgtgaataagccccagaggagaaagtagatcttactttatacagctaggatgtaatctaagtctggtctgttatctattttgacccatgcaagggagtttagactgacatgctaatctttggcctcgttgcagatagttacaggaggcgctagattacaggggccaaaaagcaacccccaagctcaaaggtggaatacaccatggcctactctttcctacatacaaacatgtagcctaaagaggctgaaataaagagtcactttatttcaggatttgtcattaaacttggatcaaccattacattgatttgtctaagccacatgggcagtatcactaagtagttgttacttcagttgccatgcatggcataatccaaagctgctcacatgtcagaagaagcatatggatttgtgtacatcagattaaaataaggttgtgccagtccctttgcttccatgtatacaacggggtccacattcaggagctgtcattgatggtatcaagcacagcaaaagaattaagaaccaccaatgcccatgtgaatttttctgtttcatagcaagcacatggtcagagataaaacagacgcaggtcagatggctggcctcagctgctgtttgattcaggtagctcactatatatttgttttgccaggatgcacttgcggatccagaggacaaagaaagtattaattgtcctccccatccctgtacttcctgaggtctcatgtgtttccttcctaggggctgaagttgttgctttccttctttggccacatagttaatgtgtcccattccagtagatataacttcgccttttctccaatcatcccctacttgtgcctgtagcttatagaagggtaagtacatatgggacaaatttagaaacctattatgtcttccattttggcctatatggaccactatagaatgactcagtgagcagggcactcaatcagatggtcattatggatatttatgatctgggaccttatcagttgaacaaaatgaatccaggtgggtaaacccaaattaagcttgaatctctaagcccccttttggctggctgccacccaagggatatatgaaacaaaccatcctgagattgcttttgggaaaaagaaagaagcaagataaccagggttgggccaggcagaatcccaaattttcaaaacagatgtatataatcccccactccttttgtcctgattatttcccaggaggctacaaggatgaaatgaaccctttctgaaggtggccacagttagtaagcaaactgcttcatacaggagtgtggaccaggaggaggtaagagaggtggagccagaaacatttttgagttgattttcaagaaggcctttccaagctctcaacaattccagatacctgaggatggtaggaagcatggaatgtccattaagtacctaactattggctcattgttaggcatatcatggtcagactatagaaggtctaggaaccccaaaacatggtcctcagtgctatagcttgaataggctaatcagattggagcagcaactccatatggtggagcagcaacaccataacctgaaaaatgtctatggtggaaaggcacgaggtgagcccaagaggaggtgacagaggtccctgctgggaaggggcaagggcaatcctccatgtaatgtggactccttcaccacaagaaaaggaggccaactgggcaagatacataagtctggtatgcagtggtatcttctgcatgaaaaacataccttttactttgtatccattctattgtggtgggttcattgccttatctagtgcagtgatggatcctagtggcaaatcccagtgaccaggcaatacagacttgttcagcgacttgatttcagtcggtcttatcagagagcaggcccttactgttactgtgggtatctatgtgagtgacccaaagtgtctgattggcagccacaatttgtttgtagtttgtggccccaaacaggaatatctttaatttaccaactgtagtcttccaagtggcagaccaggtgactacagtactgttagcagaccaagaatcagtaaaaatacggctagtctttgggagtattgcctaaggtaagggtgatggcttttcatttcagcccattgggctaactggtcattaccactcagtctcctggagctgtcattgaggttggacagctactgccccctactggacaccatcgggttttaacttagccaaagcatcagcaaaccaggccaaggcatttaagggaccattaagccagcagctttgcttcagacagtggccacctgtatacccagtgctttgtcctcaatgtcaaataagtcaggctaaagcaggaatcagatacatagaacagttgactctgtcctattaggcaaggttttgcattcacattcacttttgagcacctgctcactcatgtctcaaccaaatgaacttctaatgttttcaatccacctaaagatccatgtcaaatagcaaaatcttcattgttctctccatttatttctgttttggagatttcttggccctgcagccgcaaccacatggtctttcagcttgctgcccccgtggtcatgtaccattccttcttttgcctgcccagaggaaggtgagcaaaaacaaaggcactatttgggtggcttgctttaatcccacctctcaccattcagactcattaacagagagaatactggggtcactcgccccttaaccttgcccaccacctgggcatgatctcagggggtcttctcacccttgaacctaaggatacctgagaatgggcctctagggttcttgtccttactcttcaagaaaactatgtctctccagctgggtgcagtggctcatgcctgtaatcccagaacgttgagaggccgaggtgagtagatcacttgaggtcaggagtttgtgaccagcctggccaacatggtgaaaccccgtctctaccaaaaatataaaaattagccaggcatgggggcacacacctataatcccagctacttgggaggctgaggcacaagaattgcttgaacccgggaggcagaggttgcagtgagccaagatcgcgccactgcactccagcctgggcgacagagtgagactctgtctcaaaaaaataaaaggaagaaagaaaggaaaactatgtctctgtcagtatcctatcatcttttactgtcttgtcagttctggcatttaattaaccctatttacaaggtaataagttagctgcagatgctggcagaagacacaagactcccatcagagacgaaaagcgtcattactaatggcatagctaggagctaggagtacttatctgtttgcatgagtttccctcccctccaaggattatgggggcaatatggaggactcagatgggcccagcacacagtgggtttgcatgacatctgaagagtgctagattttgggaatctccagcttttagtaaatagagtagtaagcaagcctgcttgttctttgccctggtgggtgacattacctcgtcactcaagattgctcactgcaaaccccactctggaaaatggtcccagtaaagtggagtcaagcttttgcattcttggcatacccagtaagtacattcagggacattcaaggcccagggcagattgcctctcccaacactattgtggtatttccaaaactcatttgtgtctgcaaccactacagaaaagtttgatataatgaaattactgatatttgcgacctatatacttcctagggatagtaattctttttacaaattaatacagtaaatgccttgagagtttataaatacataattatatagctataattataattaataaatcatgtttctatttttccatttcaattttaagtaatgtattttgggtatataatatatttaggatttaaaatgaactatgacagagtacctactttacatttgtgtgtgctattataaatatagttatctttctaggccaaaattttataccaatttgtaaatgaacaaaaaaatatagtgaacatttatatatatatagtgagcaattgtttttctctccaagtacagtgacagaaaatataagcactggggacacagaacaagaatgcaaagaaattaattggaaaacatgtaggtcccaaagtattggttttgggaaaacatctggcctcttcagtactccagtggggagaagggccaccgtaggcagttttagtcaagtcttgggcattgaagtctgttaaagtaatcgtctcagctgaagaggaagcaaatagcaaaggccccagggagacagatatagaaaatatggtagccattttggggaaaaaatgtagaggtaggatccagaatattttgaggatcagctgccaattatctataagttaatcataaaggcacttactgggaacaaacagcagtcctgtagaatatgatttcagaatagggttcaggaagatgcctccttccttttcactgattgaaaggtggtcatatttgtgcaaaaggcaagaaaattcttagaattttggaatattctttgcctcactatgaggctacagctttataggaagctgtttatctagagaaatggcagaagcaggacaccatccaagcctcaggtcaggaagctactcactagctcactgttaataattgtgacatccctaatatcactgaagacagggctccaggagatctgtgtaggagcagattgttataatggactaggagctgggtggaagatgctctatgggtcaacaaggagaaaaaaggaaaacaaagcaaacaaatgaaaaacaaaaatgaacctgcagacagaaatttcaaaatatttgaagaaatctaatgctaacaaagcaaacaatattattcagattacgaattcattcctagtgggagagcataaataaagcaaaaaaataagccacacagagaagatatttgcaaaaccaaccaagaattagtatccagaatacataaagaactcctatagatcagtaagaaaaaaaaacaaatagccaagttcagaaatgagttacaacacaagaaggctatttacaaaagaaacaaatatccagcaaacatataaaaacattccacctcaattcgggaaatgcacattaaaacacagctgtaggccaggcacagtggtgcacgcctgtagccccaactacttgagaggctgaggtggtaggatcacttgagcccaggagttgagtccagcctgggcaagctatagcaagaccccttctattaaaaaacaaaacaaaaaactgtaaccgtcagattggcaaaaattagcaagtcagacaaaacccagtgtggtgaggatgtggagaaacaggaactcatacattactgttatgaatgttaacttggagtagctattttagagagcaatctcaaaccagaagtttcagaaattcttatgtacttaccaggagatatgtatgagaatattcattacaatattgggtaatcttgaaaaatgagaaacatgctaaatatccctctagagaagaataaatatattattttcatatgacagcatacttattccagtgaaaatgtatgaacccaggcaacttgaataaatctgaaaaatactgctttgagtaaaaaatgacacgattcatgcaagaccatttgtacaaagattgaaaacatgtaaaacaatactatgtcgtttatggatatatatatatatatatgtttgtatgaaatagaagcataaaaacattcattggaatgataaacacccaattcaggatagtagtctccaaagagggagagaaggtaatggaattggggacacaaaggaagtattaactttatctgttaggttttattacttaaaaaatgaaaaatccaaagcaaaatatcaaagtatttttctcaaaatctccatatcattgttattaccattaaatagctatgtgctttttttttaaaaaaaggagttcatcttaagagaactggacagacacaaatataaagttaaaaatcacattttgacctaatttgtttcccagattcctttcaagtgctgttctctgggtcagagaacttttaattctctttcacccttttcatacatttggagaaaatctaagtgtcataatctttatgtgacagatgaaagaagctcttggtgttaattacaggaagatttagaggaaaattatgaccacctaatgaaaaacgaaaaaaaatttattcactgtttcagagatattgggaaatgttttcacatttcagaagcatgatggacctgatcatagcagagtaatgtccttttaaatgactaaatcaagaccttcctgtaacttcagctcccttacttctgcttacctaccatcagagttttcttaagtatatatcctcttttgatctattatctccttcgctcttatactatttcctacccactccaaaattataaaagcagaccctaaaacaaaccgtcctccaaacaggatcagtttctgtatagctctaacaggttatactaaatgattaacttccaggccaggcacagtggctcacgcctgtaatcccagcactttgggaggctgaggcaggcggatcacctgaggtcaggagtttgagaccagcctggccaacatggtgaaacctgatttaccaggcttggtggcaggcacctgtaatctcagctattcaggaagctagggcaggagaattgcttgaaccctgaaggcagaggttgcagtgagctgagattgtgctactgcactctagctgggcaacagagcaagactctgtcccaaaaaaaaaaaaaatagattaacttccaaatcctccaaaaagtatttgcattataagaatattctcaaaaacataagaactcctcagttcaagaaataccgaggaagtatttagactttctgtaatgagaaggttttacaggaagcaaagtagcctataacatgggtccaaagggtcacacaaccttcagagggttgtcaaattagcttactgcctcaaactagtatcttcctctgttccattgatactagaaatattctcctgattttagcacttaaagttctctgtcccttctgctcattcccaaagattgaatttgcatacaggacaattttttttttttttttgagacagggtcttctctgatacccaggccggggtgcaggggcacaatcatggcttactgcagttttgacctcctgggctgaagtgatcttcccactccggcctcccagagtgctaggattacaggtgtgagccactgtgcccagccagttgcttgtttaggagaacaaacaggttggccttggtccaagtaaattatattgtttctagtccagccttcatagataatatctgatgggtctctgtcatttgaaataggagatgctggcctcctccccaaggtacctgctaaattcctattgtctatgcctttgttggtcctatatcatcattatctgtaggcagaatatagacatctttctcagtgaaaaaaaaaaatcagacaaaccactactgtaattccccattatccacggttttgctttctgtgatttcatttactgtggtcaaccatgatctaaaaatactaaggtattttgagagagagagaccacattcacataacttttcatacactatattattataattgttctattttattattagttattgttaatcttttactgtgcctaatttataaattaaactttaccatagatatgtgtgtatatgaaaaaaatagtatatatagagggtttggtgctatctgcagtttcagatattcactggggatcttggaatgtatccccaggagataaagggggactactctatttataacattctaactatttttacttttaccttttcctaatcttggttcttaatcactagctgaactgtgtatattacaatcagatctttctgtctgcatgccctttatcttgggccattcttggttctatctgaccatctatgttttgttgaatactacacactggaaaactatttataataataaaaacatctactgagcatttgctttgttcactgttctaagaacttttacaaatatcatttgtctcatttcatatgcataataacttcaggtaccattattacccctgttttatatatgagaaaatagaggcacaggaggataatttatttaatctgtgaaaatgtttgatgatacttctgtgagaaacaaagatgaaattatgtcaaagagctttgtaatacgtaaaacaaagtacgagcattgtactgttatctgcttcataacaaggctcaatgaatatttgttgaatgaatgaatgagtaaatatcattactgagttgcactgtgtcttgtgagggtagagtcctcagaataatgtaaagtgtaaatatgccaagcactgtgtctatagctcagtagttacccccaccaacatatactagtttccttcttctccttcccttttcctctaatttccaatcgaaatgactgtctgattgaatatctttaaaggtcatgatgaattactctgtaatatttgaagtgttatgttcagaaaggtcaaactttatttttcggtatgaagtgtcacacagatttgtttttcctgggcaaactttttttttttttttttccccaaagaaaagatggcaagaaatttagagcagggtgccctcttgaggaaattttagcatcttccttctcaagaactgacatcaaatgaaatgacaagtccagataaatgatgtacactattaatgaagctcagaaaaatgaaacattaaaaagtaagaataaccaaataccaggtatttgagaattaagattcttaactgttatgatctaatatagcaactgtaaataagaatttttatcatttatttatttatttatttttaatttttttttttgagacagagtctcactgtgtcacccaggctggagtgcagtggtgcaatctcagcttactggagcctccgcttcctgggttcaaggattttcatgcctcaccctcccgagtagctggaaccacagcttgcaccaccatgcccggctgattttttttgtatttttagtagacacaaagtttcactatattggccagcctggtctcgaactcctgacctcaagtgatctgcccatctcggccacccaaagtgctagaattacaggcatgagccaccactcccaggcttgtaaataagaatttttaaatgaaaacaaaaacctctagaagatatttcatttcttcttatttactcatttcttcaagtaatatttattaggcacctattctgtgccaggaactatgctgagcacagggatcaataaaacatggtctctgctttcatggagcttacagtttgtgagggagctcacactgaagagaaacaaacaaatatatatgtaattgcaaactgagaaaagtactatgagagaaatgaataggtactagaataaagaataacaagtaagttctatttagggtcatcaagggaaacctctctgagaggaaatatccagcagagtccgttggcttttccacctattccaagtcttcccatctaatatagacagtctacagatcctctttcctagccatggtctttcttatcttctcttatctctgcccctgtggtggactgagtcaatcctatctctgcccctgtgggcaagcagttagttctcattcgtccttctgcacctcactgtcactctagtaaccttgccttacagcagggatgtccaatcttttggcttccctgggccacactggaagaagaagaattgtcttcggccatacataaaatagcactaacaataactgatgagcaaaaaaaacaaaacaaaaaaaaacacgcaaaaaaatctcataatgttttaagaaagtttaagaattttgttgggccacattcaaagccatcctgggccacgtgcaagccaggtgccgcggtgtggacaagcttgctgtagagctgcacattcttcacagtaggtggtctgcttgattaaaaaatgtattccttactaatattgatagtccctcataggagaacatcaatgcattatcatgctaaaagggcccacttctaacaaggttaaggatgacaaatggacaaataatcctgcctgccattatcctctgaatagggagagataaataggcacgaagtaggctgagaacctgatcaggcaatactgtttggtcacactgaccttgaaatatctgaggtaccaagcacatagaaacctccaactggaagtaaaaatgaggaaatagatctgagaaaagagcccagaagaacaatttttagagtcttattttgttcaaagctgccatgttacacagacttactatgtaatggttggcctggctcattaacactcttgctgtggcccttgtaactaagcttctttctctttttttttttgaaatggagtccggctctgtcacccaggttagagtgcagtggtgcgatctctgctcactgcaacctctgcctcccgggttcaagcaagtctctgcctcagcctcccgagtaactgggattacaggcgcctgccaccacgcctggctaatttttgtatttttagtagagacggggtttcaccatgttggccaggctggtctagaactcctgacctcgtgatccccccacctcagcctcccaaagtgctgggattacaggcatgagccaccgcacccggcctgcttctttcttgaggtgggttgattctaccagactggaggatttaactgacttggagagtactgcctgcaagtgggtgggcctaccatgacttctgagttggcatttaggtgaccgtttgagtctgggatccaaacttggtttttttgtttttttttttttgagacggagtctcactctgtcgcccagcctggagtgcagtggcacgatctcggctcactgcaagctccgcctcccaggttcacgccattctgctgcctcagcctcccgagtaaatgggactacaggcgcccaccaccacgcccggctaatttttcgtagagatggggtttcaccgtgctggccaggatggtctcaatctcctgacctcgtgatccacccgcctcggcctcccaaagtgctggggttgcagatgtgagccaccacgcccggccctgggatccaaactttgaataagctgcctctaccttagttgtacccataaatagctttctttaagaaaactaatcatccataccttattaaccagaggtcctgaacaaaacgtttaactactttgaatctcagtttcctcacctgtaaattgggatttaacatctctgcttatttcgcattattacactttgagtataaataataggtactatgttggtcaaaatgtgctgaaactaatacacctacacattgctgctgttagatagcaatttggaaaatacaccaaacactgtaaaatgtgcaaacgtctttgacccaacaatttggttcctgataatttattcttgtgaaaaaattaagaaaaaaaatgtgaaaaaagatgtacagtgaagcatttactacaaaaaaaatattagaaacattctagatatctaacaataatagactggttaaataaaacatgttgttttatttgcaataaaatattggccagccactatgtaaattatattcatgtagaaagttcttggaaggaaacatgaaaaaataaaacaattgatagtatagtggaattacaagcatttttccttattaatttctctggatgttattactctaggagaataattaacatacttaaaacattttaaaattaaaaaaaattttgaccccatagtacatttttttcttatcatctcttgttttttatttagggaaattatcgtttcatgaaactcttacttacacgcagagcaaactggatgcaaaaggatctggaagagatgactcctttgcacttgaccacccggcacaggagccctaagtgtttggcacttctgctgaagtttatggcaccaggagaagtggatacacaggataaaaacaaggtaatggatactcaaaatcaaagactaataagaccagaaagcaaatgcttccttttatgatgtgaaatttcaaggaagaaggcctgaattaccacatatatacatggtagaacaattccaaatctccatacatctcagggaagtatttcacttaaattctgtcattttatcctctcagcaaccatgtgtgttaggtagtatcatctttttacagatggaaaaactgaagctcaggaagattaaaagtttgcccaagatgcaagtggcagaactagaattcaaatctagtcctgtcggccgggcgcattggctcatgcctgtaatcccagcactttgggaggccgaggcaagtggatcagctgagttcaggggttcaagactggcctggccaacatagtgaaacctcatctctactaaaactacaaaaattagccgggcatgttggcatgcgcttgtaatcccagctactcgggaagctgaggcatgagaatcgcttgaaactgggaggcagaggtttcagtgagcccagatagtgccactgaactccagcctgggtgacagagtgagactgtctcaaaaaaaaaaaaaaaaaaaaaaaaatcagtcctgtcttaactccaaaacccaatatttgacagggagtcataatagttactataggtggttagactcatgatggccaaatgcccatggcaatgtcctaaatgcttagtggtttagtggcctacgctttggtatcagccttcctgggtttcaacccagaatccactacttaacttgttctgtgtccttgagcaaattgcttaactcctctgtgcctcaatttttgtatgtatggaaaaaggttaataggattactgttaggttcagcatagtattacatttcagtaaatagaatcagaacaagtataacataggaaaagaaaggaattacgtgttgtttattgaagatgtggttataggtaattagtaagtgctattatacttgtggctttttaaaaatctgcagttgttagtaagcaaaagtagtaagttaaatagtgagtgttcatattaaatgcctataggtacaccttgaaggaataccatgtatgtcagtttctaaagtttttaatgtgacagatgagcttggttcctgctcattaaattatctaattgtagattggattgctgacaatgctactcacgagggctaatatatatttaaacagttcttacattttttcttaataattatcctaatagggaagccagtcttatagaattatgttgacgagaacagcagaagagattttaaagcaacttcaacaagttcaagatgatcattttcaacttttatctgaaataaagtgtgaacattgtcaaaatcaaaatggagttgtttctgtttaaaacaacaacaacaaaacctgacagagccagggaaggccatgaagagaggattcttgtgcttgtaagcctgattaaaaaaaaaaaaaatcacagactgtgcaaaaaccacagccttgcacaaaggccatcataaccttacacaaaaattacttcttcaaagacatttgcccagcaactgcctgtccaaccttgcactggcattatctttgttatcgatctttgtagccaaggatcatcatttgaaaacaattacgtaatcctgctcatttttcttttaaaaacttttgtcttcctttacttgagtacacatagtttagcaatgccctactaccagataccaaataaacattattttctttctttctttttttttttttttttgagacagagtctcactctatcacccaggctggcgtgcagtggtgtgatcttggctcactgaaacctccacctcccaggttcaagcgattctcatgcttcagcctcccaagtagctgggattacaggcatgcgccaccaggcccaactaatttttgtatttttagtagagacggggtttcaccatgttgaccaggctggtctcgaactcctgacctcaagtgatccacccgcctcgatctcccaaagtgccgggattacaggcatgagccactgcgcccagccaaacattattttcttttagagagactctgttatttaggttgactaaagcaagtgctgctgtattttcaaaatgtatcttttcatcaataactgggtctaataatttatcctctaaaattatatttaaattaaaatttgtctactgatacatggaatgggttccagatgcatgaatttcctatgcatgtatttttttatagatattaaaattcgaaacatcctgtcaagttcttaaggtccttggtgataaccagatgtgcattatcaagatcatcacttactttgttgatgattatttataaatgactgggccgctttctctttctcagtgttatcagtaccggatgaactaaataactgtcatgcctaagaggtcagattctggagtcagactgcctgggttaaaatctcagttcagccacttacttcctttgtgtcccagagcagattacttaggttccgtgtgctgtttcctcatcaatcacatgcaaatttaaaaacatacttgtctcccagagatagtaagatgactgcatgcaattaaatagacaatagtctcccttgttcaaaggaaatatattccaacacctccaatggacacttgaaactgcggatagtgtcaaacccaattcccgtcaataggaacacatttctgttcatatcttctacccacaaatttagtactttttccgtcttaactaagcacttatcaggcactatggccataatttttgcagtttggtatgcaacagcaaaaccagcatgagtttcttcttccttctttacagtttcacagatagatttgttcttacggtagagcttagcaaactcaacaaacaattttttcttattaagttgagagctttcaccttttcacttaaaggaaacacttcatagctgctctttggcatatctgaatcaccagtatcaataattttgagctttggggccattaagtaaaagaaggatgacttgaacacaagcactgtgaatctaatattgtgacaatgaatgggataactgagttggctgctaggtgactaactggcagggaatgtctacggtggggatatgctgaacaaaggaaggatttgtgtcccaggtaggatggggtgggatgaagcactatttcaacatgttatttagaatggcacacaatttaaaacttatgaattgtttatttctggaatgttctatttaatatatttagacttcggttgaacacagagacctgaaatcatgaaaagtgaaaacaaagatacagggcaactactgtataaaactcttataacagtgcctgtcccacaataaaagattggggaaagttagttgttactgttgttatttcgagaacctctcgattttgcagcaaacagctctgcattggagtgcctactacaataaccctgagcatgtgaagctgctcatcaagcatgattctaacattgggattcctgatgttgaaggcaagatcccacttcactgggcagccaaccataaagatccaagtgctgttcacacagtgagatgcattctggtgagttgaatggtactgctagacctgaatggccttgaaatttttttattatgaattatttaatatatacaaaagtgtatatttgacgtacaagcaaattattaagcaaaagaatacaacagacatatggactcatcccccaagaagtagaacatttcagtaccactatttaagaccacatagaggtttcctatgtcccagtttttaaacgcattcattccccctacgccgtgctcattcctgtaccccagcaactacttccctgaatcctgaatttatatttatttccttactttgtttcatacttgtttttattaaacagtgaatagatataagtatcagtaaaatacatgtaaagtataaataataatgaaacaacaaatactcatatactcaatatcaagtttaagaaaaagtatattaccattacctttgaagtcctctgagtggagtacctctcagtctcattctattctctcctttcacagaggcaacaactgtcttcaatcttgtgttatcattcccctgatttccattaccacatttatttgtatccttaaacaatatattgctcagtatttaaaggttttgaatttgatatacaaggaattatattgcatgtttttgtttttgttttgttttgtttttttgcagtgccctattctttctcgctcaaccttatgctgtttattttattttattttattttgagacagagtcttgctctgtcacccaggctgtagtacagtggcatgatctcggcttactgcagcctccacctcccaggtttaagcaattctcctgcctcagcgtcccgggtagctgggactgcaggcgtgcgccaccgtgcctggctaatttccgtatttttagtagagaccgggtttcaccatgttggcaaggatggtctcgacctcttgacctcgtgatctacctgcctcagcctcccaaagtgctgggattacaggcgtgagccaacgtgtccgaccactggtgattttatctatgttgctgcatgtagccatgatatattaattcttactgctatataggattccatcttacgaataagccacacagtattcattctgttattgacagatactttgtttccagttttttgttatttacaaacagtgctgcattgacatttttgaacatatctaggatatatatttaactggttgttataggtgtataggaatgcagttgatatttttgatcattgattacatatctaactaattcgctaaactccttatttgtttcgaatatttatcagtagattctttgaggttttctaatccctctgtcccagcttctaatttacatgctatgatagtccaatagttagtcatatttgtttttaacacacaaattagactttaaagtattattttttaatcgttttttacaacctctgatactaaaagtattattttgtatatgcaatgcttagctctgcattttttttgtatctcaaattttccttctaaagttattattttacatcctgaaatatagttcttagattttttttattattatactgtaagttctgggatacaggtgcaaaacgttcaggtttgttacataggtatacatgtgccatggtggtttgctgcacccatcaacctgtcatctacattaggtatttctcctaatgctatccctccccttgccccccaccccccaacaggccccactgtgtgatgttcccctccctgtgtccatgtgttctcattgttcaactcccacttatgagaacatgtggtgtttggttttctgttcttgtgttaattttcggagaatgatggtttccagcttcaaccatctccctgcaaagaacatgaactcattcttttttatggctgcatagtattccatggtgtatatgtgccacattttctttatccagtctatcattgatgggcatttgggttggttccatgactttgctattgtaaataatactgcaataaacatatgtgtgcatgtgtctttatagtagaatgatttataatcctctggatatatacccagtaagaggattcctgggtcaaatggtatttctggttctagatccttgaggagtcaccgcactgtcttccacaatggttgtactaatttacactccaccaacagtgtaaaagcattcctatttctccacatcttctccagcatctgttgtttcctgactttttaatgatcaccattctaactggcatgagatggtggtatctcattgtggttttgattttcatttctctaatgaccagtgatgatgagctttttttcatatgttttttggccacataaatgtcttcttttgagaagtgtctgttcgtatcctttgcccactttttaatgagttttttttttcttttaaatttgtttaagttccttgtagattctggatattagccctttgtcagatggatagattgcaaaatattttctcccattctgtaggttgcctgttcacgctgatgatagtttcttttgctgtgccaaagctctttagtttcattagatcccatttgtccattttggcttttgttgccattgcttttggtgttttagtcatgaagtctttgcccatgcctatgtcctgaatggtatcgcctaggttttcttctagcatttttatgattttaggtcttacgtttaagtctttaatccatcttgagttaattttttgtataaggtgtaaggaaggggtccagtttcagctttctgcatatggccagccagttttccaaacaacatttaggaaatagggaatcctttccccattgcttgtttttgtcagctttgtcatagatcagatgattgtagatgtgtgacattatttctgaggcctctgttctgttccattggtctatatatctgttttggtacaagtaccatgctgttttgtttactgtagccttgtattatagtttgaagtcaggtagcttgatacctccagctttcttctttttgcttaggattgtcttggctatacaggctctttttttgttccataggaaatttaaagtagtttttttctaattatgtgaagaaagtcaatggtagcttgatggaaatagcattgaatttatatattactttgggcagtatggccattttcatgatattgattctccctgtccatgagtgtggaatgtttttccatttgtttgtgtcctctcttatgtccttgaacagtggtttatagttctccttcagggaactacaatgtgaagaagtccttcacatcccttgtaagttgtattcctaggtattttatttctctttgtagcaattgtgaatgggagttcactcatgatttgctctttgtttttctgtttttggtgtataggaatgcttgggagttttgcacattgattttgtatcctgagactttgctgaagctgcttatcagcttaaggagtttctgggctgagacgatggggttatctaaatacacaatcatgtcatctgcaaacagagacaatttgacttcctctcttcctgtttgaataccttttatttctttctcttacctgattgccctggccagacttccaatactatgttgaataggagtggtgagagagggtatccttgtcttgtgccagttttaaaagggaatgcttccagttttgccaattcattatgatattggctgtgggtttgccataaatagctcttattatttttagatatgttccatcaatacctaatttattgagtggttttagcatgaagcggtgttgaatgttatcaaaggccttttctgcatctattgagataatcatgtggtttttgtcattggttctgtttatgtgatggattacatttattgatttgcatatgttgaatcagccttgcatcccagggatgaagctgacttgatcatggtggataagctttttgatgtgctactggtttcggtttaccagtattttattgaggattttcgcattgatgttcatcagggatattggcctgcaattttctatttttcttgtgtctctgctaggttttggtgtcaggatgatgctggcctcataaaatgagttagggaggattccctctttttctattgtttggaatagtttcagaaggaatggtaccagctcctctttgtacctctggtagaatttggctgtgaatccatctggtcctggacttttattggttggtaggctattaattactgcctcaatttcagaacttgttattggtctattcagggatttgacttcttcctggtttagtcctgggagggtgtatgtgtccaggaatttatccatttcttgtagattttccagtttatttgcatggaagtgtttatagtattctctgatggtagtttgtatttctgtggggtcagtggtgatatcccctatatcattttttattgtgtctatttaattctctgttttcttctttattagtctggctagtggtctattttgttagtcttttcaaaaaaccagctcctggattcactgatttttttgaaggatttctcatgtttctgtctccttcagtactgctctgatcttagttatctcttgtcttctgttaggtttttaatttgtttgctcttgattctctacttgttttaattgtgatgttagggtgtcaattttagatctttcctactttgtcctgtgggcatttagtgctgtaaatttccctctaaccactgctttagctgtgtcccgcagattctggtacgttgtgtctttgttctcattggtttcaaagaacttatttatttctgcttttatttcattatttgctcagtagtcattcaggagcaggttgttcagtttccatgtagttgtgcggttttgagtgagtttcttaatcctgagttctaatttgattgcactgtggtctaagagactgtctgttatgatttccattcttttacatttgctgaggaggttttacttccaattacgtggtcaattttagagtaagttctatgtggtactgagaagaatatatattctgttgatttggggtggagagttctgtagatgtttattaggtccacttgatccatagctgagttcaagtcctgaatatccttcttaattttctgttgtgttgatccatctaatattgacagtggggtgttaaagtatcccactattattgtgtgggagtgtaagtctctttgtaggtctcaaagaacttgctttatgaatctgggtgctcctgtattgggtgcatatatatttaggatagttcgctcttcttgttatattgatccttttacctttaaggaattcccttctttgtcttttttgatctttgttggtttaaagtctgttttatcagagactaggattgcaacccctgctttttttttttctttccatttgcttggtaaatcttcctccatccgtttattttgagcctgtgtgtgtctttgcacatgagatgggtctcttgaattcagcacgctggtgggtcttgactctttatccaatttgccagcctttgtcttttaattgaggcatttagcccatttacatttatggttaatattgttatgtgtgaatttgatcctgttatcatgatgctagctggttattttgtacgctagttgatagtttcttcatagtatggttggtctttatatattggtatctctttgcagtggctggtaccagtttttccttcccatatttagtggttcctacaggaactcttgtaaggcaggcctggtggtgacaaaaatccctcagcatttgcttatctgtaaaggattttatttctccttcacttatgaagcttagtttggctggatatgaaattctgagttgaaaattcttttctttaagaatgttgaatattggcccccactctcttctggcttgtagggtttctgcagagagatctgctgttaagtctgatgggtttccctttaagggtaacctgatctttctgtctggcgccccttaacatttttttcttcatttgaaccttggtgaatctgatgattatgtgtcttggggttgctcttcttgaggagcatcttaatggtgttctctgtatttcctgaatttgaatattggcctgtcttgctagattagggaagttctcctggataatatcctgaagtgtgttttccaacttggttccattctcctcatcactttcaggtacaccagcataggtttgggaaatagtcccatatttcttggaggctttgttcattccttttcattattttttctctaaccttgtcttcatgctttatttcattaagttgatcttcagtctctgatatcctttcctccacttgatcgatccggctgttgatacttgtgtatgcttcacgaagttctcgtgctgtgttttttagctccatcaggtcatttatgttcttctataaactggttattctagttagcagttcctgtaatcttttatcaaggttcttagcttccttgcattgggttataacatgctcctttagcttggaggattttattacccaccttctgaagtcttcttctgtcaattcatcaaactcattctctgtccatttttgttcccttgctggcaaggacttgtgatcttttggaggagaagaggcattctggtttttggaattttcagcatttttgcacaggttttccctcatcttcatggatttatctacctttgatctttgatgctgatgacctttggatgggatttttgtgtgggtgtcctttttgttgatgttgatattattgctttctgtttgttagttttccttctaatagtcaggcctctcttctaggggcctgctggagtttgctggaagtccacttcagaccctgtttgcgtgggtatcaccagcagaggctacggaacagtaaagattgctgcctgttctttcctctggatgctttgtcccagatgggcaactgctagattccagctggggctctcctgtatgaggtgtctgccgacccctgctgggaggtgtctcccagtgaggaggcacaggagtcagggacccacttggggaggcagtctttcccttagcagagctcaagcactctgttgggagatctgctgctttcttcagagctggcaggcaggaacatttaagtctgctgaagctgtgcccacagccactccttccccaggtgctctgtcctagggagatgggagttttatctataagcccctgacaggaactgctgcctttctttcagagatgccctgcccagagaggaagaatctagaaaggcagtctggctatagcggctttgctgcgctgtggtgggctccgctcagttcaaacttcttggaggctttgtttacactgtgaggggaaaaccgcctactcaagcctcagtaatggtgacacccctccccccaccacgctcaggcatcccaggttgacttcagactgctgtgctggcagcgagaatttcaagctagtggatcttagctttctgggctccagggaggtgggacccactgagcaaaaccacttggctccctggcttcagccccctttccagtggagtgaacggttttgtttccctggggttccaggtgccactggggtacaaaaaagaactcctgaagctagctcagtgtctgcccaaacggccacccagttttgcgcttgaaacctagggccctggtgctgtaggcaccctagggaatctcctagtctgaaggttctaaaaaccgtgaaaaaagtgtagtatctgggccagataccgtccctgccggcactgtgcatcacggcttcccttgactaggggagggagttccctgatcctttgtgtttcccaggtgaggcgatgccctaccctgcttctgctcaccgtctgtgggctgcacccactgtctaaccagtcccaatgagatgaactgggcacctcagttggaaatgcagaaatcactcaccttctgcattggtctcactgggagctgcagaccagagctgttcctatttggccatcttgctgagttgtcctcttgactccctttagtatagatctttcggtggtcaactctctctggttttttgtttgtttggttttagtttttttgggacagagccttgggctgtctcccaggctggagtgcagtgatgtgatctcagctcactgcaacctctgcatcctgggttcaagtgattctcctgcttcatcctcctgagtagctgggactacaggcacatgccaccacgcacagctaatttttatatttttagtagagacggggtttcaccatgttggccagactggttttgaactcttggcctcaagtgatccacctacgtcagcctcccaaagtgctgggattacaggcatgagccaccacccccagccaactctcctttttaattgttaagaatgtatgcctcttgaaaaaaaaatgattatcctgtgtacacagtcctaggaatctatttttctcagctctttcagcatattattttgctactttctgccttttattattgctcttaaggagtctgttattggtctgtcattcctttatacatgatgtatcttttctctcaggctgcttttacattttgctctttgtttggcattctacagttttactacagtgtgtctaggtgtggcctttttaaaaaatcctgtttggtatacattctgattattgcatctcagttctgccaaacatatatagctgttatctttaaatatcacctctccttcattccctttactcttgcctttagggtctccaattatatatcttttaaggctttttatctaatcctccatgtcttttaacttctcttttatattctcatctccttgtctctttctgttgcgtcctaggtaatgacatcagatctgtcttcgagtttactaagtttttcttcaaataagtccaacctgttgtttaccctatccattgaactgttaatctttgtgatgacatttttcacttctaaaagttctatttggttctttttcaaatctgcctggtaattttgataatgcttgctataaagatccagtagaaaaattaattaacattgtgaactcactaataaacacatgattaaaaaatctcaaccccattcataaatgaactacaagttaaaatagcagtgaaatgtctttcataaccataagggaaaaatgcagtaagcttgataataccaaatgattaatttctgccagcatgtagggaaataaaaacttttacatattgtcatgggagtgttaattggtaagaccatttggagagtgatgtgacaatacctgtttgaagatatccttcaccccagcagttccccttctagctgtctagcctatggaaaaatctcacacatgtgctacaagggatatgtaaaggaaacattaattgcagcattgtctgtaatagtgaaaaaaaatgggaatagcctaaatgttcctcagtaggaaaatagataactatattgtggtttattcaagcacctcaataattgaactattaccaacatagatatccaaggtatagtgttgagagaaagaattgccaaaggatacatgtccgttgccataatgtaaacatttgaaaacacacatacaaaatttatatattgtttatggatacatacatatatacaaaagtataaaaacatacatctttagttgaatgataacagaaacaaaagcatatcaggcaaaatgttgacacctttttaatctagataatcagtatgtaatggttatattattttctgtactttttataattaaatatgaaaataattttttaaagatttagactttgtaccttttccatgatttatcacttgtgctgagagataatgtagaggtcttatttcgaaaattcctcagttaattcctgtgccaggctgggcacagtgactcacaccataatcccagcattttgggaggctgaggtaggagaattgcttgagcctaggaattcaagaccagcctgagaaacatggcaataccccatctctacaaaaaacacaaaaattagccaggtgtggtgggatgtgcctgtagtcccagctacttgggaagctgaggcaggattgcttgagcccaggagtttgaggctgcagtgagctgtgatcatgccactgtactccaacctgggtgacagaacaagaccctgtctctaaaaaagaaagaaagaaaaaaatacttacaccaaatgtaatttattgaggattccatgtatgtctgaagtctctggttccttcaaatcaggatgctgctccaacagagtctttactgaactggcaagactacgagggtcgaactcctcttcactttgcagttgctgatgggaatgtgaccgtggttgatgtcttgacctcatatgaaagctgcaatataacgtcttatgataacttatttcgaaccccactgcactgggcagctttattaggtacgtgactcaaaggatcaacagtaaaaggaacttcatgagtataggaatatttctgtgccttcccttccactgtttactcccaactcctagttaattattttgatttctaactgatatgttgcattgttttataaactaaattatagtaatataaatttattttatgttaaatattagttttaatttcaacatcatatcttcactttaaatttttgttataaaagtaattcacatttagtgacaacatgtgaatgtaacataaacctcttttcacattcagcgcctatatttttggggaggagggctttaattttatgtttatgctaatactatgatatttgagtttttttctttatattttcctgaaatgccttttacttaacctttttgaagatcacttttatagatgagagagtgtatatatgtgtatgttttatgtgtatgttggggttttttgtgtgtggagtcaatctgagagtctttctctttcaatgaaggagttttacccattaatagtcattgttataagataaataatcaggtctttttttttcctgctatctttctattcttagtgttttcagcttaacgttttgttttgttttgtttcctgtttcctttgctttctgctctttggtatatggattagatttgatgttgttatttgattttgaattgcctaatgttttaggagggtttaggagtggctacttttaaatttatcaaaaactttttaaagcctgaatcagagtcaagagcaaaaatgcatctattgattcccacctatttaagacaaaaaatttagcacagatactcatcactcttttagtacttgttaatgtaatctgagatttccccctaattattataatcttgatcttagtttttaaattacacattatcttttttttaaatgatgtttatatgtgcactcacttttatcgccagatttagaattattattcagatttcatcttacatccctttttatttttcttctggattctgggcttacttggcaaatttgtctccatgtaactaaattgactttttgttctataagttttgctttctttctgcctcctatatagattgtattttgggttctatttttatttccttgtcttacctatatttctttttatctcatttcatttccttttaacttccttccattactttttcatttcactctgttttcttcttagaataccctgtttctgtttcatagaagccatctctttttgcactaagtcgaggataccagttgcctgaaattttcctctggatccttctctagatcattttcagaggtatgctgcttatcttcctgacagtgtttctttttcactttcctatagtatgtttttttgtagtccttactgaatttttccctttatttctcaaacaaaatgatatgtgtttagagtaactatgtggcaaagattgtctttaatcccacatttgtgttatggagaactccatcttagaccacctctggagagcagatagatgaacacaatttccactcaaattacttttctctgcttggcttttatgcagtatatccttgctctgctaatggggcatcttcttcattctccaatatctgaaagcaatagagtgtatgaaatttcaggtttcctacgtatgctactaccaggtttattcattttttaatattttctacagctcttcacttgtggagatcacatcctccagaatgcactacattgtcttcatcgctgccttatcatgcctgcccacttgttttctgagatttgaaatcactgcctagatgttataaaatataaatataataaaagattgtggaaaggagaatatagggatgggaagcctcagagatagaagaggttgtgttatagtttgtccacctgaatagaagagaacagttatgcagttctgtttggttgggcaacggaaccttgagagtaggagcagtgaaggctaagagggcttggctctaaagcaccttcccctcctttgctttaggcagctttataaagtgaagccaggaaatgcaatgaggtgatacctaatatagttttttctcagcctggcaattatacttaattcattcctacctgattgaagcattaagtttttagtaagttttcattctgttctacctcatattaatatgttagtgagaagttagaagaggctgcattgggggctgctgttcagaaaccgttgtgaatgctgtattatgttagtgatttttcttatctttttcatttaaatagattataaattaattaacatcctttataagtgataattacctttttgtgtcttttctcaggccatgcacagattgtccatctccttttagaaagaaataagtctggaactatcccatctgacagccaaggagccacacctttgcactatgctgctcagagtaactttgctgtaagtaaaacaagacaatgctcttttttcttagtgaaaattgttatttttatataattgtagattcatatgtagttgtaggaaataatacaacaagattgcatgtacccttcacctagttcactctgtttttatttatttatttatttatttttccaataagctttttgcactcctacacctaattcactctaatgataacatccaatacaatatcataaacaggaaattgacattgatacaatccctgatcttattcagctttgcccagatttacttagactcatttgtctgtttttatgtagcaattatcttttaacaatggttcatgctgttcactctgtgatgcaagtgatagcctgaggtttttttaagttgttagtcacatctgaagttttatacagattttattttaatgttaagcataacattttactttactgtaagaatacttcatctttatattacttttatagcactaagaacatcttagtgttcagccacgtgtaattgtccttaaagcagtgtggcaaggctttggaactagaacaatctcggctagaatcttgtctgtgcagtttgctaaactgtattaccttacacaagtttcttaatcttagtttcttcatatgtaagatgaggataattataccttttcttccaggattgttgtaaagattagagaaaatttatgacaagtgcctgctgtataccttagcatagagcaggtactcaagaaatagaatgtgctctcattactactagtgttgataattatgtatattatacgtctgagaatgcaaaaacgaattatttccaaaaatactgaatagtattcatagttcttcccctctactttctcatccattatgtccccagtccaccctgcaacatgatagtgtctaggctacttcagcttcctgagtatgaatgaccatcaagaaccagattcatccaaggatgcacatgttaaaacagattttgctgccttctacatgggtatgcatagtgaaacccttcgtttcatcaaattataataatactatcaggccggacacagtagctcacacctgtaatcccagcactttgggaggcagagatgggcggatcacctaaggtctggagttcgagaacagcctggccaacatggtggaaaccccgtttctactaaaaatacaaaaattagccgggcgaagtggctggcgcctgtagtctcagctacttgggaagctgaggcagaagaatcacttgaacctaggaggcggaggttgcaatgagccaggatagcgccactatactccagcctgggcgacagagcaagacttcatctcaaaaataaataaataaataaataatactatcatcaagcgtagtataatttcatctttgtgacctctccaaatgctctattaaatactcagatctctaaaatatcttatcttcacacacttcctactctggtatccagaacaactattcctataatccttgcttcttgtattcctaataacttattcaatttaccacctagagttttgacaaatcattatctattatcacctaacaaagcagtattttaggagaagctttttcttattacaaatagataggaaattaacctgaccgagtctagtcaatctatggaaatcacagctcaacccataaatcaacacaaggctattagataagtcatgttatcccctgtttacagaaaacaaaacaaaacaaaacaaggttccatgagattaaatgacttgctcatggtcttgaacccaaaatttagactccaaatttaatatatatatacagacaccaataattaaataggtgtgctaatggaaacaagaaagaatggtagaacattattctttataatgactcaataatataataatataataattgtattcaaagaaatattttgttggataatctgccaattccagagttgatttttaataattatacaaattatataagctcagtttcaagtcccttgatctccttgtcctctattaactgacaagaaattacaactcgttccttgaaaaatgcagacacattcccctacacacacagagccctgtaaacattcatcattaagtaaaaacatactcagcaaagaaatgtttgcaaattagtaaaagaaaacaaagcaaaaaatcacaaacttttacctcagtaactcaacaaatagtcttaaaagtagaaagcagtgtgtgatgctgtggaaggagtgctgtgatttaaccctggattcttcctttatctgccaccaatatttatatgaccttggaacctacatttcttcatcagtaaaataaggaactggattagatgagcccttgaattcttctttctataaaatactgagaatcaacattttatacatttttgatcagatcacagcctccagcactttttgtctgaaactcttttacctccattcaatcaaaagtttctatgatctttctaaagtttatgtgagtctgagttcagaataaagaggcaatttaaaatgctggaatattaacccccaataaaattgtcaggcactaatagaattgtcaagggtcctaattttttttgttgtttttgttttgtttttgtttttgtttgagatggagtctcactctgttgcccaggctggagtgcaatgatgcaatctcggctcactgcaacctccgtctcccgggttcaatcaattcccctgcctcaacctcccgagtagctgggactacaggcatgtgccaccatacctggctaattttttttatattttagtagagacggggtttcaccatgttggccaggatgctgtcaatctcctgaccttgtgatccacccacctcagcctcccaaagtgctgggattacaggcgtgagccactgcgcccggcccagtcctaatttttgtatgattccatagaagaaggacaattcagtaataaaggaattgctgaataaatatttgttttaatgaattcagcactgcatttctcagtaaccatcaatcagtattcaataaatgcattaaccatttcaaaaatgtttagtaactaatcacatagttccagtttgttctggatttaaggcaaaagcaaacaaacaaaaaacacagtgagagaatgcagaaccttctctggaggcatgcctgaatagatggatctcatgtaaaatgtccaagaaaacatgtattttatgggccaggtacagtggctcatgcctgtaattccagcactttgggaggccaagatggatggatcacttgaggtctggagttcaagaccagctttgccaacatggtaaaaccccatctctactaataatacaaaaattagccgggtgtgatgacactcagctacttgggaggctgaggcaggagaatcacttgaacctgggaggcagaggttgcagtgagccgagattgcaccactgcactccaacctgggcaacagagtaagactccctctcaaaaaaaaaagaaaaagaaaaaagaaaagaaggaaagaaagaaagaaagaaaaaggatggagaagagaagagaacaaggcagaaagaaagatttaaattttggtcattaataaataaaacactgaatacttctgagttttctaactctcactcaaacgatgacctataaagtttccaagcttgattgaagatgattattttccattttgaggatgttgaatgggagagttaggttatgtttatgaagtgttatggacactacaactaatttgtaaggacagaggattgttatcttcgatggaaattgtagttctgtcattaataaaaagataatttaatttgattcaaaagcaaggggaaaatgctttgcttcttaatggaattcacatattattatatgactttattaccacagaaaatactactgttttgtctccattttttaaatcaagttttcttacaggaaacggttaaagtgtttttaaaacatccttcagtgaaagatgattcagacctggaaggaagaacatcctttatgtgggcagctggcaaaggcagtgatgatgtccttagaactatgctgagcttaaaatcggacatagatattaacatggctgacaaatatggaggtacaggtgagaactggtggacacattcaatttgctttcatttaggttccaaagtgtagatgttgctataaaatttgtaaaatagcaacttgaaatcattgttcctaatctaatattgtttgactttggtcttcagttttaagtttgggtttgccaggatgtcactccaaaggttttatttcttccaagtattatggcaaagattagcatgtttctaccaaatgaatggttgcatttggtttaaaaccctggttgctccttagacatgattatggggactcttctgatcatttatctttttgtaaaaaaaaaaaaacctacactttaaaactatccatatttagtagtcatgaattatattttcaaaaatttagaattttatttaaggaatgcacacatctaagtgtattctcaccagtctcctttactgtgctcttttctcagttttgaatagcattaccacatcctgaatctcccatttttagagagaacctcccatggctctaagatgcttcaaagcttcaaatcaaccttgcttgaaaaactcttactagatacttcttttaatttctttctctaatagaagaggcctttacctatgtgttggttaatgaaaggtagtttttctgcctcagtgtcaacttggaggtctcttccttgtgtactgtatcgtacttacaactcagaaacagaaggagaaatcacataccaccacaataacactgaatagaataaaaaatcagtgatgggcttctccatgttattttttttatttgtagaaacatgctagagccatttgcatctactgttatcctgaataagatttttcttggccaccaaaactactgatgcaacagtagggagagagaagggaggggagttgctttacttaaaaaaatctccctccctataccgagacaaccacagcctcaaaaaaaaatattttaagaagacaattcaattttacaataaagactttaactttcaaaagtatttctctatgaaagccttacagcagatcttaaatttctttttttttctttttgagacggagtctcactctgtcacccaggctggagtgcagtggcatgatcttggctcactgcaacctctgcctcccaggttcaagcaagtctcctgcctcagcctcccaagtagctgggactgcaggtggacgccaccacgcccagctaatttttttttctttttgtattttagtagaggcggggtttcaccatgttgcccaggctggtctcgaacttctgagctcaagcaatccacctgcctcggcctcccaaagtgctggggttacaggtgtgagccaccgtgcccggccagcagatcttaaatttcttaaggggcatagtgcagacacataggatattgactttataaatgatctgaacatttaattttttgtcagttttccattatatattcttccactttatcactagctttgattttagtttaactttttcaggtatttgaataaggcatgggcaaggatacttgcactctttgaccaaaagtatctcatatgcaccatggttgaagttcagacataaattcttctcagattcattaatttgctggtttctttcttcaatggggattttattatgtcagagatgccttcctgacatttcttttctgtgaaagtgagttcctctccgtcatccctctacagggtttttttttttccttcccattaaaaagaggtcttaccaatagcaatgtatggacattatttagatcctgacttaaataaataaactataaaaaatgttaaagccatcaggaaaatgtcaatattattgaacattatagaatttctattagtattttttaggcgtgataacagcattatggttttaccagtgattaagctattgtctctcagcttcgtgttgatccttttgtcctttctttgcaatgctgggcctgggtctctgtaaatcacatttcccctttgccacaggtgctcttttagagtccaccaatagagagcattggagggagactggaaggctggaagatggacaagggattacatctttctgtttgtgtcctgctcttgcttttgtctcattttctttttttagaaaaaaaaagttaaaaaataataataatagtaataataagatgggatctcactgtgttgcccaggctggtctcaaactcctgggctcaagcgatcctcccacctcagcttcttcccaaagtgctgagaatatcataaggcagatgaaagcatcatataatatctgtgatatttcagtgatttcacatttgaagagcataagaacccttttcccccaaatgaaaaggggggaacccttttcccccaaatgaaaatttataaaacacctaacatataaagcaagtaagggttgagtggttctgactaaatcagaagtggagcattatccactcgactgtctattccctcagctaagtatttcaggtacctctatagaaagctgttgttctgaagaacatggtttggaaaaccctgggctacatttagttttaaggtgacttctaattctgaaatgctacaattctgtggtgtggcatcaagtatgaaatatactctatagataatatcaatgtcaaatttttttaaaaaataaaatttcaattaagtaaaagataaaattaatgatcatattaaaggaaattccccatttatgactatttgaatttatttttatttatttatttatttgagacagagtctcactctcttgcccgggctggagtgcagtgacatgatctcagctcactgcaacctccacctcccgggttcaagtgattcttctgtctcagcctccctagtagctgggactacaggtgcccaccactatgctggctaagttttgtatttttagtagaggcggggtttcaccatgttggccaggctggtcttgaacatctgacctcaaatgatccacccacctcggcctcccaaagtgctgggattacaggcatgagccaccgcgcctggcctgaatttactttatttaaaaataaccttaggccgagcgtggtagctcacgcctgtaatcccagcactttgggaggccgtggcaggtggatcacctgaggtcaggagtttgagaccagtctggtcaacgtggtgaaaccccgtctctgctaacattataaaaatgagctgggtgtggtggtacacgcctataatcccagctatttgggaggctgaggcagaagaatcgtttgaacctgggaggtggaggttgcagtgacctgagattgaaccactgcactccagcctggatgacagagtgagactccatctcaaaaaataaaataaaaataaccttgaatttagctattgttactccctctttgaaaagtgctgtaagtttatatagaaacttaattttttaaaaatataactttatattatggaaatcttcaaacacattcaaaagtagacagttgtccagtgaactcaatatagctctcacccagcttcaacaattatcaatacgtggctaatcttgttttatttaaccacgattcatttcctctacttctgattgttttgaaaaaaattctagagtcatatcctttcatctgtaaatgtgaatgttctaccctgtgctgtctttcatgttatagcacttcagatatttgaagttactcacgcctgtctgaatcttgtctaggtcaaactaacattcagtcatttaggtcagtggttcccaaattcaagaatggcataagaattactagaggtgtttaaattcagattcccaggctatatggacaaagattctatgtcaaatcccgtagcaagtcctgttgactccacctccaaaatgtgttctaaatcattctgtttctcttcatctccattgcaaccaccctaatcagaccaccatcatttttcactcagtctactgccaaaatccttactggtctccctgcttatattctaatctactacaaatactttctcctcagaagagctagagtgatctgtttaaagcataaatcagataatatcactccactatataaagcccttcaaatgtcttccatcactgactgataggaccatttgtgatctggccttttctatgtttctgacttactccactgtcacttactgtgctgcaactacccttccttccttaaacatacacagtcgttcctgtcctgtactaactcttccctttgctcaaaatacgctgtctttttcatggttcaggtctcaacttaaatgtcagctcataaccaccaatcaaaagtagtccctcagtgattctacatatcaaaatagtttttattactttaattataccaattatcactatataataactttattgatggggaattgttttgtttttgttttgttttgttttgtttttgttttgttttgcttcccttcctagaatgtaaccttatctattgtattctttgctaaacacccagcattataatactacccagcccaaaaatctgcatccaggtttgctctgtggatcaccctttatgaaagagacattgttctaggccttatagagccataatacttagaactggccaaggcctctaaagtgttattgtggctaattcaaacctatagagggatggcataagccaagcattacactggagtaacatagagaggagtcagtgtacatgaaacacatttaatcaaaattactctttaaaacctctggacagcacaagagaggaggccatattccatctcagtttttctccagtgaagcaaattcctgtttcttttcttttctttttttgagatgaggtctttctattttctccagactggtctagacctattgggttcaagcagtcctcctgcctcagcctcccaagtagctgggactatagacatgtgccacctcgctgtttcttaaattgagccctggggaagtagctggcttgtagctgatattgtattaaaaatgcactcaatgcagcaagatgtgcgtgctttcagtaccactggggtacttcagccaactgaaggaacagtgcatgtaaccaatggaaggaacagtagattgatgtctccagtcacatgaccccttaggggcatatgcttattgagtgggttgttgggcagaattgtgtacatcatttaaatcattcctctttgttattgttttcttgctctcttaaagagaaaaagagaaaactaatagctgaaaagagaaaactagtagctgagaagaggataccatttcagaccaacaggatggaaaggaagaaaatagcaagaagagaaaggtagaaggaaaggagaaagtgtgagtaatacatatgaataggaaggaaggcagaatctaaaaaagcaaaaaataaattagtgaatccttaaaatggagattgcatttattcaaaatgatggggaaatcaagagaggaaaagacatataataatttaaaaggtgaagttgttattgactagttcatcactttctgttggttcccttttagctttgcatgctgctgctctttctggccatgtcagcaccgtgaagttattactggaaaataatgctcaagtagatgctactgatgttatgaaacatactccacttttccgagcctgtgagatgggacacaaagatgtgattcagacactcattaaaggtgggctaataagagtactcctaataagtctctcttaacaggtaggaattcttgcatactctgtttaagataaagctttccttagcagaaagctgcacaagtacaaggatgaagggatgatcacacaacatggcatgaggaacctcaagttctactcctagctccacttgttgggagttgcttgatacaggaaaagtaatttcacctgcctgatcttcacttttattttatataaagggggactgattcctagccagtccaatttacaagcttattgtaaaaatctgatgtagacaacgtatgtggaagcatttccataagaataaagcattaaaggaacaattgttattgtttttcttctattcattttaataaatgcatttaaggaacaattgttttttctactcctactcattttaataaaagctatttatattagacattctcattatatttgtgcttttccaggtggagcaagggtagatctagttgaccaagatggacattctcttctacattgggcagcactgggaggaaatgctgatgtttgccagatattaatagaaaataagatcaatccaaatgtccaggattatgcaggaagaacccctttgcagtgtgcagcatatggaggctatatcaactgcatggcagttctcatggaaaacaatgcagaccctaacattcaagacaaagaggtagaaattctgtcttttctatattgtttgctccaaagaatttagagtatttcttctttgttgtaaacataagtaaaacaacagtttacaagatgaagagatcacccacaaatccatctgttaatcatgactattatttgtccatgttctcttccagtctttttctatatatataatttaacatagttataatataggctgggaataattttataacttttataaaagattacatggcatacacatgtatgcatctataaacataaatatatgattttctttttttttttaattatactttaagttctagggtacatgtgcacaacgtgcaagtttgttacatatgtatatatgtgccatgttggtgtgctgcacccattaactcatcatttatattaggaatatctcctaatgctatccctccctgcttcccccatcccacaccagcccccggtgtgtgatgttccccaccctatgtccaagtgttctcattgttcaattctcacctatgagtgagaacatgcggtatttggttttctgtccttgcgatagtttgctgagaatgatggtttccagcttcatccatgtccctacaaaggacatgaactcatcttttttttgtggctgcatagtattccatggtgtatatgtgctgtattttcttaatccagtctatcattgatgtacatttgggttggttccaagtctttgctattgtgaatagtgccgcaataaacatacgtgtgcatgtgtctttatagcagcatgatttataatcctttgggtatatgcccagtaatgggatggctgggtcaaatggtatttctagttctagatcctttaggagtcgccacactgtcttccacaatggttgaactagtttacagtcccaccaacagtgtaaaagtgttcctatttctccacatcctctccagcacctgttgtttcctgactttttaatgatcgccattctaactggtatgagatggtatctcattgtggttttgatttgcatttctctgatggccagtgatgatgagcattttttcatgtgtctgttggctgtataaatgtcttctttagagaagtgtctgttcatgtccttcgcccactttttgatggggttgtttgatttttttcttgtaaatttgtttaagttctttgtggattctggatattagccctttgtcagatgggtagattgtaaaaattttctccagtttgaaggttgcctgttcactctgatggtagtttcttttgctgtgcagaagctctttagtttaattagatcccatttgtcaattttggcttttgttgccattgcttttggtgttttaatcatgaagtccttgcccatgcctatgtcctgaatggtattgcctaggttttcttctagggtttttatggttttaggtctaacatttaagtctttaatccatcttgaattaatttttatataaggtataaggaagggatccagtttcagctttctacatgtggctagccagttttcccagcactgtttattaaatagggaatcctttccccattgcttgtttttgtcaggtttgtcaaaaatcagatgattgtagatgtgtggtattatttctgagggctctgttctgttccattggtgtatatctctgtttaggtgccagtaccatgctgttttggttactgtagccttatagtacagtttgaagtcaggtagcgtgatgcttccagctttgttcttttggcttaggattgtcttggcaatgcgggctcttttttggttccatgtgaactttaaagtagttttttccaattctgtgaagaaagtcattggtagcttgatggggatggcattgaatctataaattatgttgggcaatatggccattttcacgatattgattcttcctatccatgagcatggaatgttcttccatttgtttgtgtcctcttttatttcattgagcagtggtttgtagttctccttgaagaggtccttcacatcccttgtaagctggattcctaggtattttattctctttgaagacattgcgaatgggagttcactcatgatttggctctctgtttgtctgttggcatataggaatgcttgtgatttttgtacattgattttgtatcctgagactttgctgaagttgcctatcagcttaaggagattttcggctgagacaatggggttttctaaatatacaatcatgtcatccgcaaacagggacaatttgacttcctcttttcctaattgaatacctttatttctttctcctgcctgattgccctggccagaacttccaacactgtgttgaataggagtggtgagagagggcatccctgtcttgtgccagttttcaaagggaatgcttccagtttttgcccattcagtatgacattggctgtgggtttgtcataaatagctcttattattttgagatacgtcccatcaatacctagtttattgagagtttttagcaggaagggctgttggattttgtcaaaggccttttctgcatctgttgagataatcatgtggtttttgtctttgattctgtctatatgatggattacatttattgatttgtgtatgttgaaccagccttgcatcccagggatgaagcccacttgatcatggtggataagctttttgatgtgctgctggatttggtttgccagtattttattgaaaatttttgcatcgatgttcatcagggatattggtctaaaattctctttttttgttgtgtctctgccaggctttggtatcaggatgatgctggcctcataaaatgatttagggaggattccctctgtttctattgattggaatagtttcagaaggaatggtaccagctcctctttgtacctctgggagaatttggctgtgaatccatctggtcctggacattttttggttggtaggctattaattgttgtctcaatttcggagcctgttattggtctattcagggattcaacttcttcctggtttagtcttgggagggtatgtgtgtccaggaatttatccatttcttctagattttctagtttatttgcatagaagtgtttatagtattctctgatagtagtttgtgtttttgtgggattggtggtgatattccctttatcattttttattgcatctatttgattcttctctcttttcttctttattagtcttgctagttgtctatcagttttgttgatcttttaaaaaaaaccagctcctggattcattgattttttgaagggttttttgtgtctctatctccttcagttctgctgtgatcttagttatttcttgccttctgctagcttttgaatgtggttgctcttgcttctctagttcttttaattgtgatgctagggtgtcaattttagatctttcctgctttctcttgtgggcatttagtgctataaatttccctttacacagtgttttaaatgtgtcccagagattctggtgtgttgtgtctttgttctcattggtttcaaagaacatctttatttctgccttcattttgttatgtacccagtagtcattcaggagcaggttgttcagtttccatgtagttgagtggttttgagtgagtttcttaatcctgagttctaatttgattgcactgtggtctgagagacagtttgttgtaatttctgttcttttacatttgctgaggagtgctttactatgttgtcaattttggaataagtgcaatgtggtactgagaagaatgtatattctgttgatttggggtggagagttctgtagatgtctattaggtccgcttggtgcagagctgagttcaagtcctggatatccttgttaactttcagtcttgttgatctgtctaatgttgacagtggggtgttaaagcctcccatgattattgtgtgggagtctaaatctctttataggtctctaagaacttgctttatgaatctgggtgctcctgtattgggtgcatatatatttaggatagttagctcttcttgttgaattgatccctttaccattatataatggccttctttgtctcttttgatctttgttggtttaaagtctgttttatcagagactaggattgcaacccctgcctttttttgttttccatttgcttggcagatcttcctccatccctttattttgagcctatgtgtgtctctgcacatgagatgggtttcctgaatacagcacactgatgggtcttgactgtatccaatttgccagtctgtgtcttttaattggagcatttagcccatttacatttaaggttaatattgttatgtgtgaatttgatcctgtcattatgatgttagctggttattttgctctttagttgatgcagtttcttcttagcatcgatggtctttacaatttggcatgcttttgtagtggctagtaccagttgttcctttccatgtttactgcttccttcaggaactcttgtcaggcaggcctggtgctaacaaaatctctcagcatttgcttgtctgtaaaggattttatttctccttcacttatgaagcttagtttggctggatatgaagttctggtttgacaattcttttctttaagaatgttgaatatcggcccccactctcttctggcttgtagagtttctgccaagagatctgctgttagtctgatgggcttccctttgtgggtaacccgacctatctctctggctgcccttaacattttttccttcatttcaactttggtgaatctgacaattatgtgtcttggagttgctcttctcgaggagtatctttgtggcattctctgtatttcctgaatttgaatgttggcctgcctttctaggttggggaagttctcctggataatatcctgaacagtgttttccaacttggttccattcttcccgtcactttcaggtacaccaatcagatgtagatttggtcttttcacatagacccatatttcttggaggctttgttcatttctttttactcttttttctctaaacttctcacttcatttccttcatttgatcttcaatcactgataccctttcttccacttgatcgaattggctactgaagcttgtgcatgcctcatgtagttcttgtgccatggttttcagctccatcaggtcatttaaggtcgtttctatgctttttattctagttagccattcgtctaatctttttccaaagtttttatcttctttgcaatgggttcgaacatgctcctttagctcggagaagtttgtaattaccgatcgtctgaagcctacttctgtcgactcgtcaaagtcattctccatccagctttgttgtgttgctagcgaggagctgtgttcctttgaaggagaagaggcactctgatttttagaattttcagcttttctactctggtttctccccatctttgtggttttatggtctttggtctttggtctttgatgatggtgatgtacagatgggattttggtgtggatgtcctttctgtttgttagttttccttctaacagtcaggacccttagctgcaggtctgttggagtttgctggagatccactccagaccatgtttgcctgggtatcaccagcggaggctgcagaacagcaaatattgcagaacggcaaatgttgccgcctgatccttcctctggaagcttcgtctcagaggggcaactggctgtatgaggtgtcagtcggcccctactgggagatgtctccccgttaggctattgggggtcagggacccacttgaggaggtagtctgtccattctcagatctcaaactccatgctgggagaaccactactctcttcaaagctgtcagacagggtcgtttaagtctgcagaagtttctgctgccttttgttcagctatgtcctgcccccagaggtggagtctacaaaggcaggtaggcctccttgagctgcggtgggctccacccagttcgagcttcctggccggccgctttgtttacctactcaagcctcagcaatggcggacgcccctcccccagcctcgctgctgccttgcagttcgatctcagactgctgtgctagcagtgagtgagtctccgtgggcgtgggaccctctgagccaggtgtgggatataatctcctggtgtgccgtctgctaaaaccattggaaaaagcgcagtattagggtgggagtgtcccgattttccaggtaccatctgtcacggctttccttggctagaaaaagggaattccccgaccccttgcactttctgggtgaggtgatgccccacccttctttggctcacactccatgggccacacccactgtccagcaagccccagtgagatgaacccggtacctcagttggaaatgcagaaatcacccgtcttcttcatcactcatgctgagagctgtagactggagctgttcctgtttggccatcttggaactggggcctttttttttttttttttcctcccaggctggagcgcagtggtgcaatcttggctcactgcaacctccacctcccgggttcaagcgattctcttgcctcagcctcctgagtagctgagagggtacttggcctctcaggcatccaccaccatgcctggctaatttttgtatttttagtagagacggggtttcgtcacattggccaggctggtctcgaactcctgatctcaggtgatccgcccgcctcggcctccctaagtgctgggattacaggcatgagccaccacacctgaccctattacatgattttcttttcttttctttttttgtttgttgagatggagtctcgcttcgtcacccaggctggagtgcagtggcaccatctctgcccattgcaacttctgcctcctgggttcaagtgattcttctgcctcagcctcctgagtagctgggattacaggcgcacaccaccatgcccagctaattgttgtatttttagtagagatggggtttcaccatgttggccaggctggtctcaaattcctgaccttgtgatctgcctacctcagcctcccaaagtgctaggattacagatgtgagccaccatgtccgacctattacattttcttttcttttttttttttttttttttgagacaagagtctcattctttcacccaggctggagtgcagtggcacaacctcggcttactgcaacctccacctcccaggttcaagcgattcttctgcctcagcctcccgagtagctgggattacaggcatgcaccaccacatctggctaatttttataatgtttttagtagacacaggatttcaccatgttggtcagtccggtctcgaactcctgacctcgtgatccacccaccttggcctcccaaagtgctgggattacaggtgtgagccaccgtgcctgcctattacatgattttcaaaccacattttgtttacttaaaattgtcaccgttttctcatgtgatatataatctttttaattatcatgaatgcttaaaattccaaggttccaagaactttatgtttaatagcttattcaatccttacaataatcttataaagtagttactattattattctcattttacagatgaggaaattgaagctcatgtagtttaagtagttagcctaagataacaacagtgggggaagcttggggggagatttaatatccaaactatgctcttaacccaaatataggttaaataagtaacttcctattgctggtcactttttcactattataggtaatgtttcagtaattatctttgtgcatttaacttttttcctttgggattatcgcattagaataattccccctaagtgagattatcaaatcaaagcaaccaatcgtttattaatatgattaggctctcatatatactgccaaactgatttctaaaagattcaggttaatctttactttccccagttgcgtagtattaatttatctcagtttagccagtattaacttttttgctaattaaattattttaactctttaaaaatatttgcatgttaattatgttttccaagtcagaaaattagctgtccctattaactcaagtccctatgaactcattgaacaagtatttatcaagattgttactgtatgtaaaagtaacaaagaaaagtatgtaaaatatggtccatgtctttatgatactaggaatgcatcttttttttttttttttttgagacagagtctcgctctgtcacccaagctggagtgcactggcccagtctcagctcactgcaagctccacctcccgggttcgcgccattcttcttgcttagccttccaagtagctgggactacaggtacctgccaccatgcctagctaatttttttttgtatttttagtagagacggggttcaacatgttagccaggatggtctcgatctcctgatcttgtgatccgcctgccttagcctcccaaagtgctgggattacaggcatgagccaccgcacctgggaggaatgcatcttttataatttgtagtacttttaatgttttaccaagttgccagttttttacataagtagaatattaagcatctttccagttctattagctgctatgtgtattgctttggattgtctacataagcaatcatgcatgctatctgtgaataataacatttttatttcttcatttccaatctttatacttttcatttctttgctgtgccatattgaattggaaccttcaatacaatcttgaatagaattggtgataattggcatccttaattaattctggtttctcagatggcaagctttcaacattttaccattgagtaagatgttgctatagatttccttatattcccacttgccaagagtttttttaaatcatagttgggtttttgtcaaatactatttatgcatttatcaacaagatttttttttcctcttttctgttaatatggcaaattacattgactgattttttttttagatgttaaacaacccttgcatttctggagtaagccccatatatattatgtacttttatatactgatgtattttacctgctaatattttaagatttttgcgtctatgtttatgagagagattggcctataattttcctttcttgtattatagttgcaaggttttggtagcaaggtaaggctaaccttgtcaaaaaaaaaaagttagaaaatagtcccttgtttttattctcttggagaataaaattggtattacttcttccttaaatgtttggaagaatttcctcttgaagttatctggtgttggggttttctttgtgtaaaagttttaaataaccaattcaattccattaattattcagattttctaattatttttctttcagcttggtaagttgtactttttaaggaatttattcattttattcaaaatgtcaaatgtatttgcataaattttgtcacacacatattcccttatcttttttatgcctgtaggacctgtagtgagttcctcttgtttatttcatatattggtaatgtgtgttttctctttcttttttaaaaattttctttattccttacctggagcactaaaaaaaaaaaaaaaaaaaaaaacttgatattcatctcctcaaaggacttatttctgtctttgtggattttctatattttgagattttgggtttttttgtttgcttgtttgtttgtttgtttcttaagacagtatctcactctgccacccaggctggagtgcagtggcatgatcatggctcattgtaacctcaaccttcccaggctcgggtgatcatcccacctcagcctcttgagtaactgggactacaggtgcacaccaccacacctggctaaattttttgtatttttagtagagaaggggtttcaccatgttgcccacggctgttcttgaactcctgagctcaagcaatctacctgcctcagcctacgaaagtgctaggattacaggcatgagccactgcaactggcctgtattttgagtttgtttactatttcattggtcttgctcctgtcttttttattttctaacttctaatttctatttcctaatttctattttggtttattctctgacacatagattatttagaagtgtactgtttaattttcagtcagttgagtgttttctcattttttaaattgattatattagttatgtattgctgctgtaacaaattaccacaggtttagtggcttagaacaacacagatttattatcttaccattctagatgtcagaaattcaaactgggccttactgggttaaaaatcaaggtgtcaccaggactgcttttcttttggtggatctaggagaggatccatttttttaattttttagtttctcaaggctgcccacattccttggctgatgaccccattcctccatcttcaaagccacattggctggttgagcctttctctgtatcacttatctgtataattcttacactcaccctcctgactccctgtttcccttataaggacccttgtgattagatcaggcctacccagataatccaggataatcttcccatctcaagttcagctgattagcaatcttaattccatctacaaccttaattcttccttctcatgtaacataacatattcacaggtaccaggcactaggatatggacatctttgtgagggagtgcattattttttttggaactttatggcccagcatatgattgattttgggaaatgttctatgtacatgtgaaaagagcactaactctgtccttgttggatgcagtgttttttatttatatatatatcacttagggcccatttttcaaagtctgttgtttaggtcttatatatctttactgctcttttgtctgctctatcagttgtttttaaaagataagttaaaatcccactatgactatggacttgactatcttcctttttaattttgtcgatttttcccttgtatatttggaagctttgttattagatgcacacaagtttagcattgtgatatcttcctttttgactcctttaacactatgaagtgtccctctttatgtctagcaatgcttcatctcttctttatctttcatgacattgaactttttaaagaatacaagccatttattttatagaatttgactcaatttgtgttagtcttatgttccctcataattagattcaggtttcacatttttggttggaatattacataagtaatatgaatccttctaagggtattacctctggagatatatgatgccccttatcacagccttaattggccaggcatgttggctcacgcctgtaatcccagcactttgggaggctgaggcgggtggatcacctgaggtcaggagtttgagaccagcctggttaacatgacaaaaccctgtctctactaaaaatacaaaaattagctgggcatggcggcgggcacctgtaatcccagctacttgggaggctgaggcaggagaattgcttgcacctgggaggtggaggttgcagtgagctgagatctcaccattgcactccagcctgagcgacgagagcgaaactccgtctcaaaaaaaaaaaaaaaatagtgttaattatgagctcttggatcaaatatcatttgctttctccactgtatatttaatattttccctttttgtaaataagcaatttggaaaaatgattgcttatattaattttgaattagcataaataaccacatatccaaaaatacttactccagatgtacttgatttttgtttatgcttatagggaagaacagctttgcattggtcctgcaacaatggataccttgatgccattaaattactgctagactttgctgctttccctaatcagatggaaaacaatgaagagaggtaagttgttgttgacttttttttttttttttgagatggcttctcgccctgtcactcaggttgggttgcagtggcacgatcttggctcactgcaaccttcgcctcctgggttcaagcaattcttctccttcagcctcctgagtacctgggattacaggcatgcacgatcacacctggccaatttttttgtatttttagtagagatggggtttcaccatgttagctagggaggtctcgaactcctcaccttgtgatccacccacctcggcctcccaaagtgctgggattataggcgtgagctaccatgcccagccaagttgttgacttttttttaaaaaaagtgctctttatcatacatcctttctaccagattttttaaatctcaaggttagatattgttcagaaataataactatactcataataaaacattacactaagaaatactgagccagaatagaagagcaaaactttcatgcaatgttgatttagaatcatgggatcttatagctcttcagaatttcatctattgcctagggcaagcatgtattttgcagatgagaaaattttagtcctgcttctgacttctggctaacataacgtcagtgaaatcctgattgactgggcccaggagtacatttaggccagcggaatgtgttatatattccagagatttctcttgatgaagaggatattatcagtcagtagacaaagagatgccaccatgtagcatgaaaacataaggagaagctaagatgaaagttcagggtttaatctaaatgcagattgcatgaataatgtaaggtctggagaattatattagggttattgaccaagaatccaggcccaataaaaaggaccaaacaggccaggtgcggtggctcacgcctgtaatcccaacactttgggaggccaaggcgagcagatcaactgaggtcaggagttcgaaaccagcctggccaacatggtgaaaccccatctctactaaaaatataaaaaagttagctgggcatggtggtacatgcctgtaatcccaactactcaggaggctgaagcaggagaattgcttgaacccaggaggcggaggttgcagtgagcccgagatcatgccactgcactccagcctctgcaacagagtaagactctgcctaaaaaaaaaggaacaaacagaatgtgaagtctaaggaatagcgattcttggtggtgttagatctaggaagattcttataatttgtaggtaacaactgagtttgtgatcacacttccatacctgaggtcctgttacaggaaaggggtcccgatccagaccccgtcagagggttcttggatcttgcacaagaaagaattcagggcgacttttgcagtgcaaagtgaaagcaagtttattaagaaaggaaaggaataaaagaatggctactccagagacaaagcagccttgagggctgctggttacccgttttcttatggttattttttgatgatatgctaaccaaggggtggattatccatgcctccccttttcagaccttatagggtaacttcccaactttgctatggcatttgtaaaatgtcacagcgctggtgggagtgtagcagtgaggacaaccagaggtcactctcgtctccatcttggttttggtgggttttggccagcttctttactgcaacctgttttatcagcaaggtctttatgacctgtattttgtgctgacctcctatttcatcctatgccttagaatgccttaaccttctgggaatgcagcccaacagctttcagcctcattttacgagatcctctttaagatggagttcacatgcctctgacaatccctctgacctaggtctttgtgttagttttcatgtttcatggatgctctaactaaaatggctcctgctataataccattcccatcctcttagccaccacccattctttctattagttggtggaaaactttattgagaagggacttctctacgtccatctcagaggaaacatgttcctgttttctagaaccaacccctttaccacttctttcagaaacttccctcattagagggagagctgaagatgtctccctttgaaactctaaaaaaaaaaaaaaaaaaaaaaaagaaagtttaagaatccttagacttagtgatgacttgttttgtttctataaaaatttattctgtgtaacagcatttaccgcctgactgctatatttttaaggaaacaatgaaattttttaactcaatttccatttatatgctaaaccttgaatatgagacctaagtaactgcatgaattaaggtgtttactgcctcccggaataaacatatgttaattacagaccaaaagaccaaaggaaaaatcctcctaactttacttgccaaactatagataaaaagagacagtggcaataactcagtctttgttaatgtttcatcagcaatgtaccttgatgtacaaatgtcagaacttggcactgccttttacgtttattgacattccagtttaggcattctactcatcccatcagaccattcccacatggcaggtccaattgtatcttgtctgttgtctatatccacattgtttcttggttggttaccatcagtgtagtgctaatttttacttctcatacattgacactagtcagttgatgaacaacgtatagacataatttttgccaacttctgctgactttcagtcaataactatctgacacactcaccccaaccctgatgggaatattcacagcatttgaatttttctaaattgaatttgggatgaaaaaagattcagtagtaataatcacaatgtgttttatgatcacacttgttttaaatactgggtatagacttcaatcttaaaatgatgctagatatttggattgtgtctctgaataaaaaattgagaatcctaatttgaataaaccaattacaaaaatatattttttgagaaaattgggtaaatttgattatgaagtggtccttagattttactaaggaattcctgttaattttgttagtataatgacattgtgggtatgcccatattatttactgatgaatacttaaacacatagagatgaagatgttacaggaaagtggtcccgatcccgaccccaagagagggttcttggctctctcgcaagaaacaattcagggtgagtctgcagtgcaaagcaaaagcaagtttattaagaaagtaaagtggtgaaagtacagctactccatagacagagtagggcgttcccgaaagtaagagaggaacgtatccaccctaagtacaatacttgtttatatacaggattaaaaaaaagattatggggagatgtgctgtgctacaagggtttgtgataaaggattcattttcttaattactacatttttcaagaatcaatattattatcttcaaagcaaaattaggaatgcctttgttctccagatatcgggatattaggactctctcaagtctgggtctgtttagtaaacatcagtatgttcccttaacggtaaacatctagaggctaggaatacctttctgggaatgcagcccagcaagccccagcctcattttcgtagccctcactcaagatggagtcctctggttccaatacctctgacaaaatgataggagttccgagattagctataaaatactctagcaaaaataaaaaggaagggtctagatgaagcaaatgtagcaaaaaattgttaaatttaggtattgagtgtataagtgtttattatgttattctctctaccttttttatgcttaaaatttttcataataaaaatatatttttttacataaaaatatttaagatataattttcaatccaaaagcagcctaagaagtctagttcttctctttacaaatgaggaaacaaaagcccagagaagttaagagaatgcccagggtcacacaggtcccctgactcccagatcagcattctttagggtatattaagctacatgttatttccttttgtaatatttgtaggtaaaggaataatttgggccctatattttataaactaaattttgttaatcctgcttatatattatgtgaaggatactacctattaataattatagaaaaaatgatcaaacttaccaaatacgtatgttgtttgcacattgatttaagaaacagttttattctataggaaacatactaagtaattgatatatgtgttgtggaaggttactgaactgggagacatgttatcttagttctagtctgcattctatagaaacaatttacataacctttggtaagttgcttaacctctctggagctgttcatccatttataaaatgaaggtattgaactaaatgacctctaaaattcaatttagctctactattgcatggtttaatgactctatgataattttttccattagagaaagtacagtcaagaaaggcattttagaacttgtagcaaaattttttttaattctcctgaatttaaaaaatgttatccacttataaataatgttttaaagtttatgtagatgcctctcagatggtccctgaacagtaagtggcaaatgaagctgtcctaaaatagaggttccttaatttcagtgtttggggtttcttcccaaactcagtttccttactaaagtgatcaaaatactcctatagtgaaaaacctcttccttttatgtcttaactgtgactgttaggtaagttttgaagataaataattttttttctataatcagatgattttctatgtctagtcatgcatccatataatcatccttttttctgcctcataaatcatctgatgttttttcctaagaccttttatgggtttggctggtcagagtcatcctgagaggaatcagcatcagtggtggtcatgggatggtcatagatactagtttgggtcctatggagataatatttttgataagcagctgtggtattgcaagccatacagcagtgaatgtcctgtaataataacaatcagagctgacatttattaactgtttcctttggaccaggaacattgctatcctctttacacttatttttccattttctcctcatgccaagtctgcaacgtattacattgtttaacagatgaggaaaactgaggcttagagatataaagtaagttgtttaaaaagtgatagtcatcgttaccattgttggatggtagaatttgggggattttttttacttcaattttttttttgcagtgttttgagttcataaaatctatatcattttgacaaagtagtaatttttgtttaaaaaaggaaattgtatctcccagatatgaacagtggttaattctcagggtgggaatatggatgatagctattttcctctgtatatttacccaattttttatgtttccaaaatttatgaagaaatttttttaaaagaataggctgggtgcagtggctcacacctataattccaacactttggtaggccaaggcagaaggattgcttgagctcaggagttcgagaccagcctggagaacatggcgaaatcccatctctacaaaaatacaaaaactggccgggtgcagtggctcatgcctgtaatcccagcactttgggaggccgaggtggtcggatcacctgaggtcaggagttcgagaccagcctgaccaatatgatgaaaccccgtctctactaaaaatacaaaaaaaattagccgggtgtgatggcatgtgcctgtaatcccagctactcgggaggctgagatgggagaattgcttgaacctgggaggcggagattgcagtgagctgagatcgcgtcattgcactccagcctgggcaacaagagcaaaactccatctcaaaaaaaaaaaaaaaaaaaaaaaattagccagccttggtggtacatgcccgtggtcccagctatttggggggctgaggcaggaggactacttgagcccaggaggagtcgaggctgcagtaagctgtgtttgcaccactacactccagcctgggcaacagagtgagaccctatctcaaaaaaaaagaaaaaaaaaaaagaatgtgccgaaaacagcacacctagaaagttgccatttgagattcaaatatacaacaatatgacaataatattcatcgtttctaaataatgtatttatcaaaacagtgatgtatatacactgtacaaaatttaaaaggatgttcactgaagactcaatgttcctcctacccctgcctctgagacagctagttttcctcccccagaggcatcactgttagcagtttcttggaaaacttctgaaaatacatttttcatagataaacatacagggatatattttttatacaaatggaacatgccataataactcctgtttcttgcttttttctttgtcttcatttgacatcctggagattgtttcttatttattcatatatagcagtaatgactgcatatacagatatcttcattatatggatggcctgtgcattgtttaagcagtcctctgttgatagacattgaggttgtttctattcttttgctatgactagctgtacttctatgagtagccttgtacataaagcatttcacatgagagcagatctataagataaattcctaagagtgaaacggctatgtcaaatggcatatatacatgaataattttgataaatattgccaaatcatcctccctagaagttaaagtagtatatgaaagagcctgactctctctgtccttgctagtgcagtgtgttactaacttttctgatttttgcaaatctgatcatcattgaaaggtactctctcatgttagtctaattcatatttctcttaaatgagtgaggttcaacatttttatgtgttaagagctattagtactcttctgggaactgttatctttgtctttgatgtcttttttactctgtaaaattttgttatttttatgtagtcagatttgtcaatcttcttttatggtttccgaaattttttttttttttggagacggtgtctcactctgtcacccagtctggagtgcagtggcatgatctcagctcactgctgcctccacctcctgggttcaagcaattctcctgccttagccttctgagtagctgggactacaggtatgtgccaccatgcctggctaatttttgtatttttagtagaaacagggtttcaccttgttggctaggctgtctcgaactcctaacctcaagtgatctgcccacctcggcctcccaaagtgctgcgattacaggcgtgagcctctgcgcccagcccttttatggtttctgaattttgtatcctttttttagaaaagacttccaacatcattttttaatcttcctggtttcttctggtactttcatggttcctttttaaaatatttagatctttgctctatccagaatttattttggtataaaatgtggttataagaatctcttttttttccccagatggctacctggttgtcccatcactatttatttagtaatccatcttttctgcagaaatttaaagggccattcttatcatatactgaatttctccttttggagttctgttttttacttcataagcattaactgtcagtaatcatgggctcaaatttacaaatctcacaatattttcactacctttttagatggggcagggaattatttggcacatgggaaagaagagaagtgatcatgtctttccaataggcccctatttgtttgccagggagtaaaactcaggaactgacatggttagcagcacaaagcacctgacccacagtcatagtcaaccttgttttgtgcccctcggagaaaaaaagaatagccctgttatagagaaggtggctttgcctggggaatattccacatcttagaatgaagtttccttctgctgcataataatattttcagtttaactgtgccttaaattacattctaaaattaaaaaaaaaagaaatcttcctcccacttcagatacacaccccttgattatgctttgcttggtgagcgccatgaagtgatccagttcatgttggagcacggtgccctgtccatcgcagccatacaagacatcgccgccttcaaaatccaagctgtctacaaagggtacaaggtcagaaaagccttccgagacaggaaaaatctcctcatgaagcatgaacagttgagaaaagatgctgctgccaagtaagtatgagctacgcagattgcgttttcgccacccagaatcagggtggaagtgggggtgtggggggtgctggggtggccaggagagggaaacagatgagaatctgaattactgttggtccctgcaaccggtcatcttccctcttctcagcactccgtcttctggaaccgaggctgcagtgaaggacagaggcctaacctctgctgggtagtgattcctctagactagtcccaatgtttcagcccagggacaaaccactcccacccatgggagggagttggggatgggattgcttcctagaataagctgtaaagaaataactgctcctcttacccttcctctctttccaaaagaaacatgccaatatctagcctactttcactagaccagtctaagtctggttttaatttgattaaagcaaacaacttggtttttttttccactcagttctttttttttttttttttttttttttttctgagatggagtctcacttgccgcccaggctggaatgcagtggcacaacctcggctcactgcaacctccacctcccaggttcaagcaattctcctgccttggcctcccgagtagctgggactacaggcgcgcgccaccacacccgggtaatttttgtatttttagtagagatggggtttcaccatgttggctaggctggtcttgaactcctgacctcaaatgatccacccacctcatcctcccaaagtgctgggattacaggcataagccaccgcacccagctttccttcacccatttcttaacacatctgtactaaataaagtaatttactcaagaaatattgattgaattcttactatacagacaaaatgcttggctagagcccagagagaaaatggcaactaaaaaagcaaaatcccccctgcctcaaggacttcgcattttttttggacgatgatacaaaatagctgtctgtgcctcttgcacattctgattatttcacataaatgattgattttaaagctgggtgcggtggctcacacctgtaatcccagcactttgggaggccaaggcaggcggatcacttgaggtcaggagttcaagaccagactggccaaaatggtgaaacaccatctctactaaaaatacaaaaattagctgggcgtggtggttagcacctgttatgccagctactcgggaggctgaggcaggagaattgtctgaacctgggaagcagaggttgcagtgagcccagatggcaccactgcactccagcctgggcaatagagtcagactctgtctaaaaaaagaaaaaaaaaagattgattttagattatacttaggtttgccttttctttgatagatatgttgggtagaagtatttcaaatagcagcagtgcatcacattagcaaatacagataccaaaaactctgatgataaagatgtggacaggcagattctttttttttgagacagtctctcgctgtcactcaggctggagtacagtggcatgatcgccactcactgcagcctccacctcccgggttcaagcgattcttatgactcagcctcccaagtagctgagattacaggcttgtgccaccacacccagctaatttttgtacttttagtagagatgaggttttgccatgttggccaggctggtctcgaactcctgacctcaagtgatctgcccaccttggcgtcccaaaatgctgggactacaggcatgagccactgtgcccagcctgggcagattcttgaaagataacttcctggctgtatctcgaatgtttctaaatcttgagtccttctaactcttaaatcctacatcttacccacaagggggaagcataagtgtactaaataatcattaaaagtaataataagaggcaagataagtcattttaatgagaagttaaataccactatgtactggaatgctaatcatcatgtcagccttcagtaaatagagaaacataccattttctgtgactctaaagctactgaagtagatggcatccgaggaaatactatgttgtactcttctcttaatgatgccctcttcctttcacttttgccaaagaatccagtatcaacataaagcctctacacccctctttttccagccttcttataaaagttctctgcatgtgagtggcaagcataagtagataatacacatgacaaattatcctgagttgcaagtaaatgatctctgtaaagggatggaatgttgtatttccttctactgatgtttccataaactccagtttattgtgtgacaatctattttcaaaatttgtagtcatacctacttgaatataaggtgggactcaacaaaggcaacacaactgactttgtatgtcccctaaagggaggctgtagatctctaagagatatacttaagtggtggagaaactgatttcatttgttctatttctcaaaagttatttcttaaaatctgagtcagtgtttaattttgcgtttaattcttgcttgaagaaacaaacatcaggatgctaaactcagtccttgctgctgctgcctcattgactaagctggcccaggcacagcatgtcacctcggtgtacctttcccagtttattatgttaggatggcagaaatcattttcctcaaaatgaggatgtgaaaggcacttattaaacttaagtaaagtgatttctaatttactgaaagagaaaccgggagagaaaaagttatagcgatatttactaagacaggtaatgttagaaaatgctatttaaggaatatctataatcaatttgaaagcactttataattcacactgcactgcctatgttgttgccaaaatgaacattactataatttacctgccaaagcacacggttgagtgtacactaaaataaaaccatatttatgttgatcacccttcttccctgaagctccctttttgccaggttcttatttcactcaaatctcagatctcctgtaactctctgattctcccttctcacatcttttaaattattccatctccacactgcagtcagccttgaaggcaaactttttagacttctgctcatgctatacttttttccattgaaaatgtatctactcttaaattttaaattaattcatctctgtagatagccccctaatctgtctcacatcctgacctcctggaactctaatctcatatcttcagttgcctactgggcatttctgctatgcttttgtcacttgccaacactttagatcattggacgtttccatttgcatgtcctgttttcactataacttcagactctgcaacacaccgacatgcaaatgcaagcagcccatcaccacagtctgtctctcttctggcctttttatgtgcttgctagtgctgctaccattgattgtatgcattccccctttgatagccttttgctttcattcttctgtgccaccaccactctatacaaaccctcgttcttcttttttttgagacagagtctttctgtcatccaggctggagtgcagtggctcgatctcagctcactgcaacctccacctcctgggttcaagccattctcctgccttagcctcccaagtagctgagattacaggtgtgtgccaccacgaccagctaatttttgtatttttagtagagatggggtttcaccatgttggctaggctggtgtcaaactcctgacctcaacccacccacctcagcctcgcaaagagctgggattacaagcatgagccaccacgcccagccccctcattcttaaataccagccatggtgctctgtaagatccttcaacatttctttcacttccacttacatttctaagtctcatttctctccactaccaccaccctctcacttgatgtctcagccatcctgaactttcttcacttcacttactgggagacctgagctccttcctggctagtatatgtgattatgtttctaagagtttcatcgtcacgtccagttttggtaacccagttcaaactcttgtgatgcttaagtcccttctacgagagattgttctgtgtccccaaaaagtcaagtgcaagaagtcctgtacctctcaagatagcatattccattagtggagggctctgtctagcaaaagttcttttctaccctttggtcttgaagctacccctggaagccaaagagaaaaatctaaatcctttttcataaaccaactttcagatttttaaaaaactgctcataacacttccattgctactgctcatctccttttcacttggtaattagtcaatgctcccgtgaacatcaccagattgttaatggttggcccatgtgtctgactcatctgctcacaaagtcatctggcccatggggaattacttccatagttctatttcatgccattccacttctctgagcctcagattttcatcagtaaaatggaaagaggttttcttaattcaagatgggcttcagggatccatgggtacctgaaattgtacacagcattttgtgtgtcaggagcacatatgcatttcgtgggagaggatctatagatttttttttatcacattctccaaagggggtccatgagtcacacacaaaaagacaaaaaccactggactaaatgatctctaacgtccctcccagctctaacattctgtaagtcaaaggtcctaagacacacgacattttcttattcccttgagagggagttaaagatcaactatttctatgcctgttattcagtgacaatgaagagataaaaatctgacaaacccctagacaccatgcaacaccaactgaaaaggttagagctaaatcttttttgtctcatgaggtaatattttcctctcactggaaatgatccaacagaagtggaattatcatctctccacaatcgtatataaggaattttttaaattatgtgaagatgcctataatcacagcactttaggaggccaaggcaagaggatcgcttgagcccaggagtttgagaccagcccagcagttcaagacatagtgagaccacgtctctacaaaaaaattttaaaactagccagtgtgtagtggcttatacctgtagtcccagctactagggaggtgggaagatcacttgagccagggaggttaaggctgcagtgagctacatcacactattgcactccagcctggaagacagagagagagaccctgtctcaaaaaaaaaaaaaaaaaaaaaaaatttatgtgaggagctggtctctgagatctcttctgagtctctgctcatgcatacttctccctctgcctgaaataacctctcagtttattcctctctcattcttcatatgcagcctttttctccccgtttaattagtgagtgtctcccacatcctcccatagccctatatagttacttctcctttagcactcatcacatctagaactcactgttggcaggagtgtatgggtctgattccctgactcgattgtcagtttcttgagaacagggactgtgtgttatgtacctccacatctctagtaccttagaatgtttggtatatagtaagcattcaataaataaatgttcagtaaattcccctacaaagggtctaaaaccttacataagccattgatcactgtaggccttagtttccccatctgtcaaacggaagggttagaccaaatactctcttaggtttctttcagttcttatacgtgactctccgtaagtgtagaactttaacttgtttgccttgctcaaggcagcaaacacattatataccactcatcctcacaatgctctttgacacttacatattcattttgttttccaactccctgaatattggtcatgagaaaattatcatttgacagattataacagtctgtgttctgattttaaaaagaaagagcaaaggggctcaccgctgtccatacttgaacatgaaaccatgattctgtaaacttcttagactcaaactgtttacaagtcttatccctgccagatttagagaatattgggaagaacaaatgcaggtaaataccgtttcttgcttagaagatataaggaagtttagccaaatagttgacgttaatttgtctctaggaaccaaaaacatacccgtaagaaatggaagccggattgaataatgtggattttagatattacaaatatagataaatattaaaaagtagacatgacagctgtccttaatctcatttcataaatgtggagatgggcacacaaaggttagcctgcctgaagtcacacagctagtaaggaagagagatggcacatgaatctaagtctcaaggccaagctacctaccattacttggttcaagggaatccttctaccagccaagcccatactagaggctgtccccagatgctagcaaccatctgattgaataaccatctgtatcattcaattatgccactgttgatcccattcgttgttaagagagtggtgccaagccaccattatcaattctataatataattcaataacgctcttcctattaccctcaaaactaacagaacagagcacaccaatattctcctaaatccttgagaaagttacaaatattgattggtccctagcctacaccaggacaattaactagaatggcagcatttaggcaaagctgggttaaatcagtatgacaggacacactaactagacttctcttttctgtggaagcattttaatcacatctctcagacctcactaggtgttgtattcatggcaatggaaacctgaatattcatgggatgggaaagagcctgcctggttctgcagtgtctgatagaattaatttcttcgtgtcaaaagtgggcaaatagaactctcttgtgggtcgcagtatttagaaggcacatagtggggtagaaaaaatatcaacttccataactccaactgtgcagggccagagtcgagagtttgccatattgtgcaaacaaatacatccactcctgagatgctgaaaccatcgtacgttcaagtcatttaagttactgcccttgatcagcttttgttaaaatttgttaaaatttctgatcactcaccttctttttagcccttttcttgctaaattttcatccaggctagtgatttgtaaaaatttctatctgtgggtcttagatttggttttagggggctttgggggaatatctctgccccacaatagccctccagcaatgtgaagcagcgttgtgtcttgtaaatcttttcttccctgggtagacagccccagtcccatcagctgatagtctggaaactcctcttcaccctgtggagcacaggacctgaaatagatgttgtcaaagatttgatccccagttgactttctcactttcttatcctgtaagcctctgaagagctgcaaaattgctctaaaagagacagtacaaaccagactaaattggaagcccattagaagctgtcatctagccaatttctcttcacatagtaggtaggaaaaaaaaaagagagtgaaaggtgggactagtttatccactaatattctgccatgttaataattttcctgcagaaatgttgcttgctgtgtcatagaactttttttaatttttcatatcaactagaataatctttttctgattttttttctaaactttacaagtaaaatagatctttataacatagcacaccttaatgattaaagatctttgacatttcatcataacttaagaaaaaaacatttaaatttcaggacaattattgaatctaagagctaaggactaaacactacgtcgaaagctagttatggctgagtgtggtggctcacacctgtaatcccagccctttgagaggctgaggtgggaggatcacttgaggccaggagttgaagacaagcctgggcaacatagggagaccttgtctctacaaaaattttttttaaaaattagcctaaaagttcaaggttacaatgagctatgattgcaccactgcattccagcctaggtgacagagtgagaccctgtttctaaaaataaaaataaaaaagaaagctcatttttaaatgctgctaatggttagtttgaagtggcatccccagcttctttgtatgacccaattaattttttaaataatggaagaagattaggtgaaatttttaaaaacaattctgtcatggggatgaattttaccaggagataaagcagctgcgttctatcttggctctgtctgtagtttaccatgcagccttgggtaagtcacttacctctctgcctgttttcttatctaccaaatgagggtgtcaccctcaataaactggtttcttcaaactcttacactatgagcaatggttctggaccttttccccagggagagacatatatgtggggtcacgttcaactctcagaagctgaattgtgtgtgttgttgttattgctgctgctgctttagttttaaggcagcaatatagataaaataggatacaagttatgcataatttccagttttaatcccactccgttttttctcagtgatcactgctattacatcaaagaaccactggtctgaagaacttcacaattgtgggccatgtgccacctagaagatttttttaatgcaaaatgcatcaatttaaaaaacattaattatatttgtaagaccaggggctaattattcattcagatgattgcattctgtctcctaattctgcttacgtagttctaccaaaatgaaaaatcacccccctggtatcccccctccaaagcaatctccagaagccaaagccctcttgctttctggatgtcttgatcactttaaaaggctggatcccctgttcctcatgtggctgcctttgttgaaggcccagaaaggtttgcagtgataaggtttgccccggggctggctacagagaggcttcttggaattgaacaagagagctgttgggtttcctaaaaagaaagaggagactgctcaaataacaaagtctaatttatcacctcagagtcccccttaatggcagtgagatccatataggtgccaacccagacagccacccacatgtgtctgtctaaagagccaatatcattctcttaaaacagccctgctcatcggtgctgataaaaagctcagcacttcctctgccttcctggagcaaggctattaaatctattagcagcacttcagccacccagatgcttccaccttcttctgaaaagcagccttgtcccagagagatcacactgaaatggcacctgcttgcatccgtatgaatctcaggctccgagatgacaggctgtccggctggcctgtagaccacagtcattagcaggtggcaaagatgtcacaaaaccagagtcaaataaaaacactagagctgtacaggagttagcacgacccatctggccatgttctcggtaatgggactcagtagaaaactattatataagcaagcttggaccccagatcaggggctactccatacaggaagaaagagtttcagaaggggaatttaacaagttgacaaggttgtaaatcaaaatgtaacccagatgtatgtcagctggggctttcctgtcgcttgagatctaaataagctttgcttcaaatgccgtagtccatagcagtctggattctatgactgcttggaggcttagggtctccgccttgtctcatgcttctgtgtctgatccttagctctgcaatttgtcaggttgcctataaagaaggcatgctcatgtgtgagcaaggtgggccttacaaaaaattggtgtcattgtggagaatcacatttcatattgtatgtttcattccatctagtggtatagtgaacagtccatattagactttcctgtgctcttaagcctggctactcaaggtgtggccagagggccagcaacacctggatcacctgggtgcttgctagaaatgcagaatcttgagttctctctagcctaagtcggaatccataattaccaagacaccaggtgattcagcccaataaagtgtgaggagcacagaactaaagtccttttcagccgggcgcggtggctcacgcctataatcccaaccctttgggaggctaaagctgggggatagcttgaggccagtagttcaaaaccagcctgggcaacaaagtgagaccccccctccccatctctacaaaaaatttaaaaattatccaggtgtggtggggcatgctactcgggaggctgaggtgggaggatcgcttgagcctgggagttcaaggctgcggtgagctaagaaggtaccactgcacagtgcactctagcctaggtaaaagaccgtgtctttaaaaagataaataaatacaaaatataacatttcttctatcatatattaggtctttgttttcctggctgtccccttctgggtagaagattcctcaggagaggacctgaaatctgtggttgtcatttctgtatcttcagtgcccagcagagagagactcagaaattaagtgtttttcctcctgtctttcccttgggaatccctacaagttaacagcaatggtcaaacaaatcctgcccctaactcggcccctttgtcttgagttaggggcctgggctacctttctgagccacctcagacccacctgcctcgcccagctactcatctttagacgggcccctgctccccagcccttctctgttctcctgctacccaagggttccagctttgccaccagctacttatgtgtgactttttgaaaatcaccctaccttctgggtctcatctgtaaaatgagtggatctgactcattagctagagctgtcaacggcagcatctgcaactcacaggtgtgttttaatcactggcaaggtactttgcaagtgactttttatatgatcattaaggtttgatgggcttttttaaatgaatagagcagattcaaggttatccctttgactgtcattctcggtagcattctggtgtgctttctgaaacaggagaaaaatgggtggagttacaggtagctccagggatcacacataagcttggggcacatacaccgttgggagtgtgttatgtttcacacagaaaagttgcctggttatctgtcatgtgtctcaacagcacaaagactgatctataaacttttctgctccatcatcttttgggctataaggcctggtgtaaaagagatggtttttattttatctggagaaaagactgctcttggaaaatgcaaatttccaaatatctcctgtgatgtagtagctcctcttaaaatttaaactcacacagagacttgaggaggtgatactctttaaattttttcatcttcttctttggctttgcttccagaaagcgagaggaagaaaacaaacgaaaagaggcagaacagcaaaaaggaaggcggagcccagattcctgcagaccccaggcccttccctgtctgcctagcacccaggatgtgcccagcaggcagagccgggcccccagcaagcagcctcctgctggcaacgtggcccaaggccctgagccaagagacagcagaggatctccaggagggtctctaggcggagccctccagaaggagcagcatgtttcctcagatttgcagggaacaaactccagaaggccaaatggtaggtgtattgcctttgtcatcttctgccggcccatggactgtgggcttttttgattggtgtatttagaccaattacacttaagataattgttatattagcacctaggaccgccactttatgatttgtgttctacttgtttcctctggttctcagttctttttcttttttttcccttcctgtaggttacttcagcatttttaaaaattctatcttgattgatttatggttttttgttttcttttcttttttagagtgaagtgtgaaaacctcacttccattcactttgtccacttttacgtttcattgcttaggtatcggatggtgttataaattttgtttcaatcatgaaatacaatttataaaactcacaaaggaaataacattttatgcgcccgcctgtatttctgctcttctgttgtttcttcttccttcctgatgctctaagattcttgtatcatttcctttctgtatgaagagctttctatggccaatctttaagggtatgtctgctagcaacaaattctttcagttttcctttgtctgagaatgtttttatttgattcctgaagaatcattaagccagatatagaattcagggttggcagttcttttcttttagcacttgaaaaatattgtgccatttccttttggcttccatggtttcagatgagaaatccactgtcattcaaattggtgtttctcagtaacagtcctaggtaatatgtcatttctctctggctgctttcaagatcttaaaatttatcattagctttcagaagtttaatatgatgtgtcttggcatggctttttgcagtttatcctatttagagtttacttgtgtgtcagggatccccatgatccccatccccaagactaccaccaggtttggtgaggttggaggatttactagtttgactgagcatatagttgtactcccagttaggatttattataacaaagggacacaaagcaaaatgagcaaagagaaaaggtgtatggagcaatgtccagaggaaattaggcacgagcttccaacggctctctcccagtggagtcacacacaacacgtttaattccttctgcaataaattgtaacaaccagtcagacaatcttttgttgacaaagaaagctcacatgaacctaggactccaggatttttatctggagtcagtcacatagataccctctgcctagcatatgccaaaattccagactcccagaaggaaaggtgtgcagcacgaaccctattgtttgcacgaagcaatttaaacacactgagctactcttataagttagagaacggtaggagctttcccaaaatctaagtgcaaatgccaacacagtgaaaaaggcaaataatgtcttcgtattattatgaaaatagccctgaccttatggactttctcagaaaggggctctggaacttcatgattactgaattcagggcttggacagttcaatctgtttctttgaaccttaacttccttagctataaagtgagggtatactttctacaccacaaggtagctatggatagaaataattcatgtagtgtacttgttatagcccataactcatcataggttttcagtaactattattattgagccactcattaatctagccaagaacaactacagaaaagtatacataaaatgactacaggccgggtgcagtgactcacacctataatcccaacactttgggaggctggggcaggtggattacttgaggccaggagttcaagaccagcctggccaacttggcgaaactccatctctactaaaaatatacaaattagccaggcatcgtggtgcatgcaactcaggaggctgaatcacaagaattgcttgaacttgagaggcggaagttgcagtgaaccgagattgcgtcactgcactccagcctgggtgacagtgagactctgtctcaaaaaatatatatatctaaaatgaatataaacatttctggaatataattccataatccactttacagtgtaatccttaaggattatatactcatgatgctttggtacatattcattcatttattcatccaaccagctttaattaagctcccataatgtgacagccatgttgaacttccttgagttctttcttagcttggggcctttgcagatgccactccctctaccttattttttagatatcagggataatgtttcttcttctgttcaaccaatatctccccgctaaaggaggctatagtttcctgctattgcttccatacttctcctatacttccctcttataaagatcatcactttttactgttattactggtttacttgtcattttttccaccaaactgcaagatctgtaagagtagggttgcttccattatctactgctgtataacaaaccacacaaaaacaaagtgactttgaacaatgacaatttaatttttatgattctattttggttgggaagtttgtttacgggcttcatctggtctcactcatgtgtctgcattcaggtggagagtcagtggaattccatgtctaagatatagtcacttaaatgtctagcaattgatgctggctatcagatgggattccttgactctggtttacgtggttttcatcctccagtagactagactggcttccttacattgtggtctcaggacagcattttcagaaagcgaagataaaagccacaagacctcttgagaaatagactctagaatttgcacacattatattgatcaaagcaagttacgagaccatcccagaccaaatgatgtcgagaaatagattccacctttgtgcatactaagatgggaggaatttttggctattaaacaatctgtcatagttcctatttggtcacagattattcacattcctcccacatgcaagatattcttaccccttgatatggattggctctgtgtccccacccaaattcccagtgttcggggagggacttggtgggaggtaattggatcatgatagtgagttcttacaagatctcatggtttaaatgtgtgtggcacttccccgctcgctcatgctctctcctgctaccatgtgaagaaggtgcttgcttcccctttgccttccaccatgattgtaggtttcctgaggcctcccagttgtgcttcctgttaggcctgtggaactgtgagtcgattaaacctcttttctttataaattacccagtctcaggtagttctttatagcagtgtaggaacggactaatacatccctatctcagtaccccaaaatctcatcctgattatctcatcacacttgaagtctaggattttaagacatgaactagatgtggttcaggttcaccagctgggactctttctgattcagagaccaatgagccaaaaagatacattatcaacaccccccacacccaacaaacagtggtaagacaggaacagaataaccacagtagacaaaagagggtggaataggaggcgtatagcagccattagtccgtagcaattctgaaaaccagctggtcacattttaccagggcccctactctgaggtaaatattccttgattagggtctcatattactcctggtggcttcctattccattgttctccatgtctcttggctctgctacctgaattcttggctctgctctctgagaagtccttccttttcctaagaaatgcccatgtttgcagctgagtagctttctcagcctatctcctgactataggatactggggccccagaggcttctttttgatttgaactatgtcaccagttcaagcttgtggtactctcaataatgcgattatctcaaaaacttcatgggtttcctgcgaatctgattggattcatttcatatttcaaaagccacatccattatttttcaaacaagctttgctctaatttgagtggcttagatttctgtgggaaaatgcccttgagattcttagaaatttttttgtcgagctgagagggcctattatgtaccacctcaaatatttttgagtcttaataaagggttgtacaaccatacttttttttttttttaagacagggtctcaccctgtcacccaggctggagtgcagtggttcaagcacagctcactgcaacctctgcctcccaggttcaagtgatccccccatctcagcctcccgggtggctaggaccataggtgtgcgctaccatgcctggctaattttttgcatttcttttttgtagagatgagatttcatcatgttgcccaggctggtctcaaactcctggactcaagcaaaccacctgccttggcctcccaaagggctgggattttataagtgttagttattgtgtccgccctgatttgatctttatgctgaggcctatgagactcttttgctggttggaaagaataaaaatgttaaaatagttttattttctaacccagcacatcccgggatctttacattatctctaaattttgcttacaaacggagcagtttttccttcattttatttgttttctccccatactttgtcatatgtagcttaaaaagcagttgacattttgttctacattccacctggaaacttcctgaactgtatctacagctccattaggtatattttctatcttctatgttactgcaagtgacaattttgccagttaattctgccactgaataacaaggttcacttctctctagattccaacagcaatttcttttctgctcttcgagccttcaccagcagtctcttcattgccttcccagcttctgctcaccaaccagtccaaagtcaataccctgggttttgtattttaagacagtacctctcttttatagatataaatatctgtgttggttatctcttgtggcataataaaacactcccaaaactaagtggcttaaaacaacagaagtttattatttctcacagtcccatgggctacctgggcagttcctcttctcgatcacctgggctcattcatgaggttgatagaatttgcacaagatgtggccaagatggccgccttcatatatctggcaattggtggtggctgttggctgtctctattctcctttatatggccttttgttctccagtaggttagactatcttccttacatatattgttctcagagcagtactcttgagagaaggcagaaactgcatgtcacccagtttatccattcacctactgaagaaacatcttggttgcttccatgttttggccgttatgaataaagctactataacatccctgtgcagcttgtatggacataagttttcaacttatttgagtaaatataaaggagtgtgattgctggatcttatgtaagaatatgtttagttttgtaagaaactgccaaactgtcttccaaagtggatgtaccattttgcattcctaccagcaatgaatgaaagttcttattgctccacatccccaccagcatttggtcactgttttggatttttgccattctaataggtgtgtagtggtatcttgtagttttagttttttttttggcccggtggggtgggggttgcatatatgtgaaacattgtaacagctctaagagtcagagctatacaaaaaggtggagccagagaagtgtctctcactccctcttcatctctactatccagctcccatttctcttttctttccacctctttcccactcaactcctgcaggtaatcaatttctttagtttttgctttatgttttctatatttctttttcacaaatgagcagatataggtatattttcttatatccctttctttctttctttgagacagagtttcgctcttgtcgcctaggctggagtgcagtggcgcaatcttggctcaccgcaacctctgcctcccaggttcaagtgattctcctgcctcagcctccggagtagctgggattacaggcatgcaccaccatgtccagctaatttttttgtatttttagtagagacagggtttctccacatcggtcaggctggtctcgaactcccgacctcaggtgatctgcccacctcggcctcccaaagtgctgggattacaggcgtgagccatcacacccagcccatccctttctttcttacatgaagagtagtatagtttagatagctcttttgcacttaagagtattttattttacattattgagacatagtctcactctgttgctcaggctggagtgcagtggcacaaacagctcactgcaccctcaacctcccagcctcaagcgacctttcacctcagccttctgagtagctgggactacaggcatgcactaccatgtctggataattgtttttttgttttatttttagaaatggggtctcactatgttgtcccggcttgtctcagacttggctcaagcaatcctcttgcctcagcctcccaaggtgctgggcccactgcacccagccagaacagttattttaaagtctgtttctgaaaacacattatctggataatctatgtgcctgttttattaagaattttttttttttcagacggagtctcgctgtcacccaggctggagtgcagtggtgcagtctcagctcactgcaacctctgcctcccgagttcaagcgattctcctgcctcagcctcccaagtagctgggactacacgcgtgcgccaccatgcccagctaattttcgtatttttagtagagacgagatttcaccatggtggtcaggctggtctcaaactcctgacctcatgattcctgcctcggcctcccaaagtgctgggattacaggcatgagccaccgtgcctggcatatttttcagtttagatgttgtatttgtttttcaaatctatccttttctcgtattttaaacttcttttgtgtgtttaatcaacgtgtgtgtgctaacgttttgagagatctgatcttgctattgtgttaactgttgcttatggtacattgtttcctcatgcattttgtgattttggattgtgaagtcattttcagaggactccgttgtgcagcctgagttgagggcatgtcacactaaagcaatattgtgtttgcttctgtgaggcatcctgggatatctccatcctaagaccagtttttatagtaatatctcctatggattgagaataaatgaataccaagcccatgtaaggaagacgactttggttttaaattcttatgggagactccttaccccatccagaacctgggctgaaacaaacttccttgtcatctctaagtgctggagagcagattttaaaatctggattatttccaaaaggtatatcccttcaagagtgctggcttcatgtagagtcttggttccagttaactttcttcctgcaaggactcattttctgttcttatgtagatgttaaagcacagccagatatttaataagaccatctgttgcccactccaccaccattacctgcctagacagtcactggatcagctcacatacttaattgctttgattttcaattttctctttgtttttggcctccagagttcctttattttcttaaaggcatgacagtgctttccaaaggatatccactatattttcgttaaggcgagaagggcttcaggttatctaacctaccatattgctggaaatagaagttaaaccgtttttttcctagtctgtaactgccactattatggtgatgatataggctaagtctgaatattttatgtgaacatattaggaaaattatcctactctgcaagttttggacaatattttttctttgtttcctcaagaaacagccagagaacattctaaaggccaatctgcttgtgtccacttcagacccaatgaaggcagtgatggaagcaggcatccaggagttccctctgttgagaagtccagaggtgagacagctggcgatgagcggtgtgcaaaggggaaaggcttcgtgaagcagccctcctgtatcagggtggctgggcctgatgagaaaggagaggactccaggcgggcagctgcaagccttccaccgcacgatagccactggaagcccagcaggcggcatgacacagaacccaaggccaaatgtgccccccagaaaaggcgcactcaagagctcagaggaggaaggtgctctccggctggttctagccgccctggcagtgcccggggggaggcggtccatgctgggcagaatcctccccaccatcgtacaccaagaaacaaagtgacacaagccaagctcacaggagggctctattcacatttgccacagagcacagaggagttgaggtcaggagctaggaggctggagacatctaccctgtccgaggactttcaggtatctaaggagactgatccagcacctggtcccctctctgggcagagtgtgaatattgaccttctccccgtagagctccgactgcagataattcagagagaacgaaggaggaaggagctgtttcgcaaaaagaacaaggcagcagcagtcatccagcgcgcctggcgaaggtaggaaaatggggtgctgccgcatctgtggttctttgttactgatattctcaacatgacatctgtgctctttgatgttttcccagtgagttccatgtggtggcatggtaaggccaattttatagagcctacccatgaaattcacaccagatcctagtaatttacattgtataaaccatttggaagatgtttttgcctagaaagatgggaaagtgctcaggacagcatggggtaaaggaaaaagccctgggtttgtaaccatgaaatgtgaggttcaggtaagctctaacaggttatgtgactttgggcaaatcacatggcccccctgaccctctgcttcttcatctgtaaaacaggatttaataattgttgcacatgtcctgttaatatgacaggttgctggaatgagataatgcacgcttcattaattctaaattactacacataggagatactttatttttattcttatgtctttactacccaggaactagtcatactccaaacacctaaaccagggtctggatataacagattgagtgactaaactgtattatgtaaacctgtctgagcatctaccaagctcaaaatacatagtaggcactgggagtgggggtgaaggctgtcctaaaagcctgaaacagactcccaatatagtagagacaaatgccgctaggggatgattatgggaggacttgaggggtcttattgctacaaatgttcacgtctcataatctctttcatcctgaaagcctcactagagcctaaatctaaattaggccttacagtgatgaatgtccagagagaagctggacccatcaccaataggtgggagttggccgggcagagtggcttacacctgtaaccccagcactttgggaggccgaggagggaggatcacttgaacccagggttatgagacgagaccaccccaggaaacacggccaaactccgtctctacaaaaagtacaacaattacctacgcatggtggcacatgcctgtagtcctagctatttgtgaggctgaggcaggaggatcgcttgagcccaggaggtcaaggccacagtgagccatcaccatgccacagaactccagcctgggcgacagagtgagaccctgtctcaagaaaagaaataggtggaagttatgtcgccgccatcactggggagaggaagacggatggggagggagacaaggcaaggaaataatgcggcacaggtgtatgagatatcgaggttcccgtcaggagaaaaaggaagacgttctctccttaacattggcagggagaaaactagatagattcccaggaggtccagggagaggcctccgttcatatcataccagagactgcctaacccagagccgggtgatctggtttgtgcttgcacaggctttgcaatgtgttctccctatgtctgtttcagctcttggccattaacaaagtcctctcatgcctgaccccatgtgaactcccaaccacaccaggaagccatcatgacagggagcagtatccccatttttcagacgagaggaaaaactgacttgtccttttggtgcagatccagcacttgaacctctggctgactcaaatccaagggcctttcccttacattattagtgaagttagtttttgctgtggtcaagctaagggaggtggaggtgggccccatgcactttgcctgaaaataggctggagaaggctgcctggttggtgtcacacacatcagggtaaccaggagaagggtgatgttactactaccaattgttaacatactagtattatttattggacacttgtgccactgttcaaactagttttacctgtgcatgtaatcgtcactgataaccctgcaaggtaggtattgttcttatccccgttacacagatgaggaaactgaagcacagagaggttcatcaactcaccaacattacagagcaagtgccagggctggctttgagccaagacagtcggcctcgaaagccacaggtggaaatggccattgcactctgtgggacatgcactggctaccatccagatgaactttttaagtattctggctaaaatctaggatctaaacaagccagcaaggtttaccacgccagaccccacagctgctccctacctgaaatgtctccttctccgactgtctgactcctttgaagagtcagaagctgacaggtcctgtcagtaagtgaccagagtagcaaatgagccttcagtcattcccccaagaacagtgggcttatggtctaacatgcccacctgcgtaggtaactacacaggccccctctggatgtgccattgtgcaattctgaggcccaaaggacttctgggattgttgcacattgcagaaagccaagtctggtgacagtaaacacacttttattgattctattatattttaactacattttctattgtaaatacaggagcctgaagcgctgtcctgcaagtgtatctgatagcaaacctaagcagtgagggctggggcaggggtcagggctggacactaagtgttcagtgcaggctgtggttataggggacaggtggaggatggagaaaaggagctggaaaacaggcagggaagaagtgggcaaaatgaaccttgggtcctgagaaaatgaaacttgatcttaaaattgtcagtttaataaccaagtaagatgactattttaaagattgaaacaggatcctggacaagctgagcaggaaaggtgctgctgggcccactgagggctgacaccattaacagcttcagccactacctgggcttccccccaagttctgtgcccacaagagcagaaggtatggaagacagcatttcaaacaggagaaactgaattatagcgcggtagtgccatacttttctctagacttggctttttggaaatgtggtacgtattctagtagagggatgccatggtgttaccctccaggacagaaggaagagtagtgtaggctgactgaaatcagcctttggggaaggagggaggggctgcaccaagcgctgcaaggagcttttagcagacttaggaaaaagattacttcccatttggtgcagcccaaatgggatcactgtaaaatcagacatgaagcctgttgctctctgcagctacctataggctcactaggaataaagacagatacagataataaacattgctgcagctttcctttggaggcctcaaaatagttgttgtgctcagtaagtttgggagtgcatgtgggactgaaaacatcaaataaatcctagatgtaaatatagccatcatccccattcctcacccactctaaacccacctccaacagacttatcttagtaagatgcagctcatacctttaccactctaaagccccctttcgtcaccaaagacacagtgcttccacattgtgttactgactttctggcacaaatgcctctatctatctctgctgatgccagttctgctacgtagaatgcccttctctgcctggtaagctcctattcatcttttaaaatccagcacaaatattaaccttgtgaaaccttaccaaaccatcagtcagtcctgcatctgtttgcacaaccagctccttgctcttgcacagtactctcatgccacacgtacctctttacacagcagcctgttccactagtctgtgagctccttgaaggcaaggaatcatgattgaatcctagttcaggaggtgtttgataatggaaaaagaattccacattcaacatgctgccgccaaaattaggaatgggagcttgaatgaacctaccaggaattcagcaaatactactcctatagcttctagaaaccttaaggaaatttagttttctcagtactgtgatcttaaagcctctcctctcctctgacccaaccagctaccagctcaggaagcacctgtcccaccttcggcatatgaagcagcttggagctggagatgtggacagatggaggcaagagtctacagcattgctcctccaggtttggaggaaggaactggaactaaaattcccccaaaccactgcagtaagcaaggcccccaagagtccatccaagggcacctcaggcacaaagtccaccaagcactcagtgcttaagcaaatctatggtaactgtccttctgcctactttgtagttcacaagtacccccagagtaccacatcagaatctgaagtagaatttaattacattgggtaaacttccattcagataaattaggttggtgcaaaattaattgtattattaaaaatggtcaaaactgcaattaattttgcaccaacctaatatttctcaagcaccatttcattcctgcctcccagcgatactgggtcataattgtttggtttcgtgaggcattctagcatctcagcccagagtgccctcaagctttactgtttaaacctctccagacccctgcttgagtctcctccttgcattacccatttggagcattcacgacttagctagactctgcctgtatcactttgacttttcctatgctgagatgttatagggttgcccactatgagaatgctcaacacccatgcactatagtaaatatttgttcagcagattaactgctgtaaattgaaacattttcagctctgcaaagagcccatccaaatagacccagtagagttcaagaagccttgctggctcaagagaaaaaaagataagcaagagcacctttagaaagatctcctacagcatgaactttaacattcatttagcaaaatctcaggactttaccctgggcctacatgtttccacaccatacctaacttatcttgacacacacctgcaagctcaagcctttaccacaataaggaattcagaagttggtcaggccaaacgtatccctggccaaagaaaagtaacagttgttggttcatttcaggttgttctcacgaagggaaaatacatcatcctacaagatctgtaaaagcctcttctgtgctgcgtctcaactcaggtaaggcagccactgcaaagcagatggtggggaagaacatggggaagcattttcctttgtttcatccccaaagacagaagacattagaacagatatggccagggttttccaatggtcatttgatttcatgggattattactgtagccaacatctgtctccctaagaggcaaattattttcacaactaaaagctattattgttaacattaactccaacagaaataaatggtagctattattgatcacttttacacattttttcacacaaaggaaataaatgaaaatactgtcactcttcaaaggaataccttgggaatccttgttccattttggtgtcacactatgatcccctatttccttctccaagatgggaagaacaccatgaagagaacactgagagcatgtacagcccaggctcagctgtgcgtgctttccctcatacaggagaagctcagggaactttcttttcagccaccaagacaagagtgttttacttagggccccctcattcacaccagcattaaatatgggtgataagttcattgctgtcagcagctaatgccaggtccagtgtttctcataggtggctatggcaacacgctcccccctgcctcctcgatccacacagtcatcctggaggaacagagtgcagctgggaaggtgaacaatgactgtcagcatgaactttaatattcatttagttttttgatggggggcaaaaacctggaggtgggggacagagtaattactgccaaatctttaataagtgttggacaactcatgtaatacagacaggctgatcagggagtggtgggtggggtagttagaaactttcaaagcaatcaaggcctacagtctgtttaaaaacaaacaaacaaaaaaacccctttcattatacctgagcaaattaaagaatcatttcaaaaacagaattgtcagatatcactaccagagaagtggcatttagacaatcaaatactagcataaattagataactggatcatttttcagtcttaagagaaaaacaaatccaagactaccagaaatcttttaaaatggtgtttagcagcatataagttttttagttaagagactcagaagggacagagtaaataaattcaaatcaatacttaatgatttcttaggacttcatatgaacaagcaacttacttgtcctacacatatttttgactggtttaaaatcagacaaggataaaatgatcttttcctaaccccaaatttaggagaacacacagttttgttaggctcaagcccacccacattaagcattaaccagttaatgaatattattgctctcaccctccaacttggagaaccccccacccccgaggttttagtagtgcctttaccacttaaaaaggaagaagcagaaaggtggatatagcaaaatgccagcctccttgggctgtttctccacatgtatttgggaggcagcaaatcaatccctgctcatgtcagtcttctacacccagccttgcaaaccacccaccaagaatctcagcagagccttttattgacacacaacacacacacacacacacacacacacacacacacagccttgcaaaccacccaccaagaatctcagcagagccttttattgacacacacacacacacacacacacacacacacacacacacacacacctgggcctatctctttaacaataaaagaaaagaactccctttaaagttccattccagtgaatggaataactgtgattattagtattggtaccccctgtacaaatccagtttattcttgctcacctgcagaggggtacacagatgacaactccattcaagatacagtgaagacagccaaaaacaatagttcacattaaaataattttgtggaagttataaaaccaagagagaaaaattgagacatatgtttgttacttttaaaaactactaaacctttaatgtatttgcttatatgctccataaaaagttagaagcaaaatatagcaatgtcttcagcaaggtttctcatatggggcctcagtatcatttgtcaaagtatatcactaatgttttctgactgtggcatcctatacatttgttaattcaaagtcataaaaaggcctcaaaaatccattttgatattcccatcagcttatcattcatgaggatctgaatattttctaacaaacctattttctagaacaactattcaaagtgtaataggagagttaaaagatgtgttacctgtttatgtaatgtgttatgtgagagacccagagagagaatctatttgttatttcaggcagactgaagaccgaggttctggtaccagctccccaagtgcctgctctctcttaatcaagtctcccttgaagagatgtcccatatcttgagactgcaggaaatataaagctattatattaagtcatcctgcctctacagtaaactggcccatcatcccagggatagcctaaaccgaaatccttcttcctcaacaccaatgaactattcccttcagccttaaaattaataaccttaatatctatctggtatttgtttttaacagtgagcaacctacagtgtatacatctccttgagaacagtggaagatcaaagaacttttcttataacctgcaatcagctactcagccaaaaaacaaaacaaaaccttgactgcctatggaggaagactgtgttcgggggagctggcatagctagtgcagagttcagattttctgctgataatcttttacaccttgggaaaactttaatatccgtacctgaagg

SEQ ID NO: 15636 - DNA, 202933 bp, Homo sapiens; identical to SEQ ID NO: 1204

SEQ ID NO: 15637 - DNA, 31616 bp, Homo sapiens
cggctagcttcagcgccgtggggtctgacctggctggatatagtgtaccggcccggcaggaggggcggcccggtccgggttgcgcctcctggagccgcccccgggacgtcagtcctggaggaggcgagggtgagtaggagggggcctggctggggaggctcagatcattcggtccgcaccgccttggcccctgctgcagactcacggccttcctggcctaggctgtggcctgagcctccatcattggcctcctcgcccgctgcctcttctttctgctctaattcctgcattataaagtcagagccaccactcggggcctcagttgaatgagtcaatgacttatccctgattgtctctgagggctcctgtaaggagtagatgtggtacgggatgggatagcacgtcgtaaactggaaaactgtgtgagtgattgctgctaaggcgtggatcgctcctccagtataattacgaaattccctagcaaagcagtcgaggatcctaacttggccccaggtagctctgcggcttcttctgcaaacactcagtgaggtccaggagcccacgcgatctctgcttagtacccaggaggcacactgtgcttttgtggttctccctgctcccgcctttgcttcagctttcctgctgcctggaatggccttacccgttctctctctggaatgctatcttaaatgtcaccatctctgagaacttcccgaacaaccaaccctttagtcctaatcagaattactcttcctatgagtgtgactgcagtacctctagttttgtacggttataattattagagcatttattacacgggcttgttgtataattaggcaaggatgatgacacctttgcattttatagcactttatcaaagtggttttgacttttttctataaaaaatgatttattttcttaaaggggcaaaaaatacattttttcttaagaaaaaaaaagagccctgcataatggctttctcagggtgacaaaattagacagtgatagagccaatactcttaccaaggcggcctaactcctagactagtgctcctatctcttgtccacgcccctgacagagcccaaagatagttgaaatgggaaattttaaaagagcagagacttgtaagtatgaactcattattcaagaaattaaactttgatcctgctcactttttggacttagcactcagcctgtgacctttcatccaacaaacatctactgagtactggctatatacctgttactgtgctaagtgctaagaattatgaagtaaaaagtatatatatataatatatataatatatgtacatataatatatataatatatgtatatataatatatatattatatatgtatatataatatatatattatatatgtacatataatatatatattatatatgtacatataatatatatattatatgtacatataatatatatattatatgtacatataatatatataatatatgtatatataatatatattatatatataatatatgtatatataatatatataatatatgtatatataatatatatataatatatgtatatataatatatatattatatatgtatatataatatatattatatatgtatatatattatatgtatatatataatatatataatatatatacatatatattatatatataatatatattatatatataatatatatgtatatataatatatatattatatgtatatatattatatatattatatatgtgtatatataatttatatatgtataatatatacacacacacacatatatataaaacagagatcacatttttagtgtatttttcaaagggtataaagaactttttttgtggttctgatgtgcctaaaactctgatcacttagaatgaaaaatgacaggtcttagagtttagaacagtgcctagcacatagttgtcactcagcttgttgaatgaacgaatgtgaacatggtctaaccttattattttttgcattttacagaaacctagaaagctgacatagcctgaggacacactgctgattataaatacaactgggcctagaacccaagtgcagttactcccctcccatgttttcacctccacctctattttgtagcttctctcaaataaccttaatataatcctggatatgacagtagttcttctgacatgactgttagactcagacatgactgaagtgtctcacaacaccctcttcctccatattttctgccagtccttaactcaaattgtcagcaaaataaagacgtaaggagctgtgctttaccataattaagaaagtattaatatgttctctcaagggcagaatttgaaccaataatccttgtcgatgacaagacaaataccagctcatccgttataaatttatcttagaaaactctcagatccccaggagtaacagcgattggcgtgacctgctttttggtgaaatcagaaaaggacttgcctaccctcatggcagcaattaactggagctgattaacagctgctccctttagataagtacatatgcttgagtttaccgtgattctgtgactccctacgtttctaacagttgttacctctctggtccttgtaggcattcagctttggaactttgataaagcagcttaagggtttaggaaggatgtttaagatcactgatgcaactattcatctttccttcccatcaggtgtttgaattgttgctgcatttctccagcctctgctttcttaaacactcttgtgatagggatctcactatcttcctatgcggctgatacttattttttattttattttattttttttgagacagggtctccctctgtgcccaggctggagtgcagtggcatgatcttggctcactgcaacctccatccacctcccaaattcaagcaattctcccacctcagcctcctgagtagctaggattacaggtgtgtgccaccacagcccagctaatttttgtgtttttagtagggacggggtttcaccatattggtcaggctggtctctcaaactcctgtcatatgtttttaaaaggttcttacaagctccatgagactaccggtcagaacaaaattgtccttattgaaatatggttcattttagtgatacgatgttccaagtaagatcttatggttaagacctctatctaggtatattttcctggtggaccaaggagagaacaaataaaaatttcactttttgtgagaatgacggcaagacctagataccttttaatttagtatttagccaggtgtgatggcacatgcctgaagtcccagctattcaggtggctgaggagggaggatcgcttaactcaggagtttcaggctgtagtgcgctatgccattcaggtgtccactttaagtttggcatcaatatggtgatctcccaggagtagaagaccaccaggctgcctaagaaggaatgaactggtccacgtcaaaactcctatgctgatcgtagtgggattgcacctatgaatagccactgccctccagcctaggtaacatagcaagatcccatctctttaaaaatagttttttaactaatttttttttcagatggagtcttactctgttgcccaggctggagtgcagtggtgcgatctcagctcactgcaacctccacctcccaggttcaagcaattctcctgcctcagcctcctgcatagttgggattatgggcacgcgccaccacgcccagctaatttttgtatttttagtagagacacagtttcgccatgttggccacgctggtctcgaactcctgacctcaggtgatctgcccgccttgccctcccaaagtgctgggattacaggcgtgagccatcacacccggccttaactaatttttttatttttttctgagtcagggtctcaacctgttgcccagtctggcatgcaatggtgtgatctcagctcactgcaaaccctgtttctcaggttcaagtgaaacttccacctcagcctcccgagtagctaggattacagtgcatgccaccatgctcagctaatttttaaaaacttttggtaggcagggcatggtggcttatgcctgtaatcccagcactttgggatgccaaggtgggcagatcacttgagatcaggagttcgagaccagcctggccaacatggtgaaaccccgtcgctactaaaaaatacaaaacttagccggtcgtgatggcaggtgcctataatcccagctactgaggaggctgaggcaggagacttgcttgagccctggaggcagaggctgcaatgagctgacatcgcaccactgcactctagcctgggtgacagagcaagaccctgtctcgaaaagacaagaagggaggaaagcagggggagaggaggggaggaaaggagaggcgaggggaggggaggggaggcgaggggaagggaggggaggggatgggatttgtagaaatgagctctcgctatattgcccaggctggtctcaaactcctgggctcaagaaattctcctgtcttggcctcacaaagtgctgggattacaggcatgagtcaccatgcccagccctaattaatttttttaagtttatttagtgcttaaatccagctaattctgacttcacaattgagtttatgttatactctttttgtggatcgggctcacttttatttgcaatatcaattctaatgtttaatattatgtggcatcatattacttgtattaacttagattatgtggcatcatattgcttgtgtcactgtaaccctgagccctgtgcctaatgttaaatattgtctttgttttttcctcagatagtccctaagaagagtcctagaagcacctaccctctcattttacagatgagcagatgagcaacttgtacaaaagtcacctaatttgccacctaatgccaattccaggactaggactatagctttttttcttttgagacaggtctcactaagatagacagcctcactatcttgcccaggctgctctcaaacttctggcctcaagcaatcctcctgcgttggccttccaaactgctagtattacagatatgtaccactgcacccagccaggactatagatttttctaatcctagtcaagtatttctagtaagccatatttataaaatacccacttggaactgatgagacaggtttcagaaatgtttgctgcatgcgctcattgtctgaatcattgtttcaggttgctccggttgctaagaagactatgaacaagtcagagaacctgctgtttgctggttcatcattagcatcacaagtccatgctgctgccgttaatggagataagggtgctctacagaggctcatcgtaggtaagcagtccccttaagtacagaaactttaaaagcaactgtttgtcctgaggaagtttgttaatgttagttttaatttgcaatgtactcatacattttaatggaaatatgttattatttatattttcttccaacacatgaacaagaaaggaattaagtcctaaaacttaaaaatatgggttaggattaggtgaaaagtacttgagaaatttctatgtatttagcactaagtctagatagatattctaaggtactaagggaatgaattcatctttatgttaacagatctcgaatgaaacagtggataatcttttaacatttaatatatacccaaagtattaaagtttacaaatgatttaatttttaatgatttaaaattgattcaatgttccccctgtgatttgcatatataagtgatatatagagaggtccaatgcaggagttctagaggagagaataaagagaacaaagaatagctaagaattttctagaaccttagcttcctgctaaagcagagcaaagatccatctttctatcacaaatccagatattcacaagttgcaaatcccaaagagaaaaaaataaaaatatattatttgtagtctttattcacaccagtgtctgatgacatcatgattgacaacttgggctacaaaataaagtccaaattacttgaactttcatacctgttccttccgactttgtttttaccctacatttgcagtttctccaggaacttctactggtgtaccgtaacctctggctaagctagaggttacttctatttcccaataagccatgaattttgtctcactttctccatatgttctgtttccccaccttttttctatctgctactctgttaaccttcttctgtgctaaacaaactcctacttatctttaaagacaaaactattgtatctcacactctgtgaagatttctcttcctctgcttatccttactttacctcagctatctacattcactggaacttgacattttccaccacctccaaatcactcaaacattctaccattcaactaaaactcttactttcagctcacttactgatgacaaacaatagttttccatgctcactgagacctccaatccactagcttctctagttttgaccatcagttttccttctgtcttttccttcctcactactcagccttgattctatgtctgttattaaaatccttctcttggaaaaattccctttttttttttttttttttttttttgccttctgttgcacttgactgttgcattctcaactctggatgtaccaaacctatcttgctaagcagttgaatccagctgaaagattgatagcaccccaaattcatgattacccacttcaaataggcactcagtacttactactcatcataccacattttttctgtaatgaatgtttcatacctctcactctactgaatcctgtgactgccagttccccctcctttcattctctttaatgcagtaggcttactagaggaaatgaagacattaagtaggaactccctcatctttcagtatggtatctacaaatctacctcgatctgtacccatcttctctcttcatcttcctgctaaaacagagcaaagatccatctttctgttaaaggccagttcttccacacatgctctgtgttccatcccctcctgtcttctcagggacattgcttctttttttccccctctgattactatatcttcaacctttcttctatgctaaattctttccatcaacacttaaacatgcttcattgtttccattatttaaaaatcccatctctgtttcttcatctccctttaggtattgccattttcaactttccctcacgactgcattagcgcacaggctaaactgctacaaccatgacttgaataagatagaagtatatttcattctcataatattgcaatcccaactctagatggaccaaacctatcttcctggcaactactaagcagttgaacccagctgtgtaatagtacacagttatgtgggcagtctaggttagatagatatctccatttcacaaaaccatttaggtatactgccaggccttggttcttccattctcaacatgatgcttctatttctgggtcaaaggcagatacgttcattatagtcatagcccagtcagcaggaaggaggaagagagagcacagggaaagcaatttgtcagtaaggaggtagactagacttagaccacaaagccacacctagaacaaaagaagctgaaaaaaaaagtcttgccctggatggtatcatgcccagctaaaactcacggtgctcaattgttgaaaagaagaatgaaagaatgaatggggggcaaatattgctgtctgtcaccaaaaccaagattcttgggccagctgtacccattgtccacacttatttaccttaattcactcttttattaaaacaaaatatactttcttattttgaagtatacatatagagaagtgcatacaacttatatgtacaatttaacaaataaacataaagcaaacatccacttaaaccacctaggttaaggagcagcacattgtcagtaaccccagaagcccctaatgcatccttctctccccactagaggaataggctatcttgacttttataataatcattacattgtggttttaccacctacatatacatccttaaacactttagttaattttgccatttttgactttttgctaaatgttccatgttcacttgaactaaaaaatgtatgtatattacatttttgtcattttcctgctcaaaattctttcattattcccattatacttggaataaaatttgacaggttacttgtatctctttacctgtccatcctcacgttttacctcacgtggtaaaacttgccttctttcagtgtctcacacctgccaagccctttttcatctcagggcttttgcctgaaacgctgttctccctattctctgtctgaataactcttagtcatccttgagatttcaattttaaggtcacttcttcaaagaggcctgctaaccatccagtctcaatgaaatctgttcattgtattccctcttggccctctgtagtttttcttcatagaacttgtttcagattatcactgtatatttatgtgtatgaatattttaacatctctctcctccataagctagtggccttcatgaaagtagtctgggtctgtttaattcatcactaaatccacaaaatccagcacagtacttggcacataagaaatatatttgttgaaggaatgaataaatattttaatcattctttaagtatcttttctcccaagtagtctataatcatcttgagggccaggactaaaaatgaattgagttgaattaaattgaattgaggagcagattgggactaaattccatgagaaaaaaaaattttaagtcaggacgtatgaagaaaaagtaccaagtaaaatgaattcattaatgctttaattaaaaatataaccttcaaagaaaaaagtgcagtatgttataaattaaaaacacttatatttttatggctcagtcatacagattaattaatgtgttattattaaaacctgaaaccttgaaaatccccaaagagaaaatccttaaaaaccaaaaagcaatcatgatgtgaagccagtaggtagctaataaacttatttataaattgtttttctgttttctatcatcttgtctgaggaacttcttattaattactgactgagggtgccactcctcatcttttaagaattgtgccattatgttttctgtgtacctttgctctagagtattttccagcatttgtatatttgtgcaaaaataataactgtttcatcttaaatttcaatgtaattttttttctatgcatatgaatgccaggtggtaatttcaatgtattttaaacatctttttatgtatcacatatttgatgatctctaaatatatgctatttctcttttctaaactagtgacatagtactacagatgaattttttttcttgaatccttgttcaccaactgctcagtgaattcattcactttagcattttctgttttcccctctctgtttccatggagaagtatgtcagtgatgtgtttgactccatggaaacagatgagtgtctctttctacatacacaacgaattaaatcgaacactttctgtgctgcccattgtcctggaggaggactggagaggccttctctgaatgaaacatcatttcagtagcaattcttagtgtttaacctaatacagtggattaatgttttaccataacttactgcttctagattcagatgtattagggcttacttctgagccttaaaatataaacatacatagtaaaatctgaatatgctatggttctcatttatagatatttagctttttctcttaacaccaaactcaaataatttgaatgaatactagaaatgtaattgagaacagaatttagtagattcattttaatactatacagtgtagtattggtagaaaaaagtatagattttagagtcagataaacctgagttttaagttctaactgttatttattagtagtaatatcttggctaagccatttaatttttaagcctcagtttcctcatccgtaaactatagattataatatttcacttgtgtgagagttaaatgaaataatgacagtaaaatatctagcatggtacttgacacatagtagacaataagttaatatcctattactgttattgttatgtcagcttagactaaaataatcaagtttttcatagcttcagatgtctcaatatgaaagagcactaaatgcaacaaagattaatattgtgggttttttgtgaaaactaaacaaaataatttgtaaatatgcatggtgtgtaatgatcaatgttgtcattactgccaataatatttgaggtcgcttgcagtggtatcgtgaccaggaagcaccattctgattctactacaacttttgtttcactgtccatgttctgagcagcataatctctctaaatcatttcctctacttgtttatttatttatttatttttgagatggagtttcactcttgttgcccaggctggagtgcaatggcgtgatctcggctcaccacaacctctgcctccctggttcaagtgattctcctgcctcagcctcccaagtaactgggattacaggcatgtgccaccatgcccggctaatttgttgtatttttagtagagacggggtttctccatgttggtcaggctggtctcgaactcccgacctcaagtgatccgcccgcctcggcctcccgaagtgctgggattacaagcctgagccactgcgcccggcctctacttgtttttaacatcttctgacacagtatttagatacggaagtgagcctcataaatgacagagtagaggtactatttcaggttacttcttcccttacctcaatccctaccttaaaagctagagtcattaaatgtttttaaaatgcttgcctacatgcaaatgtgtttataaatatacttaaatgtttatgcatccatcctaacaatagtaataaaattagctaacatttataaagttatgttttatgtgccagccactgtattgtttggcaactcattaacttaacagtgaaataatatgaagagtttggggtattagtattaccctcatttttaaataaggaaattgagatgcagagaggttaagtaacttgtctaagaagtatcagaactgagattaaagccaagaagtctgattccagagtccattcttttaactgctaaagtatgggacctcaatgtatgggtagatatttttgtacacacgtgcactttcatatgtataaataaataggaatgagaaagataagaaagaaagaaccgattaggtgtgaaccttgcatgatgaaatgaatgattatctagatgggatttttcttaacatttttgtgctatgggcccttctggcaatctggtaagcttctggactcctcagaacaaaaatatatgtatatttttaagagctgaaatgcaatatagaggattacaaaggaaaccagttatattgaaatatcaaatatttttaagttgagacataacaatattctgccataattttttatgaatgtattaaatagcaaggtgttggggcaagtcttacagctatgataattttgaaatagcagtgagtgaaaatgatattttaacatacctgcacaaattataagttatagaaatattttataaaatctcaagtcctctcaaaatacagtatgtctcatgttattattattctcattttgcatgttaggacactgagactcagaagttgagaaatttagttgcacagttaataactggcaaagttgagcctcaaaccaaattatctgatgatgaatcctatgttctttccattgttcccatgttgtcactctataacaataagcagagattttttaatgacagcaaaatgccttcccaagattgtaacagtataaaatatgtaaagtaagaagtgggtgaaatcagatgaaataaatacatcttggatgccatgcaaatataacattttagaacaagcaaataagatacaaatagagactactcttgttacttgtattgggcattgtgttgctgtagctattgtgcggactagcacaactataactgcaagtgacagtcatttcctctaactgctagagttggcgctctggtttctgcacataccagcccattaaccatatgtactcttatgcttccacaagccttaaaataactgaatgcggtagagcagtggctttccagtcatgcttccagctcagctttctggactgtgttgagacagagcacaggcagaatgccagccacgttgagcaagcaccaattggtcatggattagaggccatctccacagttgccagaataattagcacaacacagcacagtagccagctgctttctatattaactgttcctgacaggaatgcaaatttaaatgcactgccatccagtgaatattagtttacatcataagctctacgtttgtacaacatgttacaattaccaaatatttccaaacaatacattgttttattggatcatcaaacaagttgcggtgtagattggacaagtattagctgaatgttataagtgaggaaactaaggaagagagtagggtggatagataaaggcacagacctcgctcagttactggccaggaagcccagaacctaatggtaccctcattattcagaaactagccatgaagccactgtccccctagagctactcaagacaggacctaagtgaggttgaatgctgctttttctaatcatttaggggatatatactttctttctttctttctttctttttttgagacagagtctcactctgtcacccaggctggagtgcagtggtgcaatctctgccttccgggttcaagtgattctcctgcttcagcctcccgagtacctgggaccacaggtacatgccaccatgctcagctaatttttgtatttttagtagagacagggttttgctatgttggccagactggtctcgaactcctgacctcaggtgatccacccgcctcagcctcccaaagtgctgggattacaggcatgagccaccacgcccagccgggggatatatactttcaatttcctcaaatagacaaattttgccttataggcacaaaatattggattgtggtgacataacccaataacatcttctcttctgggaaatacatatatcggttacaaagaaacaatgtatgtcagggaacaaagagaaggcttgaagtttccctgtatcttatataagacttaggaagatgacaggattgacctaaagttctgtgtccttgaaggtgagttgcctattaaccccatgatgctgactctgctttgaccctgaggagcctaatcaattaggacaggggtgttcaagcttttggctttcctgggtattggaagaagaattgtcttgggctacacataaaatacactaacactaacaatagctgatgagctaaaaaaaaaaaaaatcgcaaaaaaaaaaatctcataatgttttaagaaaaattataaatttgtgttgggcagcattaaaagccttcctgggctacatgtggcccacaggccacaggttggataagctcgagttaggattatcccagaatgtgagatggcctctgtttctcagcacttactcttgtgaccatagttcctaatcctctcctttactaaagcttctaaggaggaatgtctctctaggcagaaagtgtaaatgaattactgttatcttgctaatactagctactactatctttgcttaacctaacaagatgccagtagagactgccctttaatcatgaaagacaactagagactagtctcattatggcatattctctataagtatcactgactccagaaggactcaaactgataaaaggaacatgctcttatactacattttagttctgttaatgagtttcagtttaaataaatctttatctataaatacagtgatagaatctttggaatcttctagattagatattgaaggctctagtacaaagaatatactgttgtactacacagagtcttgtgcataagggcttctgttattatatgtgttgaatccaatgcaaaatttgcctccatcttcaaaaaagttctgaaaaagaatatctgcctcctctaggagttacacacaacctgaatacatctgtaaggctctttcaaatttccagagcaatgacctttcttgctttttaccagcgaagtaaattgctgaaaagctaggaagtctttctgggttccagcgtatccaagattaaaatatatgtcgaagtattgcaaactaaaacagtagcttagtttcatgcccaaaacaacccaggcatttatctggtgtcttttttgtttgtttgtttgtttgtttgtttgtttgttttagttttaattgatacatactaattgtatgtgtttatgggggtggagtgtgatgttataatacatgtatagattgtgtaatgatcaaatgatgatatttagcatatgcattaactcaaacatttatcatttctctgtggtgagagcattcaaaattctagctattttgaaatatgcaatacagtattgttaactatagtcaccctactgtgcaatagaacaccaaaacttattccttatatctaactgtacccattgacatttctagcattctattttccaaagaaaacactttcattttgtctattcacttcctccattagcacagttcaggccaagataccttggaagtaactggcttccctcttgttcaacccagatgtaattaccctcagctagtaagagatgaatacttgatgattatctgtaacaaaagtggcaacatttttttcacttacaatacatagctggagccatggcatcttttgtagttattgtttttaactaaaatttattgaggtatataatacagtaaatttcacccttgttcgtatacagttatttaattttgagaaatatataatcatgtgatcaccatgaccatcaagataaagaacaattctatcatgccccaaaatgttagaactgtgtccttttatagccagtttctccccacattccacatattccagtccctggtaaccactggtctgttttctgtctctatagttttaacttttccacaatcctatgccaatgtgtcacatgatatatatgccctttgaggcagatttctttcttttttttttttttttttttttttttttgagacagagtctcactttgtctcccaggctgaagagcagtggtacaatcatgactcactgcagcctcaacctcctaggctcaagcgatcctcccacctcagcctcctgagtagctgggactacaggcatgttccaccatgcccagctaagtgtgtgtgtgtgttttgtagagatggggttttgccatgttgcccaggctggtctcaaactccaggcttcaagggatcttccccccatcagcctcccaaagtgctgggattatgggcgtgagccactgtgcctggtgaagtggatttctttcacttgacataaggcatttgagaattttccatgttgttgagtggatcagtagttcattcctttttattagtgagctatattccattttatggatgtactgcagattattttctcattttgcagtttaaggacaattgggatgtttccagtgtttagcaattatgaataatgctgccgtaaatattcacatacaagtttttatattaacttaaactttcatgcttttatttctcctgagtaaacacttaagtgaaaaattattaggccataattattaggctacagttttaatagtagctataccattttgcatttctaccaacaatggctgagaattctattaatagttctacaactaggttctacatccttaacagcatttggtattgtgaagtttgcttttgattgttttcattttagccattctaatagatgtgcagtggtatcgcattataggttaagtttacatttccctgtgtgttaatgatgttgagagtcttttcatatgcttatttagtgaaatgtctattaaaaccttttggccaccgtttaatttctctttttttattttatttttattttatatatatatatttttattatactttaagttctagggtacatgtgcacaacgtgcaggtttgttacatatgtatacatgtgccatcttggtgtgctgcacccattaactcgtcatttacattaggtatatctcctaatgctatgcctcccccgtcccccgaccccacaacaggccccagtgtgtgatgttccccttcctgtgtccaagtgttctcattgttcagttcccacctatgagtgagaacatgcagtatttggttttttgtctttgctgagaatgatggtttccagcttcatccatgtccctacaaaggacatgaactcatcattttttatggctgcatagtattccatggtgtatatgtgccacattttcttaatccagtctgtcattattggacatttgggttggttccaagtctttgctattgtgagtagtgccacagtaaacatacattgtgcatgtgtctttatagcagcatgatttataatcctttgggtatacacccagtaatgggatggctgggtcaaatggtatttctagttctagatccctcaggaatcgccacactgtcttccacaatggttgaactagtttacagtcccaccaacagtgtaaaagtgttcctatttctccacatcctctccagcacctgttgtttcctgactttttaatgatcgccattctaactggtgtgagatgatatctcattgtggttttgatttgcatttctctgatggccagtggtgatgagcattttttcatgtgtctgttggcttttaatttcttttctttcttttttttcttttttttttttttgagacagggtcatactctgtcacctaagctggagtgcagtggtgcaatctcggctccctgcaacctccgcctcccgggtttaagtgattctcatgcctcagcctcctaagtagctgggattacagacatgagtccagccactgcacctggctaatttttatatttttagtagagatggggttttgccatgttgcctaggctggtctcaaactcctagactcaagcaatctacctgcctctgcctcccaaagtgctgggattacaggtgtgagcactgcacccagcctaagtttcattatccatcttattattctattgtaaaagtttttatttattctggaataaaaggccttatcaaatatgtgttttgcaaatatttcctcccaatttgtggctttttaaaaatttttcttaattgtgttttcaaacacaatttctttatttggatgaaatctaatttattaatttttatggattattcttttgtatcatatctaagaaatctctgcctaacacaaaatcaggaagattttcaccttcaattgcttctaaaagttttatatagttataggttttatttattttttatttttttaacaggctttattcactttatttttcttgtataaaaccctatgttgtagccacagctggagcctgagtccgctgcacggagactctggtgtgggtcttgacgagttggtcagtgaattcctgacagggagacttggtaaatacaatcttccagaggtcgggggtcaggtagctgtaggtcttagagatggcatcaaaggtggccttggcgaagttgcccagggtggcattgcagccccgggctgaggtgtagcagtcatcgataccagccatcatgagcagcttcttgggcacaggcgccgagacaatgccagtgcccctgggtgcagggatgaggcacaccagcacagagccgcagcggcctgtcaccttgcaagggacggtgtggggcttgccgatcttgttcccccagtagcctctgtgcacggggacaatggagagcttggccaggatgatggccttacggatggtggtggccacttccttggagcacttaacacccagaccgacgtggccgttgtagtccccgatagcaacaaacgctttgaacctggtgctctggccagcacgggtctgcttctgcaccggcgtaaccttcaaaatctcgtccttgagagaggcccccaggaaaaagtcaatgatctcagattcattaatgggcagggagaagagacagatttcctccagggacttgatcttcatgtccttgaccaagcggcccagcttggtgacgggcatgcactccttatcctcggccttgccttctcgagctccacggcctcagcccgggccccgtccacggccgcaaccccggccccggatgccactgcggaaacctccgcggaagccaccgcggttccccatcccagggccaccagggcctccggccccccgccccccccgcccacctcccgctgcaccggcgttatcagccatttggtgttttctcggagaagaagcagttataggttttagatttaagtttatgatacgttttgaggtaatttttatatatggtgctattatggactgaatatttgtattcctccaaaattcatatgtttgaaaccctaaccctcaatgtgatgatattaggaggcggggtctttgggagataatttaagtcatgagggtttagccctcgtgaatggaattaacacccttataaaaggaaccccagaaagctctcaagccctctttttcatgtgaggatatcagaagtcagcagtctgcaactcagaagagaggcctcaccagaacctgatcatgctggcatcctgatctcagacttctagcctccagaactgctaggcacaggtgcataccaccaagacagattttttctttttttttctttttttttttttttagatatggggtcttgctatgttggccatgctggtcttgaacccctggcctcacgtgatcctcctgcctcaacctcccaaagtgctgggattacaggcaggagtcaccattcccagccaatttttgttgttgttgttgttgttgagacagagtcttactttgttgcccaggctggagtgcaatggcaatatctcagctcactgcaacctccacctcccgggttcaagcgattctcttgcctcaacctcctgagtagctgggattacagacgcccgccaccacaccttgctaatttttgtatttttagtagaaacggggtttcaccatgttggccagactggtctcggactcctggcctcaagtgatccgcccgcctcagcctctcaaagtgctgggattacaggcatgagccaccacacccagccccaatttttgttttttataagcctcccagtctatggtactttgttacagcagcttgaactgactaacatacaaaatataggttgaaagctttgggtttatttttgtttttgtatatgtttttgtttttgtatatgaatgccaaatttttccagcaccatttattattattattatattattcactcctgttgcccaggctggagtgcagtggcatgatctcggctcactgcaacctctgcctcccaggttcaagcgattctcctgcctcagtctcctgagtagctagaattacaggtgcccaccaccacacctggctaatttctgtacttttagtagagatggggtttcaccatgttgaccaggctggcctcgaactcctgacctcaggtgatccacccaccttggcttcccaaagtgctcggattacaggcatgagccaccatgcctggtctttccagcaccatttatttaaaagattatctattggtttgcctttgcatctttgtcagagtcagttaatcatgtctgtgtgtgtctatttacatactctcaaatctgttctattggtctataagtctatttctttgccactaccacattctcttcattactgtgggtttacaatatgccttgatatcatacaatgtgagttcttcaactttgttctttttttcaaaacctttttattcttctacttcttttgccttttcataacaattttaaaactgcacattcatttctacaaagattgctctgggaagtttttaacaaattattcttagtagtaccttatagtggggattaattatgaatttaatttaattttttaataaagtactatattaggtttttattgctgtgtaacaaattaacacaaacttagcttacaaacaacaaacatttattacttcacagtttctgtatgtcaggaatctagacactgctcaagctgaggcttttgctcgtggtgtcacaagactgcagtcaaggcgtcagccagggctaaggtctcatctgagatttaggattctctccccactgcacattggcagaattcttttttttgagacagagtctcactctgtcacccaggctcgagtgcagtggtgcaatctcagcttcactgcaagctctgcctcccgggttcacgccattctcctgccgcaggctcccgagtagctgggactacaggcgcccgccaccacacctggctgatttttttgtattttttagtagcgatggggtttcaccatgttagccaggatgtctcaatctcctgatctggtgatctgcccacctcggcctcccaaagtgttgggattacaggcgtgagccgctgcacctggtccagaattcacttttttaaaggtacttaatatgtcaaccttattgtttctctatatgcacatttatttgttactgaaaattgaaaaaatagcatgttggaattttcttttaatataattcaaatttttaaaaaccagaaaatctaattagttatgctctaatcaaacttctcaatgttttcttttcattctttccccacaagttaccgtgcttcaaattccagatgttgggattcatctcactgacttaggttctaaaacatatgggagccctgtgtggtggcttatgcctgtaatcccagcacatgataataattcagacttattggtgctgctttgggttcaaattaaaaagtagagctaaagtatattcgagttattcaaatacattcaaacttacacagattccttataaattactgctatcaaggtaagaaggaaaagatacaagaagaaaaagacatcactcatgataggttattattggtatacagtctatcctagcatagactgctgcataaatttgccagcaagaaagaaaagtacaagaataaagtttatgactaaatcacctcattgtcataatttcctattctagcattctcagaaggatcccatctatgatacatgtagaaactgcagccacatttgaatggttcaattcttgattcattctgaaccctcttaggcccaatatttgttagctttcgtttaagctgagaaaaatctgttgagtaacaggtatctcagttttaccatcctttctttccacaaataacgatgtcctttttcctctcctcctgtaaggcaaaccatctctgatgtcctggaaggtctttgcttttctatcttgttgttggggtgaaccttctggtggaggggaagggaatttggtacctgggtggagaatcaagttatcaaggttctttattaacgttttggagcagaagttgtgagaggcctctgaatcatcctgggaatctttctttggtgagcatttgtgaagactttgggatcaaggtgcacatttgtgatgagtcgatcaatggtctagtcatagctctaagctccttctggatctttagtcccagcagaatgtgttgctgaactctcaaattgctacaaggtaccctggaaagaactatgtagcccagaaagagcctgaaaacctaaactccaacaaatagtgatgaacaagttgactacagtttttttttaacaattttaaaattcattgcagtttgcttctccaaggccagcaggaaagtgtctctgctgcttcaaatctctacaatttctacctcggacctctagacactcttttgaaagactcacctgattaggtgaaagcaacccaaactaatctctcttgattaacttgaagttaaatgattaagagacttaattacatttgcaaaatcccttcatatttgccacataacaaaatctaatcatgggagtgacatcatagtcctgcccacactcaagaggaagggatcatacggggcatgtataccaggggctggaagtcttggatgccatgttagaattatcctaccacaagtactgttgagagtatctatatcttaagtggactttgaaggagtatatcttccaaggaatttatccatttcacttaaattgtgagtttatagcatatgacattctcttatttgccttttaatatctgcaggctttgtagtgatgtcattcttgatactgggaatttgtgtctgctctgtttttaatgatcaatctgattagagatttattaatttaattttccaagaaacaacttttagcttcattgattttctctatttttttctgattttaatgtaattgctctctgttcttatttttcttatgtacttccttctgcttgttttgggttaaatttgctcttctgttttagtgttctaaggtagaagcatagataattgatttgaaactattcttctattctaattaaaagcattcattactatatatttccttctaagcttccctcatgtgtggtgcaagaaccttacaacaacatgtttttattcatttaattatgctttttaatttcccttgagattttctctttaacccatggattatcttaaatattttgttatttcttgttattattctgttattgatttctagtttaattacactgtcatctgataatacactttgtatgacttcacttctttaaatctgttagtattcattcatgacccagtatattgtatattttggtcaaggtcccatgggtgttttgaaagattgaatttctggctgtcattagatgaagtgttaaataaataccagttggatcctgttgctttatttttgtgttcagttcttctgtgtccttgctgattttcattttagtggttccagcaattattgagagaagagtgttgaagttaccaattataattgtgttttcaagtgtttctttctattctatcagtttttgctgcctgtatcttgaagctctgtgatttagtatgtatacatttaggaattttatgtattcttggtgaattgacccttttattgttatataatatctctatttgtttctggtaattgtcttttctctaaagtttaccttattagatattaatatacttaactccagctttcatttcattagtatttattatagttttgctaattctttgacttttaacctcctatgttattgtattttaagtgagtttctttttttttttttttttttttttttgagacagagtctcgctctgttgcccaggctggagtgcagtggcacgatttcggcttactgcaagctccgtctcccgggttcacgccattctcctgcctcagcctccaaggtggctgggactacaggcacctgccaccacacccagctaattttttctgttttttagtagagagggggtttcaccatgttagccaggatggtctcgatctcctgacctcatgattcgcccgccttggcctccaaaagtgctgggattacaggcgtgagccactgcgcccagcctaatcaagtcttcttttatatctcagcctttttattgatgtatttacatcatttacatttaatgtaattatgaatgttaagatttaagatttccaatttattgtgtagaacactgcatgttccttctatttttcattcctgtcctcctttccgtttcttgaatatttttagtattccattttaatttatatatggtagagctttttgtaatgctttattaagatataattcacatactatacaattcaaaatttaaagtatacaattgagtgattttgtgtattcagtgttggacaaacgtcaccacaaatgatattagaacactttcattatcccacagagaaacccttcaccctttggctgttactcttcaaatttgtgcccaacccccagtcctaggcaactactcatctactttctgtctctatagatatgccagtgccagatatttcacataaatataattatataatatgtggtattttttgactggcttcttttgcttagcataatgttttcaaggttcatccatgttgagcatatactagaccttcattccttttgctgagtaatattccactgtagagctatacaacattttgtttaaccattcgtcagttgatgaatagcttatggatacttgcattatttccaccttttggctctcatgaataatactgcaatggatatttgtgtaccagtttttgtgtggacatatgtcttcgtttctcttgggtacatacttgggattggaattgctgggtcaaatggttacttaatgttttgaggaacttccagaatattttccaaagtgactctaccattttagattcccaccagtagtatatgaggattttgatttctccatattctcattaatacttgttattatgtatattttttattataaccatcctagtgtatgtgaagtggtatcttatattgtggtttttgttctgttacccaggctggagtgcagtggtgcaatctcagctcactgcaacctccacctcctgggtttaagtgattctcatgcctcagcctcccaagtagctggtattacaggcatgtgccaccaccacacccggctaatttttgtatttttagtagagacgggtttttgccatgttggccaggctggtcttgaactctaggcctcaagtgatccgcccacctcagcctcccaaaatgttgggattataggcgtgagccaccctgctgggtctatgttgtgtttttaaataaatctctttgtatagtttgttttcattggaggttttttatttgtttctgagtgtgtgtgtgtgtgtgtgtgtgtgtgtgtgtgtgtgtatgattgttctaggtattagaatatgtatacttattttatcacagtctgtattttccactttgagtacaacatagaagccttatcactaattaggtccctttacccttctttttgatatagttatcttaaaaatcacctctacataaactgagaaccacatcatacagcaaggttatctttgctttcaatcatcgaaacataactctaaaaattaaagaggataagccaggcatgcactgtagccccagctactcaggaggctgaggcagggaggattgctttagcccaggagttcaagaccagcctgggcaacacagtgagaccctcattaaaaaaaaaaaaaaaactaaagaggttaaaaacagtctattatgtttctcacatatttacattctgcttctcttttttcattcctgatgttctatttgtttcatgagtgttcatagttggttgttggagcacttttttgagagttgttttaaaattcttgtcatataattctaatatatctgtgtcatcacagtgtcagtgcctgttgattatcttttcttgtttaaattaatattttccaaacttttgagttgtttcataattttggattatatctttgacattttctgtattatgagactctggatcctatttaaatatcttactttagtaaacggacaatctgtcaaggtttagaatgaacattctctttcaattttgtggttcaaatttcaagttagttttcagagatcttgcagggctcttctggtttgccccacctctgggctgctcaggcccatttagaaccaaggcaatgatctaactatagttcaattctcagagcttttgctatcttgattctgaccagtttcacacatgggctgctcaaaagtgtcctgactttttgtaccaatttaaagaattacttcctccaactttgtcctctccatattcctatctcctactctctaattggaaaggggtaaaatactacctcattgctatcctttgcttaattcggggcattgatagtttgacagggctcctcccaacggtctctatagtgtccagtggggaaaagaggtgcagtttcttttattgtatgtgttttgagtagagcatagtcaaatggttcactcagcagagttacctgcctcccagtctttttactagagagagtagacttctcttgagaactttggcatctgtgcaccttggtgtttctggattataggctactgtagcccataatgggaggcaaaagcaaacaagcaaacagaaaacgcttcagggaacttaccaccaggttgtctctcaagttccaaagttcctagtccaagatgccttcccttctctgcctgtcatttattttgccttttgccctggggattttagttgtaattagcaggaggatgaggatgctatgtacttgctctatcttgtcatcttgtctagaaagggaaatcaactgtgatttttttttttttttttttttgagatggagttttactctcgttgtccaggctggagtgcaatggcacaatcttagttcactacaacctccgcctcctgggtttaagcaattctcctgcctcaacctcccgagtagctgggattacaggcgcccgccaccacgcctggctaatttttgtatttttagcagagactgggtttcaccatgttggtcaggccggtcttgaacttctgacctcaagtgatctgcccaccttggcctcccagagtgctgggattacaggcgtgagccaccgcacccagcctgtaattcatttttgtatcactcataaaacataccacaatgcctagtgtacaattggcattaattaaatatttgtttcaaaagacaagagtgagtgagggaggaacataagtagctctgtatctcaaaatgttagttcagcataatatgattgagtcatcagtttaaattctagccccacctactttcagtgtgaacatagactggttacttaacttatttgagcctcagtttcctataatatgacaatggtaatatctacttcttaggacaagtaaaaataagatgatatacttaagcatttagcacaatgtttgataataaacagcgaatatagttcctacttatattagtaataacaattatcaaatatcactatctgtttcttatccttataggaaactctgctcttaaagacaaagaagatcagtttgggagaacaccacttatgtattgcgtgttggctgacagattggattgtgcagatgctcttctgaaggcaggagcagatgtgaataaaactgaccatagccagagaacagccctccatcttgcagcccagaaggtgagaagtaaaatttccttgaagagtaaatgttttgtgtgatgtctgctagttgattagtggaactatgcaatggacagataataaagaagtctcaaatgcatgactcataggttttatatattttctctaaaagctgtctttaagctgcagagagtaaaagcacagataactatcagcggctgcatttcaggttcctcaaacagtagaatttattctgtgatctaaagtttattgggaaaaaagtgatcaaatttatatatacaatgtgatgaaacaatgttaccaatctatgtatagggaaaaaataaagaccaaaaagaaatactcaaagatattaatagtggttgggtttaaatttggggaatatatatggaatttttttacttttcactgtttaaaattttttccttaatgagtattacttttactataaaaagttgaaatcccagcctgggcaacatagtgagaccccatctctacaaaaaattaaaaaattagctgggcatggtggcgcacacttgcagtcccagctacttgtggggctcaggtgggaggatcacttgagcctgggaggttgaggctgcagtgaactgagttcacatcactgtactccatcctgagtgacagggcaagaccctgtctctaaattaattaattaattaatttaatttaatttaaaaggttgaaatgtcgcttgaaatatgtggcattaagaagcataaaataaatttattttctgaatgtattttcaactttttaaaatctaaaactatgttgccaatattaatgatttcacatttttaaatgtattattaagagctcagatttttaagattaaacccatcaaacagataaaataggaagcttctacatttagttaaagacttattcacctaaaaactatttttcttccataaaattttggtccataaaatagatttccagtgcctggtatttttctttttgttattttagatttctgtattttttgaataaaaagcaattaaaatgagttagatccagcgggaactattagagttattttctatttaaaaatgtgaaccagatatagctaattaattaaggggttagaaaaatacctttcattagttgaatgcataaaaaaaggctgacattaagttatactactgaatatgctagttatatgcgcttctcagttaggtctgtcaggttattttcaaagttacttctcttgaatttggtttttattatagtaatttttttaaaaatctccctcattttcaatctcagttttaactacttctcgggtatttataacctttcacttaggcttgtcagctaatgaaattattcactcgagaaaggtaactccatttaacttgttatcataaaaaagcaaatagttcagattgggaaaagccgcaaaattaagactttgataccctttagatttttcattatgattgatttaggtgtaaaactcagcttcaaaaatgtagagtgaaggaacctagcttaacatcaagtagattatgtggagcaagtgaggatttcagttgatgatccaacagtataacatcctgtagaagtattatatgacaaagatggttgaaagaaggggaatgtacaaccagacatgttagctgtaatcttttcatcagataccatgcattgttttctttagtttttttgtttctactttgattttttaattataagtttttcatagtatcgaagaataaatagaactatgatttatgtggtggtatttacatagttggttttataacagatttcatgttctttcaagtatctgataattatgcatttccttccttactctgtgttgctgtttgtttttacatgcttgccaaaagcagtaatggatccgaattcccagaaaaggatagtaataattctttagtattctcctgtgtccaattaaatctgggtactgtgttagttcatttgtgctttatacaaagcaccagcattcagagatgaaatatagtatgcaccagtcaggaataagatagtaaatgatctacaaataattttcaaataatagttggagataatatgtcccaggcctgtaatactccttgcccccaaagagacacaagcacaaattctctttagagaaaacatcttcaccttaaacttccaagattttcccatattaaataaaccaaacgtgaactgacaatgaaagatcaccaaactcataagggaacaatctactatgaatgagagtcagcagaaacaacaaacagatttagtctatgaaaaacatcagggattggcatcattagagaaacaatataaaataaccactgatggaatgcttaaagatatgaaagaagaaatcagccaagcacagtggctcacacctgtaattttagcactttagaaaggccaggcaagaggctctcttgaggccaggagtttgagaccagccagggcaacatagagagactctatttatttaaaacaaaaaaaaattagctgggtgtagtggcccacacctgtagtcctagctccttgggaggctgaggcggaaggattgcttgagccctggagtttcagaccagcctgaacaacaaagtgagaccctgtctcaaaaaatatatattttatttaatattataattaaaagaaggaatctggcagggtgcagtggctcacacctgtaatcttaggactttgggaggccaaggtgggtggatcacttgaggccaggagtttgagaccagcctgggcaacatgacgaaaccctgtctctactaaaaacacacacacatacacacacacaaattagttgggcatggtcgtgagcacgtgtactcccagctacttgggaggctgaggtggaagggtcgcttgagcctgggaagtctgcagtgaggagagatcataccactgtatttcagcctgggggactggagtgagaccctgcctcaaaaaaaaatgtaaatacataaaaaaattttttaaaaaaacaaggaatcagaaaaataagaaaccaacaagacactttcataactaggcatcaattctggccataatggcttattttaaactaatttgcctgtcaaaaaaatctgtaaaaactgaataaaatactatatacattgtttgaaggcattgagaacaatcagcacaggcaggatctaagagactacaatcattcaaagaagagaaacacgtaaagtgagtaccacattcatcctggccttttcctttatgacattttccaaactggaatgcaaaagaatacaaccctaacaggaagcagcagccttaccaggctgaagaaactgaggcagagtttggagataatagtggctggaacttgaaagtcaaaatcctggagaggagggaattgcagagaaagaatgcaagaatctggatacaaattcctcacaagtttttaacagattcctaaactgtgcttgtatagggtggtgctctaagaaacctagtattaaacaacagctgggagactagacagctgagtagagattattttaaattatcctatattttcttttatgtttaaatctcttaatatataacacattgatttttgtatggggatccattctcattttaaagcatatggataactaattttcccaacacaacctagttcattaatttttggccatttagtatctgctctctgtcagttccaggcttttgtactacgaactccctatgcatttctgtttttttaaatgagggatcctgaatactagggagcctttgggaaatttgaaaataaaagttacatgatcagtgtattttagggggactaatatggcaactaaagctactttggaagagaaagagtggagatacatagattgctattatagttcaggccaatagagaggaattgggtttaagagatacattatggaggcagaagtgttcattcaacaagcgtttgttaaatatctactatgtaatcatgattatacaactagagagaatatgaaaaaaatgaattacgtatgttagcttatagatggatgctctcagtacccatccctattaatcgtcatttccctttgtttagtgaaccttctgatatattggatatcaaatatcctttccaagtattgtctgtcccacttaattctggtatccatgaatgcagaagtgtgctatttatgtaatcatgaacactcatgtatatgtgtataccttcattcattcaacatgtgttaaaactattatgtaacaggcatcatgttaggccttggaacacaaaggtgaacaacatgattcctgctcttaagttgcttacaaagatcatggatgaagatattaaatgataattaaagctgattgatctaccttgtaa

SEQ ID NO: 15638 - DNA, 135588 bp, Homo sapiens
cctgctgtttgctggttcatcattagcatcacaagtccatgctgctgccgttaatggagataagggtgctctacagaggctcatcgtaggtaagcagtccccttaagtacagaaactttaaaagcaactgtttgtcctgaggaagtttgttaatgttagttttaatttgcaatgtactcatacattttaatggaaatatgttattatttatattttcttccaacacatgaacaagaaaggaattaagtcctaaaacttaaaaatatgggttaggattaggtgaaaagtacttgagaaatttctatgtatttagcactaagtctagatagatattctaaggtactaagggaatgaattcatctttatgttaacagatctcgaatgaaacagtggataatcttttaacatttaatatatacccaaagtattaaagtttacaaatgatttaatttttaatgatttaaaattgattcaatgttccccctgtgatttgcatatataagtgatatatagagaggtccaatgcaggagttctagaggagagaataaagagaacaaagaatagctaagaattttctagaaccttagcttcctgctaaagcagagcaaagatccatctttctatcacaaatccagatattcacaagttgcaaatcccaaagagaaaaaaataaaaatatattatttgtagtctttattcacaccagtgtctgatgacatcatgattgacaacttgggctacaaaataaagtccaaattacttgaactttcatacctgttccttccgactttgtttttaccctacatttgcagtttctccaggaacttctactggtgtaccgtaacctctggctaagctagaggttacttctatttcccaataagccatgaattttgtctcactttctccatatgttctgtttccccaccttttttctatctgctactctgttaaccttcttctgtgctaaacaaactcctacttatctttaaagacaaaactattgtatctcacactctgtgaagatttctcttcctctgcttatccttactttacctcagctatctacattcactggaacttgacattttccaccacctccaaatcactcaaacattctaccattcaactaaaactcttactttcagctcacttactgatgacaaacaatagttttccatgctcactgagacctccaatccactagcttctctagttttgaccatcagttttccttctgtcttttccttcctcactactcagccttgattctatgtctgttattaaaatccttctcttggaaaaattccctttttttttttttttttttttttttgccttctgttgcacttgactgttgcattctcaactctggatgtaccaaacctatcttgctaagcagttgaatccagctgaaagattgatagcaccccaaattcatgattacccacttcaaataggcactcagtacttactactcatcataccacattttttctgtaatgaatgtttcatacctctcactctactgaatcctgtgactgccagttccccctcctttcattctctttaatgcagtaggcttactagaggaaatgaagacattaagtaggaactccctcatctttcagtatggtatctacaaatctacctcgatctgtacccatcttctctcttcatcttcctgctaaaacagagcaaagatccatctttctgttaaaggccagttcttccacacatgctctgtgttccatcccctcctgtcttctcagggacattgcttctttttttccccctctgattactatatcttcaacctttcttctatgctaaattctttccatcaacacttaaacatgcttcattgtttccattatttaaaaatcccatctctgtttcttcatctccctttaggtattgccattttcaactttccctcacgactgcattagcgcacaggctaaactgctacaaccatgacttgaataagatagaagtatatttcattctcataatattgcaatcccaactctagatggaccaaacctatcttcctggcaactactaagcagttgaacccagctgtgtaatagtacacagttatgtgggcagtctaggttagatagatatctccatttcacaaaaccatttaggtatactgccaggccttggttcttccattctcaacatgatgcttctatttctgggtcaaaggcagatacgttcattatagtcatagcccagtcagcaggaaggaggaagagagagcacagggaaagcaatttgtcagtaaggaggtagactagacttagaccacaaagccacacctagaacaaaagaagctgaaaaaaaaagtcttgccctggatggtatcatgcccagctaaaactcacggtgctcaattgttgaaaagaagaatgaaagaatgaatggggggcaaatattgctgtctgtcaccaaaaccaagattcttgggccagctgtacccattgtccacacttatttaccttaattcactcttttattaaaacaaaatatactttcttattttgaagtatacatatagagaagtgcatacaacttatatgtacaatttaacaaataaacataaagcaaacatccacttaaaccacctaggttaaggagcagcacattgtcagtaaccccagaagcccctaatgcatccttctctccccactagaggaataggctatcttgacttttataataatcattacattgtggttttaccacctacatatacatccttaaacactttagttaattttgccatttttgactttttgctaaatgttccatgttcacttgaactaaaaaatgtatgtatattacatttttgtcattttcctgctcaaaattctttcattattcccattatacttggaataaaatttgacaggttacttgtatctctttacctgtccatcctcacgttttacctcacgtggtaaaacttgccttctttcagtgtctcacacctgccaagccctttttcatctcagggcttttgcctgaaacgctgttctccctattctctgtctgaataactcttagtcatccttgagatttcaattttaaggtcacttcttcaaagaggcctgctaaccatccagtctcaatgaaatctgttcattgtattccctcttggccctctgtagtttttcttcatagaacttgtttcagattatcactgtatatttatgtgtatgaatattttaacatctctctcctccataagctagtggccttcatgaaagtagtctgggtctgtttaattcatcactaaatccacaaaatccagcacagtacttggcacataagaaatatatttgttgaaggaatgaataaatattttaatcattctttaagtatcttttctcccaagtagtctataatcatcttgagggccaggactaaaaatgaattgagttgaattaaattgaattgaggagcagattgggactaaattccatgagaaaaaaaaattttaagtcaggacgtatgaagaaaaagtaccaagtaaaatgaattcattaatgctttaattaaaaatataaccttcaaagaaaaaagtgcagtatgttataaattaaaaacacttatatttttatggctcagtcatacagattaattaatgtgttattattaaaacctgaaaccttgaaaatccccaaagagaaaatccttaaaaaccaaaaagcaatcatgatgtgaagccagtaggtagctaataaacttatttataaattgtttttctgttttctatcatcttgtctgaggaacttcttattaattactgactgagggtgccactcctcatcttttaagaattgtgccattatgttttctgtgtacctttgctctagagtattttccagcatttgtatatttgtgcaaaaataataactgtttcatcttaaatttcaatgtaattttttttctatgcatatgaatgccaggtggtaatttcaatgtattttaaacatctttttatgtatcacatatttgatgatctctaaatatatgctatttctcttttctaaactagtgacatagtactacagatgaattttttttcttgaatccttgttcaccaactgctcagtgaattcattcactttagcattttctgttttcccctctctgtttccatggagaagtatgtcagtgatgtgtttgactccatggaaacagatgagtgtctctttctacatacacaacgaattaaatcgaacactttctgtgctgcccattgtcctggaggaggactggagaggccttctctgaatgaaacatcatttcagtagcaattcttagtgtttaacctaatacagtggattaatgttttaccataacttactgcttctagattcagatgtattagggcttacttctgagccttaaaatataaacatacatagtaaaatctgaatatgctatggttctcatttatagatatttagctttttctcttaacaccaaactcaaataatttgaatgaatactagaaatgtaattgagaacagaatttagtagattcattttaatactatacagtgtagtattggtagaaaaaagtatagattttagagtcagataaacctgagttttaagttctaactgttatttattagtagtaatatcttggctaagccatttaatttttaagcctcagtttcctcatccgtaaactatagattataatatttcacttgtgtgagagttaaatgaaataatgacagtaaaatatctagcatggtacttgacacatagtagacaataagttaatatcctattactgttattgttatgtcagcttagactaaaataatcaagtttttcatagcttcagatgtctcaatatgaaagagcactaaatgcaacaaagattaatattgtgggttttttgtgaaaactaaacaaaataatttgtaaatatgcatggtgtgtaatgatcaatgttgtcattactgccaataatatttgaggtcgcttgcagtggtatcgtgaccaggaagcaccattctgattctactacaacttttgtttcactgtccatgttctgagcagcataatctctctaaatcatttcctctacttgtttatttatttatttatttttgagatggagtttcactcttgttgcccaggctggagtgcaatggcgtgatctcggctcaccacaacctctgcctccctggttcaagtgattctcctgcctcagcctcccaagtaactgggattacaggcatgtgccaccatgcccggctaatttgttgtatttttagtagagacggggtttctccatgttggtcaggctggtctcgaactcccgacctcaagtgatccgcccgcctcggcctcccgaagtgctgggattacaagcctgagccactgcgcccggcctctacttgtttttaacatcttctgacacagtatttagatacggaagtgagcctcataaatgacagagtagaggtactatttcaggttacttcttcccttacctcaatccctaccttaaaagctagagtcattaaatgtttttaaaatgcttgcctacatgcaaatgtgtttataaatatacttaaatgtttatgcatccatcctaacaatagtaataaaattagctaacatttataaagttatgttttatgtgccagccactgtattgtttggcaactcattaacttaacagtgaaataatatgaagagtttggggtattagtattaccctcatttttaaataaggaaattgagatgcagagaggttaagtaacttgtctaagaagtatcagaactgagattaaagccaagaagtctgattccagagtccattcttttaactgctaaagtatgggacctcaatgtatgggtagatatttttgtacacacgtgcactttcatatgtataaataaataggaatgagaaagataagaaagaaagaaccgattaggtgtgaaccttgcatgatgaaatgaatgattatctagatgggatttttcttaacatttttgtgctatgggcccttctggcaatctggtaagcttctggactcctcagaacaaaaatatatgtatatttttaagagctgaaatgcaatatagaggattacaaaggaaaccagttatattgaaatatcaaatatttttaagttgagacataacaatattctgccataattttttatgaatgtattaaatagcaaggtgttggggcaagtcttacagctatgataattttgaaatagcagtgagtgaaaatgatattttaacatacctgcacaaattataagttatagaaatattttataaaatctcaagtcctctcaaaatacagtatgtctcatgttattattattctcattttgcatgttaggacactgagactcagaagttgagaaatttagttgcacagttaataactggcaaagttgagcctcaaaccaaattatctgatgatgaatcctatgttctttccattgttcccatgttgtcactctataacaataagcagagattttttaatgacagcaaaatgccttcccaagattgtaacagtataaaatatgtaaagtaagaagtgggtgaaatcagatgaaataaatacatcttggatgccatgcaaatataacattttagaacaagcaaataagatacaaatagagactactcttgttacttgtattgggcattgtgttgctgtagctattgtgcggactagcacaactataactgcaagtgacagtcatttcctctaactgctagagttggcgctctggtttctgcacataccagcccattaaccatatgtactcttatgcttccacaagccttaaaataactgaatgcggtagagcagtggctttccagtcatgcttccagctcagctttctggactgtgttgagacagagcacaggcagaatgccagccacgttgagcaagcaccaattggtcatggattagaggccatctccacagttgccagaataattagcacaacacagcacagtagccagctgctttctatattaactgttcctgacaggaatgcaaatttaaatgcactgccatccagtgaatattagtttacatcataagctctacgtttgtacaacatgttacaattaccaaatatttccaaacaatacattgttttattggatcatcaaacaagttgcggtgtagattggacaagtattagctgaatgttataagtgaggaaactaaggaagagagtagggtggatagataaaggcacagacctcgctcagttactggccaggaagcccagaacctaatggtaccctcattattcagaaactagccatgaagccactgtccccctagagctactcaagacaggacctaagtgaggttgaatgctgctttttctaatcatttaggggatatatactttctttctttctttctttctttttttgagacagagtctcactctgtcacccaggctggagtgcagtggtgcaatctctgccttccgggttcaagtgattctcctgcttcagcctcccgagtacctgggaccacaggtacatgccaccatgctcagctaatttttgtatttttagtagagacagggttttgctatgttggccagactggtctcgaactcctgacctcaggtgatccacccgcctcagcctcccaaagtgctgggattacaggcatgagccaccacgcccagccgggggatatatactttcaatttcctcaaatagacaaattttgccttataggcacaaaatattggattgtggtgacataacccaataacatcttctcttctgggaaatacatatatcggttacaaagaaacaatgtatgtcagggaacaaagagaaggcttgaagtttccctgtatcttatataagacttaggaagatgacaggattgacctaaagttctgtgtccttgaaggtgagttgcctattaaccccatgatgctgactctgctttgaccctgaggagcctaatcaattaggacaggggtgttcaagcttttggctttcctgggtattggaagaagaattgtcttgggctacacataaaatacactaacactaacaatagctgatgagctaaaaaaaaaaaaaatcgcaaaaaaaaaaatctcataatgttttaagaaaaattataaatttgtgttgggcagcattaaaagccttcctgggctacatgtggcccacaggccacaggttggataagctcgagttaggattatcccagaatgtgagatggcctctgtttctcagcacttactcttgtgaccatagttcctaatcctctcctttactaaagcttctaaggaggaatgtctctctaggcagaaagtgtaaatgaattactgttatcttgctaatactagctactactatctttgcttaacctaacaagatgccagtagagactgccctttaatcatgaaagacaactagagactagtctcattatggcatattctctataagtatcactgactccagaaggactcaaactgataaaaggaacatgctcttatactacattttagttctgttaatgagtttcagtttaaataaatctttatctataaatacagtgatagaatctttggaatcttctagattagatattgaaggctctagtacaaagaatatactgttgtactacacagagtcttgtgcataagggcttctgttattatatgtgttgaatccaatgcaaaatttgcctccatcttcaaaaaagttctgaaaaagaatatctgcctcctctaggagttacacacaacctgaatacatctgtaaggctctttcaaatttccagagcaatgacctttcttgctttttaccagcgaagtaaattgctgaaaagctaggaagtctttctgggttccagcgtatccaagattaaaatatatgtcgaagtattgcaaactaaaacagtagcttagtttcatgcccaaaacaacccaggcatttatctggtgtcttttttgtttgtttgtttgtttgtttgtttgtttgttttagttttaattgatacatactaattgtatgtgtttatgggggtggagtgtgatgttataatacatgtatagattgtgtaatgatcaaatgatgatatttagcatatgcattaactcaaacatttatcatttctctgtggtgagagcattcaaaattctagctattttgaaatatgcaatacagtattgttaactatagtcaccctactgtgcaatagaacaccaaaacttattccttatatctaactgtacccattgacatttctagcattctattttccaaagaaaacactttcattttgtctattcacttcctccattagcacagttcaggccaagataccttggaagtaactggcttccctcttgttcaacccagatgtaattaccctcagctagtaagagatgaatacttgatgattatctgtaacaaaagtggcaacatttttttcacttacaatacatagctggagccatggcatcttttgtagttattgtttttaactaaaatttattgaggtatataatacagtaaatttcacccttgttcgtatacagttatttaattttgagaaatatataatcatgtgatcaccatgaccatcaagataaagaacaattctatcatgccccaaaatgttagaactgtgtccttttatagccagtttctccccacattccacatattccagtccctggtaaccactggtctgttttctgtctctatagttttaacttttccacaatcctatgccaatgtgtcacatgatatatatgccctttgaggcagatttctttcttttttttttttttttttttttttttttgagacagagtctcactttgtctcccaggctgaagagcagtggtacaatcatgactcactgcagcctcaacctcctaggctcaagcgatcctcccacctcagcctcctgagtagctgggactacaggcatgttccaccatgcccagctaagtgtgtgtgtgtgttttgtagagatggggttttgccatgttgcccaggctggtctcaaactccaggcttcaagggatcttccccccatcagcctcccaaagtgctgggattatgggcgtgagccactgtgcctggtgaagtggatttctttcacttgacataaggcatttgagaattttccatgttgttgagtggatcagtagttcattcctttttattagtgagctatattccattttatggatgtactgcagattattttctcattttgcagtttaaggacaattgggatgtttccagtgtttagcaattatgaataatgctgccgtaaatattcacatacaagtttttatattaacttaaactttcatgcttttatttctcctgagtaaacacttaagtgaaaaattattaggccataattattaggctacagttttaatagtagctataccattttgcatttctaccaacaatggctgagaattctattaatagttctacaactaggttctacatccttaacagcatttggtattgtgaagtttgcttttgattgttttcattttagccattctaatagatgtgcagtggtatcgcattataggttaagtttacatttccctgtgtgttaatgatgttgagagtcttttcatatgcttatttagtgaaatgtctattaaaaccttttggccaccgtttaatttctctttttttattttatttttattttatatatatatatttttattatactttaagttctagggtacatgtgcacaacgtgcaggtttgttacatatgtatacatgtgccatcttggtgtgctgcacccattaactcgtcatttacattaggtatatctcctaatgctatgcctcccccgtcccccgaccccacaacaggccccagtgtgtgatgttccccttcctgtgtccaagtgttctcattgttcagttcccacctatgagtgagaacatgcagtatttggttttttgtctttgctgagaatgatggtttccagcttcatccatgtccctacaaaggacatgaactcatcattttttatggctgcatagtattccatggtgtatatgtgccacattttcttaatccagtctgtcattattggacatttgggttggttccaagtctttgctattgtgagtagtgccacagtaaacatacattgtgcatgtgtctttatagcagcatgatttataatcctttgggtatacacccagtaatgggatggctgggtcaaatggtatttctagttctagatccctcaggaatcgccacactgtcttccacaatggttgaactagtttacagtcccaccaacagtgtaaaagtgttcctatttctccacatcctctccagcacctgttgtttcctgactttttaatgatcgccattctaactggtgtgagatgatatctcattgtggttttgatttgcatttctctgatggccagtggtgatgagcattttttcatgtgtctgttggcttttaatttcttttctttcttttttttcttttttttttttttgagacagggtcatactctgtcacctaagctggagtgcagtggtgcaatctcggctccctgcaacctccgcctcccgggtttaagtgattctcatgcctcagcctcctaagtagctgggattacagacatgagtccagccactgcacctggctaatttttatatttttagtagagatggggttttgccatgttgcctaggctggtctcaaactcctagactcaagcaatctacctgcctctgcctcccaaagtgctgggattacaggtgtgagcactgcacccagcctaagtttcattatccatcttattattctattgtaaaagtttttatttattctggaataaaaggccttatcaaatatgtgttttgcaaatatttcctcccaatttgtggctttttaaaaatttttcttaattgtgttttcaaacacaatttctttatttggatgaaatctaatttattaatttttatggattattcttttgtatcatatctaagaaatctctgcctaacacaaaatcaggaagattttcaccttcaattgcttctaaaagttttatatagttataggttttatttattttttatttttttaacaggctttattcactttatttttcttgtataaaaccctatgttgtagccacagctggagcctgagtccgctgcacggagactctggtgtgggtcttgacgagttggtcagtgaattcctgacagggagacttggtaaatacaatcttccagaggtcgggggtcaggtagctgtaggtcttagagatggcatcaaaggtggccttggcgaagttgcccagggtggcattgcagccccgggctgaggtgtagcagtcatcgataccagccatcatgagcagcttcttgggcacaggcgccgagacaatgccagtgcccctgggtgcagggatgaggcacaccagcacagagccgcagcggcctgtcaccttgcaagggacggtgtggggcttgccgatcttgttcccccagtagcctctgtgcacggggacaatggagagcttggccaggatgatggccttacggatggtggtggccacttccttggagcacttaacacccagaccgacgtggccgttgtagtccccgatagcaacaaacgctttgaacctggtgctctggccagcacgggtctgcttctgcaccggcgtaaccttcaaaatctcgtccttgagagaggcccccaggaaaaagtcaatgatctcagattcattaatgggcagggagaagagacagatttcctccagggacttgatcttcatgtccttgaccaagcggcccagcttggtgacgggcatgcactccttatcctcggccttgccttctcgagctccacggcctcagcccgggccccgtccacggccgcaaccccggccccggatgccactgcggaaacctccgcggaagccaccgcggttccccatcccagggccaccagggcctccggccccccgccccccccgcccacctcccgctgcaccggcgttatcagccatttggtgttttctcggagaagaagcagttataggttttagatttaagtttatgatacgttttgaggtaatttttatatatggtgctattatggactgaatatttgtattcctccaaaattcatatgtttgaaaccctaaccctcaatgtgatgatattaggaggcggggtctttgggagataatttaagtcatgagggtttagccctcgtgaatggaattaacacccttataaaaggaaccccagaaagctctcaagccctctttttcatgtgaggatatcagaagtcagcagtctgcaactcagaagagaggcctcaccagaacctgatcatgctggcatcctgatctcagacttctagcctccagaactgctaggcacaggtgcataccaccaagacagattttttctttttttttctttttttttttttttagatatggggtcttgctatgttggccatgctggtcttgaacccctggcctcacgtgatcctcctgcctcaacctcccaaagtgctgggattacaggcaggagtcaccattcccagccaatttttgttgttgttgttgttgttgagacagagtcttactttgttgcccaggctggagtgcaatggcaatatctcagctcactgcaacctccacctcccgggttcaagcgattctcttgcctcaacctcctgagtagctgggattacagacgcccgccaccacaccttgctaatttttgtatttttagtagaaacggggtttcaccatgttggccagactggtctcggactcctggcctcaagtgatccgcccgcctcagcctctcaaagtgctgggattacaggcatgagccaccacacccagccccaatttttgttttttataagcctcccagtctatggtactttgttacagcagcttgaactgactaacatacaaaatataggttgaaagctttgggtttatttttgtttttgtatatgtttttgtttttgtatatgaatgccaaatttttccagcaccatttattattattattatattattcactcctgttgcccaggctggagtgcagtggcatgatctcggctcactgcaacctctgcctcccaggttcaagcgattctcctgcctcagtctcctgagtagctagaattacaggtgcccaccaccacacctggctaatttctgtacttttagtagagatggggtttcaccatgttgaccaggctggcctcgaactcctgacctcaggtgatccacccaccttggcttcccaaagtgctcggattacaggcatgagccaccatgcctggtctttccagcaccatttatttaaaagattatctattggtttgcctttgcatctttgtcagagtcagttaatcatgtctgtgtgtgtctatttacatactctcaaatctgttctattggtctataagtctatttctttgccactaccacattctcttcattactgtgggtttacaatatgccttgatatcatacaatgtgagttcttcaactttgttctttttttcaaaacctttttattcttctacttcttttgccttttcataacaattttaaaactgcacattcatttctacaaagattgctctgggaagtttttaacaaattattcttagtagtaccttatagtggggattaattatgaatttaatttaattttttaataaagtactatattaggtttttattgctgtgtaacaaattaacacaaacttagcttacaaacaacaaacatttattacttcacagtttctgtatgtcaggaatctagacactgctcaagctgaggcttttgctcgtggtgtcacaagactgcagtcaaggcgtcagccagggctaaggtctcatctgagatttaggattctctccccactgcacattggcagaattcttttttttgagacagagtctcactctgtcacccaggctcgagtgcagtggtgcaatctcagcttcactgcaagctctgcctcccgggttcacgccattctcctgccgcaggctcccgagtagctgggactacaggcgcccgccaccacacctggctgatttttttgtattttttagtagcgatggggtttcaccatgttagccaggatgtctcaatctcctgatctggtgatctgcccacctcggcctcccaaagtgttgggattacaggcgtgagccgctgcacctggtccagaattcacttttttaaaggtacttaatatgtcaaccttattgtttctctatatgcacatttatttgttactgaaaattgaaaaaatagcatgttggaattttcttttaatataattcaaatttttaaaaaccagaaaatctaattagttatgctctaatcaaacttctcaatgttttcttttcattctttccccacaagttaccgtgcttcaaattccagatgttgggattcatctcactgacttaggttctaaaacatatgggagccctgtgtggtggcttatgcctgtaatcccagcacatgataataattcagacttattggtgctgctttgggttcaaattaaaaagtagagctaaagtatattcgagttattcaaatacattcaaacttacacagattccttataaattactgctatcaaggtaagaaggaaaagatacaagaagaaaaagacatcactcatgataggttattattggtatacagtctatcctagcatagactgctgcataaatttgccagcaagaaagaaaagtacaagaataaagtttatgactaaatcacctcattgtcataatttcctattctagcattctcagaaggatcccatctatgatacatgtagaaactgcagccacatttgaatggttcaattcttgattcattctgaaccctcttaggcccaatatttgttagctttcgtttaagctgagaaaaatctgttgagtaacaggtatctcagttttaccatcctttctttccacaaataacgatgtcctttttcctctcctcctgtaaggcaaaccatctctgatgtcctggaaggtctttgcttttctatcttgttgttggggtgaaccttctggtggaggggaagggaatttggtacctgggtggagaatcaagttatcaaggttctttattaacgttttggagcagaagttgtgagaggcctctgaatcatcctgggaatctttctttggtgagcatttgtgaagactttgggatcaaggtgcacatttgtgatgagtcgatcaatggtctagtcatagctctaagctccttctggatctttagtcccagcagaatgtgttgctgaactctcaaattgctacaaggtaccctggaaagaactatgtagcccagaaagagcctgaaaacctaaactccaacaaatagtgatgaacaagttgactacagtttttttttaacaattttaaaattcattgcagtttgcttctccaaggccagcaggaaagtgtctctgctgcttcaaatctctacaatttctacctcggacctctagacactcttttgaaagactcacctgattaggtgaaagcaacccaaactaatctctcttgattaacttgaagttaaatgattaagagacttaattacatttgcaaaatcccttcatatttgccacataacaaaatctaatcatgggagtgacatcatagtcctgcccacactcaagaggaagggatcatacggggcatgtataccaggggctggaagtcttggatgccatgttagaattatcctaccacaagtactgttgagagtatctatatcttaagtggactttgaaggagtatatcttccaaggaatttatccatttcacttaaattgtgagtttatagcatatgacattctcttatttgccttttaatatctgcaggctttgtagtgatgtcattcttgatactgggaatttgtgtctgctctgtttttaatgatcaatctgattagagatttattaatttaattttccaagaaacaacttttagcttcattgattttctctatttttttctgattttaatgtaattgctctctgttcttatttttcttatgtacttccttctgcttgttttgggttaaatttgctcttctgttttagtgttctaaggtagaagcatagataattgatttgaaactattcttctattctaattaaaagcattcattactatatatttccttctaagcttccctcatgtgtggtgcaagaaccttacaacaacatgtttttattcatttaattatgctttttaatttcccttgagattttctctttaacccatggattatcttaaatattttgttatttcttgttattattctgttattgatttctagtttaattacactgtcatctgataatacactttgtatgacttcacttctttaaatctgttagtattcattcatgacccagtatattgtatattttggtcaaggtcccatgggtgttttgaaagattgaatttctggctgtcattagatgaagtgttaaataaataccagttggatcctgttgctttatttttgtgttcagttcttctgtgtccttgctgattttcattttagtggttccagcaattattgagagaagagtgttgaagttaccaattataattgtgttttcaagtgtttctttctattctatcagtttttgctgcctgtatcttgaagctctgtgatttagtatgtatacatttaggaattttatgtattcttggtgaattgacccttttattgttatataatatctctatttgtttctggtaattgtcttttctctaaagtttaccttattagatattaatatacttaactccagctttcatttcattagtatttattatagttttgctaattctttgacttttaacctcctatgttattgtattttaagtgagtttctttttttttttttttttttttttttgagacagagtctcgctctgttgcccaggctggagtgcagtggcacgatttcggcttactgcaagctccgtctcccgggttcacgccattctcctgcctcagcctccaaggtggctgggactacaggcacctgccaccacacccagctaattttttctgttttttagtagagagggggtttcaccatgttagccaggatggtctcgatctcctgacctcatgattcgcccgccttggcctccaaaagtgctgggattacaggcgtgagccactgcgcccagcctaatcaagtcttcttttatatctcagcctttttattgatgtatttacatcatttacatttaatgtaattatgaatgttaagatttaagatttccaatttattgtgtagaacactgcatgttccttctatttttcattcctgtcctcctttccgtttcttgaatatttttagtattccattttaatttatatatggtagagctttttgtaatgctttattaagatataattcacatactatacaattcaaaatttaaagtatacaattgagtgattttgtgtattcagtgttggacaaacgtcaccacaaatgatattagaacactttcattatcccacagagaaacccttcaccctttggctgttactcttcaaatttgtgcccaacccccagtcctaggcaactactcatctactttctgtctctatagatatgccagtgccagatatttcacataaatataattatataatatgtggtattttttgactggcttcttttgcttagcataatgttttcaaggttcatccatgttgagcatatactagaccttcattccttttgctgagtaatattccactgtagagctatacaacattttgtttaaccattcgtcagttgatgaatagcttatggatacttgcattatttccaccttttggctctcatgaataatactgcaatggatatttgtgtaccagtttttgtgtggacatatgtcttcgtttctcttgggtacatacttgggattggaattgctgggtcaaatggttacttaatgttttgaggaacttccagaatattttccaaagtgactctaccattttagattcccaccagtagtatatgaggattttgatttctccatattctcattaatacttgttattatgtatattttttattataaccatcctagtgtatgtgaagtggtatcttatattgtggtttttgttctgttacccaggctggagtgcagtggtgcaatctcagctcactgcaacctccacctcctgggtttaagtgattctcatgcctcagcctcccaagtagctggtattacaggcatgtgccaccaccacacccggctaatttttgtatttttagtagagacgggtttttgccatgttggccaggctggtcttgaactctaggcctcaagtgatccgcccacctcagcctcccaaaatgttgggattataggcgtgagccaccctgctgggtctatgttgtgtttttaaataaatctctttgtatagtttgttttcattggaggttttttatttgtttctgagtgtgtgtgtgtgtgtgtgtgtgtgtgtgtgtgtgtgtatgattgttctaggtattagaatatgtatacttattttatcacagtctgtattttccactttgagtacaacatagaagccttatcactaattaggtccctttacccttctttttgatatagttatcttaaaaatcacctctacataaactgagaaccacatcatacagcaaggttatctttgctttcaatcatcgaaacataactctaaaaattaaagaggataagccaggcatgcactgtagccccagctactcaggaggctgaggcagggaggattgctttagcccaggagttcaagaccagcctgggcaacacagtgagaccctcattaaaaaaaaaaaaaaaactaaagaggttaaaaacagtctattatgtttctcacatatttacattctgcttctcttttttcattcctgatgttctatttgtttcatgagtgttcatagttggttgttggagcacttttttgagagttgttttaaaattcttgtcatataattctaatatatctgtgtcatcacagtgtcagtgcctgttgattatcttttcttgtttaaattaatattttccaaacttttgagttgtttcataattttggattatatctttgacattttctgtattatgagactctggatcctatttaaatatcttactttagtaaacggacaatctgtcaaggtttagaatgaacattctctttcaattttgtggttcaaatttcaagttagttttcagagatcttgcagggctcttctggtttgccccacctctgggctgctcaggcccatttagaaccaaggcaatgatctaactatagttcaattctcagagcttttgctatcttgattctgaccagtttcacacatgggctgctcaaaagtgtcctgactttttgtaccaatttaaagaattacttcctccaactttgtcctctccatattcctatctcctactctctaattggaaaggggtaaaatactacctcattgctatcctttgcttaattcggggcattgatagtttgacagggctcctcccaacggtctctatagtgtccagtggggaaaagaggtgcagtttcttttattgtatgtgttttgagtagagcatagtcaaatggttcactcagcagagttacctgcctcccagtctttttactagagagagtagacttctcttgagaactttggcatctgtgcaccttggtgtttctggattataggctactgtagcccataatgggaggcaaaagcaaacaagcaaacagaaaacgcttcagggaacttaccaccaggttgtctctcaagttccaaagttcctagtccaagatgccttcccttctctgcctgtcatttattttgccttttgccctggggattttagttgtaattagcaggaggatgaggatgctatgtacttgctctatcttgtcatcttgtctagaaagggaaatcaactgtgatttttttttttttttttttttgagatggagttttactctcgttgtccaggctggagtgcaatggcacaatcttagttcactacaacctccgcctcctgggtttaagcaattctcctgcctcaacctcccgagtagctgggattacaggcgcccgccaccacgcctggctaatttttgtatttttagcagagactgggtttcaccatgttggtcaggccggtcttgaacttctgacctcaagtgatctgcccaccttggcctcccagagtgctgggattacaggcgtgagccaccgcacccagcctgtaattcatttttgtatcactcataaaacataccacaatgcctagtgtacaattggcattaattaaatatttgtttcaaaagacaagagtgagtgagggaggaacataagtagctctgtatctcaaaatgttagttcagcataatatgattgagtcatcagtttaaattctagccccacctactttcagtgtgaacatagactggttacttaacttatttgagcctcagtttcctataatatgacaatggtaatatctacttcttaggacaagtaaaaataagatgatatacttaagcatttagcacaatgtttgataataaacagcgaatatagttcctacttatattagtaataacaattatcaaatatcactatctgtttcttatccttataggaaactctgctcttaaagacaaagaagatcagtttgggagaacaccacttatgtattgcgtgttggctgacagattggattgtgcagatgctcttctgaaggcaggagcagatgtgaataaaactgaccatagccagagaacagccctccatcttgcagcccagaaggtgagaagtaaaatttccttgaagagtaaatgttttgtgtgatgtctgctagttgattagtggaactatgcaatggacagataataaagaagtctcaaatgcatgactcataggttttatatattttctctaaaagctgtctttaagctgcagagagtaaaagcacagataactatcagcggctgcatttcaggttcctcaaacagtagaatttattctgtgatctaaagtttattgggaaaaaagtgatcaaatttatatatacaatgtgatgaaacaatgttaccaatctatgtatagggaaaaaataaagaccaaaaagaaatactcaaagatattaatagtggttgggtttaaatttggggaatatatatggaatttttttacttttcactgtttaaaattttttccttaatgagtattacttttactataaaaagttgaaatcccagcctgggcaacatagtgagaccccatctctacaaaaaattaaaaaattagctgggcatggtggcgcacacttgcagtcccagctacttgtggggctcaggtgggaggatcacttgagcctgggaggttgaggctgcagtgaactgagttcacatcactgtactccatcctgagtgacagggcaagaccctgtctctaaattaattaattaattaatttaatttaatttaaaaggttgaaatgtcgcttgaaatatgtggcattaagaagcataaaataaatttattttctgaatgtattttcaactttttaaaatctaaaactatgttgccaatattaatgatttcacatttttaaatgtattattaagagctcagatttttaagattaaacccatcaaacagataaaataggaagcttctacatttagttaaagacttattcacctaaaaactatttttcttccataaaattttggtccataaaatagatttccagtgcctggtatttttctttttgttattttagatttctgtattttttgaataaaaagcaattaaaatgagttagatccagcgggaactattagagttattttctatttaaaaatgtgaaccagatatagctaattaattaaggggttagaaaaatacctttcattagttgaatgcataaaaaaaggctgacattaagttatactactgaatatgctagttatatgcgcttctcagttaggtctgtcaggttattttcaaagttacttctcttgaatttggtttttattatagtaatttttttaaaaatctccctcattttcaatctcagttttaactacttctcgggtatttataacctttcacttaggcttgtcagctaatgaaattattcactcgagaaaggtaactccatttaacttgttatcataaaaaagcaaatagttcagattgggaaaagccgcaaaattaagactttgataccctttagatttttcattatgattgatttaggtgtaaaactcagcttcaaaaatgtagagtgaaggaacctagcttaacatcaagtagattatgtggagcaagtgaggatttcagttgatgatccaacagtataacatcctgtagaagtattatatgacaaagatggttgaaagaaggggaatgtacaaccagacatgttagctgtaatcttttcatcagataccatgcattgttttctttagtttttttgtttctactttgattttttaattataagtttttcatagtatcgaagaataaatagaactatgatttatgtggtggtatttacatagttggttttataacagatttcatgttctttcaagtatctgataattatgcatttccttccttactctgtgttgctgtttgtttttacatgcttgccaaaagcagtaatggatccgaattcccagaaaaggatagtaataattctttagtattctcctgtgtccaattaaatctgggtactgtgttagttcatttgtgctttatacaaagcaccagcattcagagatgaaatatagtatgcaccagtcaggaataagatagtaaatgatctacaaataattttcaaataatagttggagataatatgtcccaggcctgtaatactccttgcccccaaagagacacaagcacaaattctctttagagaaaacatcttcaccttaaacttccaagattttcccatattaaataaaccaaacgtgaactgacaatgaaagatcaccaaactcataagggaacaatctactatgaatgagagtcagcagaaacaacaaacagatttagtctatgaaaaacatcagggattggcatcattagagaaacaatataaaataaccactgatggaatgcttaaagatatgaaagaagaaatcagccaagcacagtggctcacacctgtaattttagcactttagaaaggccaggcaagaggctctcttgaggccaggagtttgagaccagccagggcaacatagagagactctatttatttaaaacaaaaaaaaattagctgggtgtagtggcccacacctgtagtcctagctccttgggaggctgaggcggaaggattgcttgagccctggagtttcagaccagcctgaacaacaaagtgagaccctgtctcaaaaaatatatattttatttaatattataattaaaagaaggaatctggcagggtgcagtggctcacacctgtaatcttaggactttgggaggccaaggtgggtggatcacttgaggccaggagtttgagaccagcctgggcaacatgacgaaaccctgtctctactaaaaacacacacacatacacacacacaaattagttgggcatggtcgtgagcacgtgtactcccagctacttgggaggctgaggtggaagggtcgcttgagcctgggaagtctgcagtgaggagagatcataccactgtatttcagcctgggggactggagtgagaccctgcctcaaaaaaaaatgtaaatacataaaaaaattttttaaaaaaacaaggaatcagaaaaataagaaaccaacaagacactttcataactaggcatcaattctggccataatggcttattttaaactaatttgcctgtcaaaaaaatctgtaaaaactgaataaaatactatatacattgtttgaaggcattgagaacaatcagcacaggcaggatctaagagactacaatcattcaaagaagagaaacacgtaaagtgagtaccacattcatcctggccttttcctttatgacattttccaaactggaatgcaaaagaatacaaccctaacaggaagcagcagccttaccaggctgaagaaactgaggcagagtttggagataatagtggctggaacttgaaagtcaaaatcctggagaggagggaattgcagagaaagaatgcaagaatctggatacaaattcctcacaagtttttaacagattcctaaactgtgcttgtatagggtggtgctctaagaaacctagtattaaacaacagctgggagactagacagctgagtagagattattttaaattatcctatattttcttttatgtttaaatctcttaatatataacacattgatttttgtatggggatccattctcattttaaagcatatggataactaattttcccaacacaacctagttcattaatttttggccatttagtatctgctctctgtcagttccaggcttttgtactacgaactccctatgcatttctgtttttttaaatgagggatcctgaatactagggagcctttgggaaatttgaaaataaaagttacatgatcagtgtattttagggggactaatatggcaactaaagctactttggaagagaaagagtggagatacatagattgctattatagttcaggccaatagagaggaattgggtttaagagatacattatggaggcagaagtgttcattcaacaagcgtttgttaaatatctactatgtaatcatgattatacaactagagagaatatgaaaaaaatgaattacgtatgttagcttatagatggatgctctcagtacccatccctattaatcgtcatttccctttgtttagtgaaccttctgatatattggatatcaaatatcctttccaagtattgtctgtcccacttaattctggtatccatgaatgcagaagtgtgctatttatgtaatcatgaacactcatgtatatgtgtataccttcattcattcaacatgtgttaaaactattatgtaacaggcatcatgttaggccttggaacacaaaggtgaacaacatgattcctgctcttaagttgcttacaaagatcatggatgaagatattaaatgataattaaagctgattgatctaccttgtaatacataagtgttttataaaatatctatagccataatagtcattgttattattgacatgagaagaccaaacattctcatacattatttattatgtttctagtttttgtgtgtgtgtgatagtgaactgtattatgttatcttttcttgggttcattagtgggaaaagctcatattcccaaagcattttgctcacatctctattagagccccattaccttatattgtaattattgcttacttgtctcttttctactaggctggagctccaggcaagtagctctttttgtttgtttttgaatctctctgaatctagtaagttctgacatgtcttggttgaatgaattttattttacttttatagaaagtcattactaatacaaatacgagaccttttgtttattggaaacatttatctactttaaaaatatatatgtttgtggaaaaacttattgaactgtgctgcttggcttagttattttggcacatgttcacttctctggaaacaaattactgttagtccaagaaactgaagaaatggtacccatgagaataaaattaatctcaatatactgaacatctgcacctaatttgtttttcatttagaaccatcagtttaatccaagaaagcaattggtcataccttttctgggcttctcacaaaagatatctaattgttagaaatgttttgctccagggaggctactatttctctgacttctactgatacatttgttaataaggataaaaaagctttagaaatattagtatatgttaatagttatgcatgtttaatcttccaggaggttatttatttggcttcaagaagcttaagactacccactttgacaaattatatcacagtaaacacaaaaattaaagaaccttctggttgtggctgcattgtcctttttttaaattcataaataattctcagttcatctatgaaaattgaatgtttattttcagttttcaaggtacgctgtttccatgttactgatttacaaaaaggagaaagaatacctctgaaacttttcaggaacacttataccaggtaacactattaggttttcttattttgcagatgcacacacaaacacaacaaacaatccacgccccagtccccttcagctctgtattccccctcagtacatatatagctctaccataactcatcaccacagtttattggagattttgtttatctaggtctcacgcccagtaaagctatttgaaggcagtgaccatgtcttatttgatttcatagttacagtcctagcatagcttctgccacttaataaagacagtaatttatttaaggaatacatgaatgaatgaatgaatgaatgaatgaatgaatgaatcagtaaatgtgaatatcaaatagatttaatatgaagggcatggccttcaagactgttgaaatttaaatgaataattatatttattccttttcactatccactccctgcccttacaattttgcaatcaggattttttaagattttctgtgagcttaatttcttaataaacaatgctcttgtatgcctcaatttcttcatctataaaatggaataatacatcctatcttctatgtagggatgatgagtccttagatataaagcattctgtttgttggagaaatttattctcaaggactacattatcaatattattgctattagtcacactacaatgtaggtgcaaacatcaaattactgtttagagatcagcagatgtcagagatagaaaggctctttgggatcttcttgtccaatttgtccttggatgaggaaactgaactctactccttttacatctcttctctttaaaaattactgtactcacattctctttgcctttgcatatgcctggaattttttttttttaattatcttaagcatagagataagaaagaacagggcctggtgccatggctcacgcctgtaatctcagcaatttgggaggatgaggcaggaggatcacctgaggtcaggaatttgagaccagcctggccaacatggtgaaaccccatctctactaaaaatacaaaacttagctgggcgtgatggtgcgtgcctataatcccagctactcaggaggctgaggcaggagaatcgcttgaacctgggaggcggaagttgcagtgagcggatattgcaccactgcactccagcctgggcaacagagtgagactccatctcaaaaaaacaaaaacaaacaaaaaacaatggagaactgagaaaacattaggtacctaatacctcgaagagatcaaactcagtatttcttatttttgcttcagaatttttaaacaaaactatagattcacttgaagtcttccatttatcttccaaaacccttctttccctgtctcctcagtctgtcttgattttgttggtttcaattcccatgcatatgtttctacctttactttatgtgtgtgtgtgtgtgtgtgtgtgtacatgtgcacatacactattatgggtaaaccatattattttgcatctttaaattaatggtattatactgtgtgacatttaccaacttgctttttcaacttaatattatgtatttgaaacttcttcatgttgaaacatgtagccctatttcataaaagattatatccagatgcctaaaagacacatgagatggtacacaacatcattactaattagaagcaaattaaaactccaatgagatactactacatgaccagtggaatgtataaagtaaaaaagtctggcaatcaatattgattgatggtgaagatatggagcaactggagctccccaacatttttgttgagaatgtatattggtacattcactctcgcaaactatctgactatatctgccaaagctacacacacacacacacacacacacacacacacacacacacatacacacatccctcatctcaattcatgctcccagccccggtaatacctaagaaaaataagtgcctctttctactagaagacatgtatgagaattacatgatagttttatttagaaaagcaaacattcctttttttaacttctatttttccataagttattgggggtaaaagtggtatttggttacatgagtaagttctctagtggagatttgtgagaacctggtacacccatcgcccgagcagtatatgccgcaccatatttgttgtcttttatcccttgcccccattccactcttccccccaagtccccaaagtccactgtatcattcttaggcctttgcatcctcatagcttagctcccacatatcagtgagaacatatgatgtttggttttccattcctgagttactttacttagaataatagtctctaatctcatccaggtcattgcaaatgctgttaattcattcctttttaaggctgagtagtattccattgtgtatatctatacaccagagtttctttatccactcgttgattgatgggcatttgggttggttccacaattttgctattgtgaattgtgctgctataaacatgtgtgagcaagtatctttttcgtatgatgacttcttttcctctgggtagataccgagtaatgggattgctggatcaaattgtagttctacttttagttccttaaggaatctccacactgttttccatagcggctgtactagtttacattcccaccagcagtgtagaagtgttccctgaacgccccatccatgccaacatctactgtttttttattctttgattatggccattcttacaggagtaaggtggtattgtgttgtggttttgatttgcatttccctgatcattagtgatgttgagcattttttcatgttttttggtcatttgtgtaacttctttataaaagcaaatattcttaatagtgcagacaacccaaatacgtaccaacaggtgaatgagtagctaaattgtgatgtattcctacaatggaacactgcatgaatgaactgctgacacgttcaaccacataagttaatttcatagacattatgttgagtggaacaagtcagacacttataaaaaatttatttgctgttcatatcaacctcaggaacaagaaaaactaatctatggtgagtcaaatcagatttgtggttacctaaaagatgggtaatatactgagaagaatatgaataagctttcaggggtgctgaaaatgttctggatcggtgtgtgtgttggttacattaaaaggtaccagtctgtatgcttaagatttatgcactttactgtatatgttatattctcaatttttaaagtattatttaaaaaatgataaaatgttcagaacttggtagacattatttgtagggaaggtaagggaggacggaaccaagaatggttcctgacctagactgttaagcactcaggtcaaatttcccccatccttagcctcaggagctatatgaaagccctgtgtctatgctcttatccaggggttcttagatgaacatgcagcagaatcacttggagaacttgttaaaacatagacgtctgggccccaccaccagtgtttttaattcagcagggctggtgtggggccagagaatgtgcttatctaacaagctcccaggtgatggtgatgatgtaggcaacacactttgagaatcactactctattctgcttataccatttgtctttgctgcattttcaatgctattggctccataacctctagatacctatcctgttttactggggactcttttgactggtattcctagctcttgatgacatgactcatagaggtaggatatactagtccaggtacaattttgagaggaagttatcgagttcagttgtgaaaaatggaattttaggcttcggtgataatgactagtatgaattgtgatagtttgcatctccaaagtaaggtcttggctggagttattagtatacatatagaaaccatagaagtagttgaagggctcaggtatggtttatagatgggaagaggactagaaatagaaaacaccaatatttaaggtttatttacagaaaataaacttacaaaggagacagtacaagataggagaagaactagatcagagtggtgttatggagccagagggacaggtttcaagcagaagaggatccatttgtttcatcttttttactatgatgctaagatttgaatagttccttttccactaaatgactcaataaatggatggatataaatatgataagaattaaaaggcttccactggatttttcagttagaaagtgaccttagcaagagcaatggtatttagtggacacacaagctagatatatatcactgttgagtaaacaggaaatgaggatatggagacagtacgagtgattgattaatggggttattgatcaggaaaagtatggacggaagaaattgtggtgggaaaatttttaataaataataatctctcccagtataaccgtcacccactttcaataaatattaattcataaacttgtttctgtagacttcaaactgttttattatatattctattatttcatccataaatatttcagtatatttataattcatatatccccacgatatcattgtaccaaaaagaaattagtgataattctgtaatattattaaatacctaatcagtgttcaaattttcctgattatatctcaaacatttttttacagttgatttattcaaatcaggacctaaacaaggtctatacattgtatttggttgataagtcttttaagtctcttgtaatctaatagatgagagatatttgaacacgtttaaatgttaaggaaaaggagacatcaaaaatttaggagaaagaatggattattgatggatcaaagtcgctggggagatgggaacagaaaggacagtcgggtctgggcacagtagctcacgcgtgtaatcccagtgctttgggaggctgaggtgggcagatcacctgaagtcagaagttcaagaccagcctggccaacatggtgaaaccccatctctaataaaaatacaaaaattagccaggtgtagtgacacacgcctgtaatcccagctgtgcgggaggctgaggcaggagaatcacttgaactcaggaagcagtggttgcagtgagccgtgatcgcgccactgtactccagcctggtcagcagagggagactccttctcaaaaaaaaaggacagacagttggaaagtttagatacacagtaggaaagtttgttcaatgaatgagtatgctatgaacttagaatgtatctgaatattcttgacaatcaattataaaatatgaaaactggaagggccttggaaattattcttattttacacatgggaaaacaaggagttctaggttttcttttgattagagggagatgttttgtccctaaagcaggggagactggataggaaaggaaaccttaggaatataggggaccactgctgctcctctcacacctccccagaccctaacacccttggttccattaaactcctaaacttgggcttcaggaacagaggaagtgagaaagctagtgtttaatgataacttgttttttcactgcataacaaggaccttgttattttctggtgctctgcagagtaaatatagcataatgaaaaagaaatggtatctggtatcagaatttataagatctatattcgagtcataattcaaagacatttggtactctgtgaccttgagcaggtagtttaactctctaagcctctgtaaaatggagataatatttctaacatacttacatcataagattgtaagtatgaaaatacattgaaatactgattgatgtgtatgccaaagaccctgaaaggcagcaaagttatacatagtgtttacaaatatatatgagtatgaaacatctgaaaaccatataaataatctcttttgcaaatataggtactttttccaattgtatttaaaagttgatgtgattaattgatgtgattaagaaaatggcatttcatttaaaattgtagctgaattcaattctcatattttttcaatgaaccaacaaatactaaatttaaacattaaggttctactgaattttttgtaggatttttttgctgttttttaactttaaaaagagttaaactttaaaagactgagagtcaacgtaataatatatgtgtataaagtgctttatttataagtaactttaattgagaataacagcaagtaggtatagccatctagtgactttaactttctttttaaaatatatgtaactcctcagccaggcatggtggctcatgtctgtaatcccaatactttgggaggctgaggcaggtggatcacctgaggtgaggagttcgagaccagcctggccaatgtggtgaaaccccatctctactaaaaatacaaaaattagctgggcgtggtggcacgtgcctataatcccagctactcgggaggctgaggcaggagaatcgcttgaacccagtgggtagaagttgcagtgagccgagatcgtgccattgcactccagctagggtgacaagagcgaaattccgtctcaaaaaaaaattttatatatatatatatccttatacatttaaccctcagagcaacatctttttattctttaattggaaacattagatttgagttgaagaaacattatcatatacttcaaccattaatgtttctgtacccagcttctaccctttccggctctgtcatttgctcaaacaaatctgtcttatttaaatcaaaagagttgcatataggcacttttgataaagagtctttaaccttgaaattttattgatttcgacttttgtttttaaattatttttattgatggtttccttttttttttttttttttcctttcaagagagagtctcgctctgtcacccaggctggagtgcagcagcacgatctcggctcactgcaacgtctgcctcctgggttcaagcgattctcctgcctcagtctccgaagtaacagggattacaggggcctgccaccacgcctggataatttttgtatttttagtagagatgggtttcaccatgttggtcaggctggtcttgaactcctgacctcaagcaatccacctgcctcagcctcccaaagtgctgggattacaggcgtgagccaccgcgcccggccttattgatggttttccttgtcaaaacattatttaatcaaaacagatgaaagcatgtagggagagatttcttttacaaacatattttgtgcttctttgttttatattatagggtacagaaatgacttatttgttgttgttgttttcatgatgcacaatgtgacctaatttacctaggcttactcttttctcagttctcgtacttctgtgtttctctgattcattgatatattgaccacttgttcatttcagaattttctctggactttgatactgcagtaacttatttttctgctactcctttgatagttcattgttttctttattaactcctttcctttaactcccatttctgccccaagataaaagtctttctatatattctacctttcagaggtctcatctacttctataagtttcggctattttccctcaaatatttgtctctagccctagcctctccccttattccagacttatatttccagctatcttctagaaatctctacctggatatcttcccaaaatctcaatttcagcatatctgaaacaagaccttaccttttaacctgtaatcagtcccgtcatctgatttttaaaaacaatttattgaggtgaaatacacatagcataaaattaaccctttttttgtggggggagatagagtctcactttgtcacccaggctggagtgcagtggtgtgatcagggctcactgcagcttcaacctcctggattcaagtgatcctcctgcctcagcccccaagtagctgggactataggcacgtaccactacgcccagctaatttttgtattttttatagagacaggggtttcgccttattgcctgggctggtctcaaactcctgagctcaagctatcagcccgccttggcccaccaaaatgttaggattacaggcatgagccaccgcacccagacaaaataaccactttaaagtgagcaattcagagaaattttgtacattcgttatgttgtgcaaccactacctctatctagttccaaagcatttccatcactctcaagtaaaaccacttatccattaaacagtttgtctccattgccctctctccctagcccctggcaaccaccagtatgcattctgtttctatggatttatagatatttcatgtaaaaaggaatcatatatgacctttgtttcatgcacgtctgtgtaaagagaccaccaaacaggctttgtgtgagcaacaaggctatttatttcacctgggtgcaggcgggctgagtctgaaaagagtcagtgaaggaagatggggtggagctgttttataagatttgggtaggtaaaggaaaattacagtcaaaggggggttgttctctggcgggcaggagtgggggtcacaaggtgctcagtaggggagcttttgagccaggatgagccaggagaaggaatttcacaagataatgtcatcagttaaggcaagaataggccattttcatttcttttgtggtggaatgtcatcagttaaggcaggaaccggccatctggatgtgtacgtgtaggtcacaggagatatgatggcttagcttgggctcagaggcctgacattcctgtcttcttatattaataagaaaaataaaacaaaatagtggtgaagtgttgggacagcgaaaattttgggggatggtacggagagataatgggcgatgtttcttagggctgcttcgagcggaattaggggcggtgtgggaacctagaatgggagagattaagctgaaggaagattttgtggtaaggggtgatattgtgggactgttaggagaaacgttcgtcatttagaattactggtgatggcctagatacggttttgtatgaattgaaaaactaaatggaataagagaaggagaaaaacaggtattaaaggactaagaattgggaggacctaggacatttaattagagagtgcctaaggaggttcagcatagttctgccagcaaagattatttatttacttcaagagttaagagtggcagtttggggatagctccaggagatatcagctgtgatggcttggagaaacagtgtaaaccagcagtgtaaacaagagcagggcatgtgtgagtagttgagaacagtgaataggagtatgattagacagaagatagtagggatgacaagttttttggggcacagtccaagttggtcttggaatgatactggggcctaataaaaaggagcatctatacaggagcttaaatgagctgtaccttgtaacattctgaggacaggcctgaattctgagaagggaaagtggtaaaagtattgtctagtcctttttaagttggtggctgagcttggtgaggtgtgtttttaaaagaccgttagtccattctacctttcctgaagactgaggaccgtaagggaaataaaggtttcactgaataccaagagcctgaaaaaatgcttggctgatttgactaataaaggccggtctgctatcagactgtatagaggtgggaaggccaaaccgaggaattatgtctaacagaagggaaaaaatgaccgcggtggccttctcagaccctgtaggaaaggcctctacccatccagtgaaagcgtctacctagactaagaggtattttagttttctgactcggggcacgtgagtaaagtcaacttgccagtcctgggcaggggcaaatctccgagcttgatatgtaggaaagggaggaggcctgaacaatccctgaggggtagtagaatagcaaatggaacactgagaagtgatttctttgaggatagatttccaggatggaaaggaaatgagaggttctaagagacgggctagcggcttgtaacctacatggaagaggttatgaaatgacgacagaatagaatgggcctgtgaggctggaaggagatattttccttggtctaagaaccatttgccttctgtgggaagagattgataggtggaagtttcagtgggggagtaggtgggagtgactgacgtgaaggagaaaaactggctgtgagggacagaagttggaatgctagctgcttgtctagccacctaatcagcgtaagcgtcgcctagagcaatgggatctgatgccttttgatgccccttgcagtgaatgactctagcttcctttggaagttaagcggcgttgagaagcgtttttattaaagagggattaatgatagaggacccttgtttagtgaggaaacttcttgcatggtggtgcacgatatgaaaggcatatttagagtcagtataaatattgacgcatagtccttttgcaagagtgagggcttgggttaaggcaactagttcggcttgctgagaggtagtggaggggggcagagcggtagcctcaatgatagatgtggaagatactatagcatagcctgcctttgctggtgagtggcatttaggcctggtggaactgccatcaataaaccaaatgtgattagggtgaggaacaggaaagaaggaaatacggggaaatggggtgaatgtcaggtggatcagagagatacagtcatgagggtcaggtgtggtatccagaataatgtgggaggccgggttgaagtccgtgccaggaacaatggtaattgtgggagactcaacaaagagtgaatatagctgaaggagccagggagcagagagtatatgcatcaggtatgaggaagaaaatagattttggaagttatgagaactgtagagagtcagttgagcatactttgtgatttttagggcctttaaaagtattaaggcagcggcagccgctgcatgcagacatgagggttgggttaaaacagtaaggtccagttgtttggacagaaaggctataggacgtggtcccagctcttgtgtaagaattctgaccttactaaccatgcctaggaaggaaaggagttgttgttttgtagaagggattggggtttgggagattagccggagacgataatcagggagagcacgtgtgtttttatgagaattatgctgagataggtaacagatgaggaagaaatttgggcttgactgaagtaatgggggctgtctgtgaagccttgcagcagtacagcctaagtaatttgctgagcctgatgggtgtcagggtcagtacaagtgaaagcgaagagaggctgggatgaagggtgcaaaggaatagcaaacaaagcatgtttgagatctagaacagaataatgggttgtggagggaggtattgaggataggagagtatatgggtttggcaccacggggtagataggcaaaacaatttggttgataaggcgcagatcctgaactaacctgtaagccttgtctggttttaggacaggtaaaatgggggaattgtaaggggagtttataggctttaaaaggccatgctgtagcaggcgagtaatagcaggctttaatccttttgaagcgtgctgtgggatgggatattgacattgagcagggtaagggtgattaggttttaatgggatggtaaggggtgcaggatcggtcactaaggagggagtaggggtgtcttatacttgtgggttaagatggggagatacaaggggaggatgtgaaggaggctttgaactgggggaaaaggcagcgatgaggtgtggctgtagcccaggaatagtcagggaagcagataatttagttaaagtgtcggcctaataagggaactgggcaggtggggataactaaaaaggagtgcttaaaagagtattgtctaagttggcaccagagttggggagttttaagaggtttagaagcctggccgtcagtacctgcaacagttatggaggcaagggaaacaggcccttgaaaagaaggtaatgtggagtgggtagcttccatatcgattaagaaggggacggacttaccttccactgtgagagttacctgaagctcggcgtccgtgatggtttagggggcttccgaggcgatcgggcagtgtcagtcttcagctgctaagccgagaagatctgggaaggagtcactcagagagccttgggccagagttctaggggctctgggagtggctgccaggtgagttgaacagtctgattttcagtggggtcctacacagatgggacacggcttaggaggaatcctgggctgcgggcattccttgtcccggtggccagatgtccggcacttgtagcaagcttcttggggaggaggttctggaggaactcctggctgctgtggttcaggtgtttggaagttcttgtgtgctggtgatgtggctgggatatgtctcacagtggaggcaaggaattgcaacttttttctattattgtacaccttgaaggcgaggttaattaagtcctgttgtggggtttcagggccggaatttaatttttggagctttatttaaagtcaggagctgactgggtaatcaaatgtatattgagaataagatggccttttgaccttttagggtctagggctgtaaagcgtctcagggttgctgccaaacgagccatgaactgggctgggtttttcatatttgatgaaaaagagcctaaaggctaactgatttgggagaggtcggataaagaaaaaggagcattaaccttgactatgcctttagctccagccactttcctaagaggaaattgctgggcaggtaggggagggctagtcgcggaacaaaactgtaagccagactgggtgtgaggaggggagatgatagaaggattatagggtggaggagctgaggctgaggaagaattgggacttagctcggcctggcgacaagcagcctggggaggaggggaaaggtcagatgggtctgtagaaaaggaagactggaaagactcagcgacgcttggggttgggactgaggggacagccaggagggaaagaaggaggattggggaggaatcacattgggaacagagactagggagggaacaacgtgtagaagaatgcctggacgtcaggcacctcagaccatttgcctattttacaacaagaattatctagatcttgtaggatggaaaaatcgaaagtgccgttttctgtctatttggaaccactgttgagtttgtattggggtcaagcggcattgtagaagaaaataagttgtttaggttttaggtcaagtgtgagttgaagaggttttaagttcttgagaacacaggctaagggagaagaaggaggaatggagggtggaaggttgcccatagtgaaggaagcaagcccagagaacagagtagagacacggagggaaggggtttgggggttcttaccttccagaaaagcaggaaaggggtcggggcatggagatataaggggttggggtgcagagataagaggtcagggcacagaaataagggatcagggcgcagagataagaggttggggcgtggaaataagggatggggtgcagagataagaagtcagggcatggaaataagggattggggtgcaaagataagaggtcagggcatggaattaagggatcggggcacagagataagaggttggggcatggaaataagggatcagggggttcttgccccctagaaaagtggtacttgccactaagggtgaaggagaaggggttggggggttcttgcccccctgaaaaagcagagaaggggtagagacacagagagaaggagttgggaggttcttgccccccagaaaagcagtacttgctgctaagggtgaaggaccaaggcaggcgtccccgtgtggtcagacacctctgaaacgtgggtgagtaatcaggcagtcgtccccacgtgattaaacaccaagggaagactgtcttccctagtctgtgaccagcgccggagttttgggtccacggataaaacgcgtctcctgtctctaccagaaaaggaaaggaactgaacttaagagaagggagagattgaagggtggtaccaagattgaaaggagaaagtggttgagggatagtgagagaggttggagaagagattaagaagaggcggcttacctgatttaaaattggtgagatgttccttgggctggtgggtctgaggacccgaggtcgtaggtggatctttttcacggagcaaagagcaggaggacaggggattgatctcccaagggaggtccccccgatccgagtcacagcaccaaatttcatgcgcatctgtgtaaagagaccaacaagcaggctttgtgtgagcagcaaggctgtttatttcacctgggtgcaggcgggctgagtctgaaaagagagtcagtgaaggaagatggggtggggccgttttgtaagatttgggtaggtaaaggaaaattacagtcaaaggggggttgttctctggcaggagtgggggtcacaaggtgctcagtaggggagcttttgagccaggatgagccaggagaaggaatttcacaagataatgtcatcagttaaggcaagaacaggccattttcatttcttttgtggtggaatgtcatcagttaaggcaggaaccagccatctggatgtgtacgtgcaggtcacaggagatatgatggcttagcttgggctcagaggcctgacactttgtgtctggctttttttcacttaggataatgtttttgaggttcatccaagctgtcacatgtatcagtacttcattcatttttatggttgaataatattttcttttataaaaccagtgacactatatttaattattaaattttttaaatgagtctagagtttaaaagacagtttgttaggtgaaattaagtgatttagaaaggaaagagaaaataacagaggtagtatattagaataagcttctagttgacaatatatagctaacatatggatgaataatattttctgttgtgtgtatataccgcaatttatttattccttcatccaagtgctgtttccactattgtgaatagtgcttccgtcaacgtaggtgtacatatacttgtttgagtacctgttttcaattccttcatttgattgtccttcatcaacttatggtactgtattcttttagtcactggagtttaaaaactgcatggcatgtagtaggtgctaaatatatgttggttgaatggatttattaaattaatgtgttgaattgttatcattctcttctttcccctttacctcttctgtctaatcacatgttaattcaattatagacttaactctgccacaaactgtataacattgggcaaaacacaactatatgcttagttttatatgcttagtcttctgtagacctctataggccctctacatactcagtcttctgtaaaatgactttcttgaaccacaaacataaagtcaaagacaacctgggaaatacatcttcacttacaacagagggcaaatatgaattgctccttggaattggtaagcaacctagagaaaaatcagcagtcagtttacattaaaagaaattcaaatgaccctcaagcatatgaaaatatgttcaaatatacgtataaaagtcatgcagattaaaactgtgctaaaatattttttctcacctattgcctcattgtgttggtgaggctgtggataaataagttttttcatactctgctcctgggatagttatctaaattgcaaatgcatataccctttgaccaggcaattccatttctggtaatttatcctaaaaataagcctgcacaagtgaaaaatgatatatatagaaggttttttatggcagcaatatttacaaaaacaaggttggaagcaacccaaatgcccatcaaaaggaatctggtttaaaaaatatggtacatttatacaatggaaaactagggaactgtgaaaagaatgacgatggtgtctattaaaatgaaaataccttcaagatgtattgttaagtgaataagagatgggttaaaaataagagtatgtaaaattaagactataaattgctaagaaaatttaaaaaataaacaaggccaggtgtcatggcttacacctgtaatcccagtaatttgggaggccaaaacagggggattgcttgaagccagaagtttgagaccagtctgggcaacaaagcaagaccctgtctctacaaaaaaaaaaaaaaaaaaaaatttagccggccatggcaacgtgcacctgtaatcccagcttctcaggaggttaagtccaggagtttgaggctgtagtgagctatgattgtgccactaccctctagcctggacaacagagtgagaccgtgtctctaaaaaaaacagaaataaaaaaccaaaaaggttaagaatataaaaactttctaaagacatataagaaactaataaaataatttatccagagtgagggtagaggaaggaatgatgcagactagagcagaagtaggagaaagcttttattatgtacctctttatattattttttgaaccatctgaatgcattttatgcaaaaattttaaggtaaaagtaaattattttaaaaatgatggcagcaaaaaggttaatagaaatagacatgtttgagcaagactgggaaatggcagaaaattccaagggaaagagatagacataaggtaacttcaagtttacaaaggatataatgccataggcaacaagcaccagacaaattactctagtgcaaagaaaagtaattaaactgtgcagcaacatttaaacagctgaagcataagtaaaatattagcacaggagaagaggcagtagaagaattagattttatgtttaacacattaaaatgaaaagattttaattaaagctgttatttaaagctacaaaaacattttaaatgaagaatatatattgtaaatcacatccattctttatatattctcgacctctacttcagtctttctataaaaccaacacatgtacattccatccatgtcaagaaaagtcattttttatcttagtgacttacatggtgcaacatatgtatgaaaacaactttagatctgggatttgactgtgttatgtaaatgaactaatattgttaaagtgacagtagaactcccataatcttgtctgaaggtaacagactgccatgtatcaaatattgtcattgtttttcttcaactctttttgttatataggtaagacatgttcactgtagcaaaaaaaaaaaaaatgggttttgtgccattactcataccttttgctttagttagttaaacattttcagtggatactactaggcatctctgtggctgtatccactcattagtccattttaaaacaatttaataagtgcccattctaccacaagctatgtagcgaatgggtatctgaagagtaagcaagtagtgatagtttatgagtttttgactgttggtatgcttccaaaagaaggcaccaaaagacatttgtgatgcccacattacttagaaatgtagggaaatcttagtatttgaaactcttatgtcctagaatcttaagaaacctctggattgagatggtgatgttaggcagctcttgcagttgacttcaatgctagctaggctactttctccaagcagtgagaaagtcctaaagagtcttgcttcattttattccaacttctggagtttttaaaccagcattgtttgtgttcttccatatgtagaaactatctctaaacctatcctctcattttccagtttagaaggtgctttcagatatttaggatcttattagttactttcaaattagtattccaatcaaaacgagttgaaataaaaacctgtctgtcctttaacactttgattatagtttatgtacttctatttacatgggtaaaatgtatagtcactaggaataacatgtcaacacatcttgattgaaatcgccactttgaatttttctatcatgtttctagtatgaaaaaaaacttcatttagcttcatagtagcttcatagcagttggaatagttgtatattatgtgttttctgtatacataaactgaactataatttgaaaaagttcttcaaggtcaccttgtcacttgcagagtgacaaattatcctgatttgctgattctcatcttagtgttcctgatactgctgcactgggagaaaatttacatactttcctaaagcttactttctcagacttcttgttcttctggccttgagtaattcccagatccagttttcctgtcaaacctccaaagaagtactgaagggtttctttctcataggtcagattcaggatttgaacccaaagcttctttctttaaatacactgttttttctttatcatacctctcaaacatagtagagcagccttgaagattttgttttaaaatctacatggctgtggaattttgttttaaatatgattatgtttcctacaatcatcttcattttctaatcatcttcatctcttctctgactcccatttttaccaagtcatgaaaatacaagcatctgctttccatgaatagatcagagatctcacaagcctagattcccatggaaaccaatcaaaaactaaaaggaaaagaaagagtatatattgaatttcgatgaaacctacagcttgtttttcattagactcatgctggtttcttttaaactctgggcacagggccagcaaatatttttatggctggtaaaaagggacttcaaatccatttactttcatttaaccgtttaaaaattaattttgtatataacatcaattctaaagaaaatttgagcattaattttctaattaccttatgtcatagggccattatttgtttatgtaatttcctcttcttgttttttctcctacccatagtttatgactcataaaaggatgagagggaatcaggatgattattattcctatagtgtgaatattgtcaacacttgggcacgacatttttcctatgaccaatcataggaccaataaaggaggtctctttgtacctcctttagctgttaagctttcacaaggtgcaaatgatcatttacaaatgtgacaacagatgataactaaaatgccaaagtgagggggattaagagaaccagagaggggatggctggggaggacaggttgtaattttaaattaagcaatcaaaatagtattcagtgagacaggttgtaattttaaattaagcaatcaaaatagtattcagtgagatggtgacatgtgaagcaagacttaaaggaggtgagaactttagccatgtgaacacctgagggaagagcattcattccaggcagaagaaacagtcagaacaaaggccttcagatgggagcatgcctagaatttttgcaaaataacaagaaaattagtataaattagtcttcatgcctttaatcccagcactttgggagaccaaggcgggagggtcacttgagcccaagagtttgagaccagcctggtcaacatagggagactccatctctacaaaaaaatttttaaaaattcgccaggcatggtggtgcatgcctgtggtcctagccactcaggaggctgagatgggagtatcacttgagtccaggaggttgaggctgcagtaagccataatcacaccactgcattccagcctggacaacagagtgagaccctgtctaaaaaaataataataaatatatatataccttataatgaatgagcaaaaggaaagcgctaagagatgaagaaagagaaagaatggtggcctgatcctgtagggccttataggccattgtcaagaatatgttttcactctgaatgagatgaggagggtttgaggaaagacgtgacatggtctgacttatgtatttataaaagaatcattctggccaagtgaagacattttcctccagttttagtactatctattccttcacccattcctcatataatatgctttcaagtttccttctcatcctgatcattttcaccagatatgcacatatttgtctaaattcccttgaaaatgtgatacctacaacagaatacaatgccagtctgatgagctcagagtgttacatgactataactgttgacattttagcaacaaaatacagctgattcatatttaagatttttcaaataaaaactctaaatctgctttatacttacaactgcctaaactacgtcctatattaatatggccgtggttgttggacccaaaggcagcatcttattgtatccatattttgaactttcccagacatacttaggtaaaattgaccattgtatcctttgttcctccagtaccttgtgtactcaaccactgttataccaccttttacactgaaatatatttatttgtttacatgttttatttctccacagatgatgaacatcttaatatgtaagagtgtcttagtcatcttatttccaatatctagtagtacttaacgacactcaatcaatgcttgctgaattgaattgggttcatcatgtaacctacccaggtcctcttgattcttgagtcggccattcagtatagttgtcatctctcccacttatgagtcaccaagattctcatcctaatctttgatattaaaatagatactgcttatagaaaaccttaatcattgaaacactagtactaaaataaacttcactaatttaaaaagttgttttattcatttattatacttgtctaaattatgtcgtcagtattaactcagcctcttgaaaaattttgtataatctatcagaatccacttgctcaccattccaattctgatgggtatgtcattcatttattcattcattcatttgttcaacagataaatttttagtatttaatatgtatcaggcattacactatatctcaaagtattttaaattcaacctttgtctaaatatgtggtctttcagattttataatagtaaaattaacatttcaccaatataactactcattttcaggcaatttattagacatatactcatagtttatcttaaacaattacagatttcagaagatatggtttgggtccttttattcaagtctttcctgtcactttgtcagtcatctcttttcaagccattttcttttaaggaatttgggctgaaatattagactgtactttgaagtaatgactgtaaacttcatgtatgtaactttggttatttcagtgttgtacagattgttaactaattgtgtgtgtgtgtgtgtgtgtgtgtgtacaggtgcacacaggtgcatgctttaaattgttatttaattggattataatgcttacacatattgtaaaatgttaaacataccaagaaggtttgcagtgaagaatctcggtgtaaggaaaactttctatctgcaagtcaaaatatagaagtgataggaaaaagactaataaatatggctacatagtgataagaaagactttttccttccagaaaatgtggcaagcaaagttaaaaaaaaaaaaagacaaattggaaacaatatttgcaaattatatcattatcaaaggtttaatactcctcatatataaggtggagaagaaaaagaccaatgatcctataaaaatgagtaagagtatatctagatagttcacagaaaaggaaatggcccttcaatatatgaaaatatgctcaatattgttcgtcataaaagaaatacaaattaaaatcacaaagagataacatgcttcatgtctcagattggcaaaactccaaaagtttgacaacatgttctgatggcaaaactgtagggaaatgagcattcacatatccctgaaggaaatggaaatggtttccttagcctgttttgtgttgcaataacagaataccacagactgggtaatttataaggaaggaaatttatttctcccaattctggagactgggaagtccaatatcaagttatcagcatctgctgagggacttcaagctgtgtcattccacagtggaaagcagaaggacaaaagagggcaagaacaagtgagggaaaagggggaccaaactcacttatatcaggaacctactcccatgaaaacagcagtaatccattcataagggcagagccccaatggcctaatcacctgttagggatcccacctcgatactgtcataacgatgattaaatttcaacatgaattttggagggacattcaaaccatagcattggtataacgcttatggagggaaacataacaatatccagcaaaattaaccagaatatgcatttacctttgatctgtcacttctgggaatctattctatacatatgtggtaaaaacaagaaatgtatacacagggttatttaattgcagcattatttgtagtagagaaagcttgaaagcaaatgcactttttttgttgtttttgtttttgagacaggatctcactctgttacccagactggagtgcagtggcacaatcatggctcactgcaatctcgacatttttgggcttagtgaatcatcccaccttaggctcctgagtagctgggattataggtgtgtgccaccacaaccgactaattttttttttttttttttttttttttttgtagagatgggttttcaccaagttgcccacactagtctcaaacttgggctcaagccatctgccctcttcagcctcccaaagtgctgggattacaggtgtgtccaccgtgccctgcctgcaaatgtacttttagagagctggctacataaaaagagtatattcacacaatggaatgctatgcatctgtaagaagtaatgagaaatgtttttatataacattataaaatgatctggaatgaaaaaagcaagcgcagaatattgtgtatgatattctctattttatatataactatgaagtgacctccaggtttattgttaagagaaaaaagtaaggtgctaaagagcatgtgtaaccttttttccaggaaagaggagaaaaatattttcttatatttttaaaagatagaagagtaaatgaaaaatgaatgaagactcttacctaaagggagaaggagataatgtagaggacacagggatcgaagctagtcttatctgagtatatcttgttctatagttttgattttggaacttcgtaaattatttccataattataaagtttaagtgtctacagcctggatgcagtggctcacgcctgtaatcccagcactttgggaggtcaaggtgggcggatcacttgaggtcaggagttcaagaccagcctggccaacatggtgaaaccccatctctactaaaaatacaaaaattagcagccaggcctggtggcacagtaatcctagctactcgggaggctgaggcacaagaattgcttgaacccgggaggcagaggttgcagagagccgagatagtgccattgcactccagcctgggcaacagagtgagactccatctcaaaaaaaaaaaaaagaaaatgagcagtccttaaagattgatagacaaataaaacaaagacacctgtgtattaagttggtagcttaactgcagagagaattattcaagtgaatttattattttttatttttattttttatattttgagatggagtctcgctctttcacccagggtggagtgtagtggtacaatcttggctcactgcatcctccacctcccaggatcaagtgattctcctgcctgcacctccctagtagctgggattacaggcacgcaccaccatgcccagctaattttttgtatttttagtagagatggggttttaccatgttggccaggctggtctcaaactcctgacctcaagtgatccacccaccttggcctcccaaagtgctgggattataggcgtcagccactgggcccagcccaagtgactttaaaacatagtaaatttgactctgcagtcctggtaggaaacatcctaaggacaaagacagctacaaagaaatcctaaaatgtgttcagtaaacatactgttagtaataatactgttactgttatcttgacacaacacaaataagtggatcactatataaaggtaagatgaagcaagtgaatatgtcaatttcattagtaaccaagattttcaataagaagtatacaaatataaactattgatatatgtgtctgctaaaaatttatatttctgaatttcatagcactagctactgaaaaagcctagaagtaatgactaaccccatgaaggatcacctccatcacccagattgtgtctctcaataccactaaaaggaatcagaactccttagagaagtggctgcttagaaattgggacaagtaatatatgaaatgagcctggctcatctggtcatgctggatggcaagatatctaacaaagcctactggagtcatgtcaaagggccacagaagccgtgttaaaggagcttccaaagatggacaatttgagtagcaaaaatacagttgcttcaatggaaacaaacatgttaaaactccatgagttaggaatactttttttttttttttttttttgagacagggtctcactctgtctctcagtctggagtgcagtggtgcggtctcggctcactgctacctctgtctcctgggttcaagcaattctccagcctaagcctcccaagtagctgggtttaaaagcatgagtcactgcacctggctattttttttgtatttttggtagagatggggttttgccatgttgcccaaagtggtctctaattcctgacctcaaatgatctgcctgcctcagcctcccaaggtgctagtgtatttaaaatacagttgtttttatgtgtttcagtttaacttcccctccttcccatccttattgatttaactttttcaaaagttgaaactacatgaaaagataggtttacaagtttcagtcacttccatgtcctgtctgtctcattttccctgtcttttgaggacaatcaactatattgatttctggtttacccttcatatgtttcatatatgtatgtttccttgttgcctctttttcttctaatatatgctcttgtgcttcagatagtattaagatttttaaaccagataaaaaaggaagaaaaaagcagtaaaagtttacatgttccttgactctagattctgtgactagaaatggaccttataaaccactcaaactaatatatatgtatatatacatatatatatatacacacacacacatatatatatagggatattcattcatcattgtttataatggcaaaatacaggtaaattattcattgttaaatataatctatttttcatacagtggaatactttttagccactttaaaaaattaatctatatgtactatcatggaaagatctccagggtatactgttaactgaaaaaaaagctagctgcagaagaatatgtatagtagaaacctgtttttataaataaataatttttaaaataaccacagttatacatatgtatcatatagattgcaaaaatttaaagaaatagtaaaaatttcttttttttctttttttttttttttgaggcagagtctcacactgttgcccaggctggagtgcagtggcacaatctcggctcactgcaagctccgcctcctgggttcacgccattctcctgcctcagcctcccaagtagctgggactacaggcgcctgccaccacgcctggctaattttttttgtatttttagtagagacggggtttcaccgtgttagccaggatggtctcgatctcctggcctcgtgatccgcccgcctcggcctcccaaagtgctgggattacagcgtgagccaccgtgcccggccaagaaatagcagaaatgtcttatagtggtattatgagaaaactcatagtttaaattataggaaaacattttcacaagaggcatgcattattttagtctgaaaaaagttcaaaaacagactttttaaaaattctaaattttattttgagccagactttcctgccacccttcaatggtgacaattccttgcaattcctgcagttccttacatgttttattttctttgaaatttaactgagtttcagatctttggcttcaaagaggagactaaatcctgttttccttcatttcccaaatcatttttcattatctcctacaacaaaatgctaccttttctgacacttttatggtctccttttaaatgtttctaatgcagaagaagcttacttgttctcaccacccatttgttaaatttattttcatatctcttagtatttcttaatgtggtgtatatcacagaacatttgtcactcaataagggcatagcatatccaatttttcattccagtttttattattctgccatctgtattgcttttatttgggaagtttcctatttgtaaagaatgatagtttttctttcctcttagtagatctatcttgtttatattctcatgtttagtgaagacctcataggatatattttagctgatcaggggaattctattatctcttttctgtagcataaatattacattccattcttaaaatattgatttgattggtaatgcaaaaagctttagcactccagaaaaaaatatattttcatttataactttcaatgacagagttcttattacacttcaattctctaagtatattgaataaagagtagagaattgttcttggagttggacctatattgattctagtccctgctcatttatttattagctctgtgacatttatctctttaattctgagtttcctcatctgaaaatgagaataataatgatacctatattaccacattcctatgagaatgaaatgaactggtgcccacaaacttcttacttagctcagttcctggcaccaaaatagtgcccagtgaatattaactattataattatcatctagtccatgctctggactaaatactttggggaatacaaaggtgagcaaagttaactctgatggagtagatgagctgtatttatgctatagtttgaatatttgtcccctccaaatcccgcgttgaaatttgatccccagtggttggaagaggggcctaatgggaggtgtttgggtcatgggagcagatctctcatgaatggcttggtgccagaggtaatgagtgaattctcgctctattagttcatgtgatagctggttgtttagaagagcctggcatccttccccgttctctctctccctctctctctcttgcctgctgtctaccatgtgacatagctgctgctccttcaccatcccccatgattagaagcttcctgaggtccttattagaagcagatactggcaccatgcatttagtagagcctgcagaaccataagccaaataaacctgttttttaaataaattgcccagcctccggtattcctttataaaaatacaaatggactaagacaatctacaaagaattcaagtataaggtagaatgcatatgtgctagagaagaatacaaacaaaatggtatggaaagatagaggaagggaatattcaatgagaagttttagggaaggtttcatgaaggagagagaatttgaactagatattgaaaaatcagaattaattttcaaaggcttggagataaatagtatattctgcagagataaccaagtaaatgacatacagatagtcaatggctctgagtggctctactagctacatctttttatgttaataggttttttacttttttcagagaaaattatatccagcatttttaatctttagactaataacaccaggtagacacaaagctattcctggaacattgctttattatagataggaattccataaccaattacctcctatttgctagaacacactaacacaaatacataaaaaatacagactaaactataatagaaggcagttttctctggtgtttgtagcacctctcttctactaatttaaaatatcttcatcactgaggatgcctcctattaaaatgttatatctgagttatactaataactatgaaattaccaggtgtctctgcttgagtagttggaattaatttttttgcctcataactctggagacttctcagaaagtgtagctaaaggtttattcatcaaaatccccttctaatgaatcgactctgatgattctgctgttgtcagaatggatgttctaggaagttgtcatcacacttgaccgtaatgaaaatgctgccctggaccatctccccaaactatgtgtcctcagtattgtgggaagaacccacttcatgatttctaaccagggtagcctctggaagtacaaatgattgctgtaaaattatgaacagagcagcatcaggctttgctctgatgtatcttatgaagcctttctacttccaaatgaagactatgaagagaaccttgaaacaatgcccttctgggagctcattcagcaagcatattctgagggcatattctgttccactctctacgcatggaggattcttgtggtgaggaagacattcttcattggttttaaagagctcaccatttagcacagtcagccgctgagacaggactgctagataactacagaggttatgcattgcaccatttgtacacctcgtacaaccctatgaggtagccctcagggttcaaatggaatgcatctatattttgaatacagagtgatatataataacaagaaatcctggatgtctaattgactgtcttcccaaacagcatagcagattacctttttagtctcatcatttatgtgcagattatgaaacacatttattagtcaatagagtcccttcctgcatttatacattctcctcataactcagttgttctacttcacttccataaggctgacttgcaagtctgaatttatagttgtgttctctttcctaaatttagttcagttatctccctccataatttacatttaaatatcccactgtaacctaaaacatagcttcctttgttaatttccccgttgttacgaagaaaagtattattcctcagtaatttgggctcaaaatattaccctaatctttgactccttctgtcttcctcagtcccaagacacatcaaaggctgatcaaagttagccgggcatggtggtgggcacctgtaaccccagctactcaggaggctgaggcaggagactcacttgaacccgggaggcggaggttgcagtgagctgagatcacaccactacactccagcctgggtgacagagtgagactctgtctcaaaaaaaaaaaaaaaaaaaaaagctctgttgatcttgtttgtcaatcatcccacatttattgttttcttcccattccctttactaccatttagtctaggcagttgtcttcttatgacaaaaatttcataaattggctgggcatggtgtaatcccagcacgcctgtaatcccagcactttgggaggccgagttggggggatcacctgcaataaggagtttcagaccagtctggccaacatggtgaaactctatctgtaccaaaaatacaaaaattagctgggtgtggtggtgggcacctgtaatcccagctattcgggagactgaggcaagataatcgcttaaactcaggagacgagatcgcaccactgcactccagcccagcctggacgacagagcaagacttccatctcaaaaaaaaaaaaaaaaaaaaaaaaaaaacctcataaattgagtgttgtgctccaaaagaatttgaatatgatctactttaattttgtcagtctgccagaagtgggccttataattcgttccttaggagaactcacgaaaggtaggaaattgaggaaatttgggtgttaggaaggttttgaagttagtttacaaagaacataattggagccccagtgactaagaccataatgctgttgagtggctggccagatggatggatggatggatggatggatggatgggtgggtggatgaacatcaattttctagaccttggggcagaaggttaggattggattgcaggagcaagacagaaaactgaattacattatctggtcaggcttcgcttaggttgatttaactcttgctaatctcactaatgagttagacttaaatcttgccttgattagagtcaaggtaagccccaaaactgaaggaaggagagcataccctacagatagagaacttcaactgggaaaattggaaggtcacaaggaccccagaagataattatcaatcccattcattgtttgtcaactaaaaaaacttcaaactaaaacctccagagtaataaacagttagacttcctgcaaggagcatctcacacagaagatagagcctggaagaaaaggctgggaactgacatgaagcaccatgtaggccacaaaaaggagccggaaataatagactaaatggtataataataagtaacgggctggtagcacaatcaactagagttcagaaatgcagtctatgctctaactgatttcctttcctgaaatatttcatatttgcttgggtggctctatagtcatttgggtccatcatggaaatttgtatcattaatacacattttctgttaatacgaataacataaaagtggcttagatgacaagcacatctattattttacacatcaagcagtcttacataacaagaggtaatatccagggttgattaactcagtggctcaatgatattagcaaggacctgggtttttaaatctttattctccgctgtaatcaggatgttggcttatactcttaagctagctttccttggagttaatttcaaggtggctgcctaaatttcaggcattgcatatagaccacaatatctagaagcagaaaaatcaaatacccgtatcttgtttatcttttcaacatggaaaatcttctcagaagccctgtggcagatgctctttccattcctttgattcccaggcctaatcctatcccttggcaaggaaaatgaaaacttcctgattgctatgtcattcaaagtcaccttggcgggcaccagtaatcccagctactcaggaggctgaggcagagaattgcttgaacctgggaggcggaggttgcagtgagccgagatcatgccactgcactccagcctgggtgacagagcaagactccatctcaaaaaaaaaaaaagtcaccttctgagtttggcaaggacccagccttctctgaaggacatatctacttaaaaggagaccaaccaatatcagggttctgttggcctaaaagcctagaagaggatgggcatatatattagccaggcaatccatggtgtcagccacaatgtctgttggacacttacagagccttgtgaacctaactactttcaaaagcaatggccataggctgtaggtcaccttcatggaattccatctagtggcattgccctttagctctaggctacaagaaaaccagctctacagactctttcttgccactggggtgaccctaacttttaccctaacttgatgttctttctatttttttttttttttttttagcaaatgtgcatatttcctcccaaatgctcccaaatgaggaaacagtcaaatcacttagctgttccagtaacaaacgcgggcaccacctcacatgttgttaccccacaaacttaactgagaagtgtagtgataaaaagcaatcatctagtctctgaattcagaatttaaaaagcaatgatctgaaaattgaaagaattcatttaataacaagatatttattgagcacctactaatcataaggtactgctctatatatgtgggatatagcagtgaacaaaacaaaacaaaaatccctgacttcaaagatcttacattttgttggtgggaaacaaaccaataaacaagcgaatacatttttaaagtatatattatatcagatggggatacatgctatggaaaaaaaataagacaggtgagggtgatagggagtgtagggatttgcaaatataaatagggtgatcagggtagacctcacttaagaaagtaatatttaagcaaatacttaaagattatgaaggaacaaacctttctgggagagaatatgccaagtgcaaggtccagaaatgggcacgtgctttgtatttacaagaaacagttagcaaggaggccactgtggctctagtcaagtaaggatgagttcagagatcacagaaggcctgtatgctatttaatgattctacttttacgctgcacaagagggtatggttattgaagtgtttgagcacagaaaatatgatctagcttatattttgaaaggttcattctaactgctgtgttgaggatggactgtcaaaggatgaaagcagaagagagactaattaggaagctgagagttgatgttggcttggaccagaatggtagtggcagaggtggttagaagtccaattttatttttttctaatttgtttattttaattgacaaaaattgtatatatttatgtgtacaacatgatgttttgaaatgtgtatacattctggattgactaaattaattatgaggtagtacatatgttaattatatataactacctcatatttatacatggtgtcaacacttaaaatctactctcttagcaattttcaagcacataatacattgttattaactctagtcaccgtgttgtagccaatattaaatatatcttgaattttctgcaaattatagatgtgaaaggaagagtcaatgactttgacactaagttttttttttaagcctcattttttaaaatgttttcttaaggagaacttcaaacatattcaaaaatagaatagtaaaatgaccctccatgtatcatcactcagcttcagtaattaccaggtcatgctaatcttatttcctgtattccttcattaacttctcctcttcccatgttaaagcaaatctcagatattgcagggatatcattatatcaatatgtatttctaagaggaaatgaccttttaaaatgtaatcatgatagtacttttcaaaaaatgtaacaagaatcacttaatatcatagtatcataaaatggccaattgatgttccaattaccattgtctcataaatgtcataaatgtttttgtttatttacacatgtttgaattggattccaaataagagctatatattgtgattggctgatatgtcaagtcttttttaatctatagtttcaccctccatctctctttgtttcttttggctttttctttttttttttttttttacaactttttggctattgtggcttaacccctgccctaacttgatgtcttagtctagactgattgcctcagtaagatgattctcccttcaggtgtgataaacctattcctcagtcctatgtatttcctgtaaattagctgttggatctaaagacttgatctgattattgttcaattttttttttcttttttaaatttctcatttttatgggtatttagtaggtatatgtatttatggggtacatgtaatgttttgatacaggcatacaatgtgtcatagtcatatcagggtaagtggggtatttatcacctcaagcatttatcattttttgttagaattactgttcaatttttggcaaactgttttattattatggtacattcattcttaggagggacataatgtttcactgtgtctgtttttatgatgttaacaattagtggtgctcagtgcctagagcccattgttcattaggagttgcaaaatgctgatactttaattctaccatctatcctacagttattagctggaataattcattaaagagaaacttccccatatctactattagattactcaatggtacagttcatataggaaaggaaggatgaatgcttgattctccctctttatttaccaatttttaaaataatgaattggtttcctggcatcctcctaggataatcaattaattttttttcatttttaatatcattatgaacaaggcctagaattttttagtatcattttaacatatttactatatcaatccattgaagttattatccttaattagtattcaaattactctgtttttggcctgtgggaggcctgtcaagtagacttcttgatccatttgacatgagcctagtatttgatagcttacttgctatctgctatgtccaaatattccagattcatttctatattttttgttttagacctggaatcagctatttctccaatagctttacttttagtaggaaaaagtatttggagaacacaatctaggatctagggtgctcactgctaccaggttggtgattgtttctaggcttttatagtggacagagcttgcggatttttttaagcaataaaaatatttcatcacttcctattctaattctgggctaaaaggttttaaacttaacctcttcttacatctctactccttttgctcacccagtcaagaatgatagaatatcacattgtctagatgaaaaacctgagatgcaagagcttgagtaatttatcattaaatggcagaaccagggttcaaatatgtatctgtttgactctaaagtctgtgcttaaagtcatctttagaaaatttgtgtttagccagagctcctttgggaagcctaggcaggatgaggggttgagcccaggagttcaagaccagccctggcaacataggaagaccccatctctacaaacaacaacaacaaaacaaaacaaaaactagccaggcatggtggtacatgcctgttgtcccagctactcaagaagctgaggtggaaggaccacttgagcctgggaggtcagggctgctgggagccgtgctcccaccactgtactctagcctgggcaagagaatgagaccttgtttaagaaaaaaaagaagccacagatcccttgctgcaaggcgtagcatttttagcagaactgccaggtagagaattcaattcaactaacacacactgagcacctattaatatttttatacaaagtcctgttcacctgtatgatactggtgtctattaacaaatttgatttgttgatttatctacaaacctagatttatccagaatgcaaccacttttctcaacattccctttaccaccactttggtcctagccaccatcatgttgggttagattattgtagtaaccttgcttggataattataatagtgtcctaactggtctcctggtttctgctcttgccccctgcagtctatgcccaacatatcaaccagaatgatcctttaaaacttaagtcaaagcatgtcagtcctctgctccagaccctttaaaggattttccagttgagcgcagtggcttacaccagcactttgggaaaccaaggcaggcagatcacttgaggttaggagttcaagaccagcctggccaacatggcgaaaccccatctctactaaaaatacaaaatttacccagatacggtggtgtgtgcctgtagtcccagctacaccagaggctggggtacaagaatcacttgaacctgggagttggagtttgcagtgagccaagatcactgcactccagcctgggtggcagagggagactctatctcaaaaaaaaaaaaagattttccatctcagagtaaaagactaagtatttcctgtgatctatcaagccttttatttcatgttctgaattctgttgtttgtatgaccttatttctaatcttccacatatttcctccacatacaccactctgacctcagtgctgttcctctagtaggtgagtcaagctctcaccacaggtttttgcatttgttcttccctctcctaggaatgctgttccagtaggaatctctgtgttgaactcccttgctttcattagtttcttattcaagtcactgtctcagtgaacccttttctggcaatcctatctaatacccacctcacctcacacattgtattctccctactctgctttatgtcttttcttagcacttaacactatctaaaatactatatattttacttatttatcttgcttattgtcttttgccccactataatataaactccctgaagttggggttttatttttggtctgtttattcactaatttatccccattgcctagaactagtagttggtgctcaaaaaatatttgttgaatgaatgagtgtacttctaaagttatagctttaataattctcccaggtgatccacgatttcttacatgatgcatatattgtgggcaaaaaacatactatgagattccagttgtctaatattagaatatttttaaaggaagaataatcctgttttgctatctttctttttcttatacaatccttcctccccaccccagcgactcctgcttgtacttcatagaatatttcctctcttggaactagatatttctttctcttttctttctttttttttcttctggttaaatagccacagactgtccatttgagctgactcttgctggaaagtgagtcagtgcagcctagtggagagcagaggctggagcatttgcatctccagaatgtttgtattgacaaatggcagtcagttattgacatttttatcccttggtgatacttcaattggcttatctttgctggtcaaatgccttaattgttctggcctttaattcagtcaaagttggagctagagcagaggggaaagagaaggagccagactaacagaacatcaagcttgagctgggaggctgctggcaacgatcagcctgtcataatgttatgatttgttcatttttataccatttattagcctttacttgttgtgccatttggcctccagggcagataaagtgctgtctaatttggtaggtttgcttctgtcagagcagcctcgacagggaaggtgttagctgcagtgacaaataatcaatagctgtcgttgtcatgaggaacgtgagcagttgggcctttcatctggaggattagaggtctaattggattgagaatagggagggtgggctgttgggtaaccctgtcagccttgtgaagctgtcaaatatcggccttattcatggtgaagggaataaggaaccttgtgctttcagaactgaggagaaaggcatgtgaaagccctttatacaaaggaatagctcctgaagttgattcagctaacatatgcttccttttaaacttaattaaatatccctttagataataaatctatggaactttaaatgacatttttaaggttggatgtgtaatatacacacacattcacatataacgctatacaaatccaggttggttcttttgtctttgctgatgccagaagataaaccacttgaatggaggtgaaaaatgaaactttatgagagaaattgcataagttgtcatctcattgtcagaattaacaagtgataagcatttttaatactattaatagaaaaaataagtgagacattaaactgatagattagttaataatgaagtatggatatgtgacagttatttttctcccctggtcatttagaaatgtggtttcctataaaacaaatctttcatttattccaacctgaactaatccaaaaaatgaagaattatgcattggctaaattacttcttcaaaggaatgcctaattttttcttccttagcaagtgacaggattgcatttaagtgatatcaatggtatcatgtccaactcagtcccaaaatgtttttgtatatccctacatacttacgctgtactcctttacatttatggtataatgccatcatttggagtatgaatggagaaggtatttgagaaaaatgagttagctcgttctctaatctatggagctcttaatactacctctgcaaggccaagtaaatgactttaaattccactaaatttcatagaaattgagcaaatttaataatgataaatgttaaacacaattttataaaaaaagtataaacttctttatgagtccattctctatgtacaaattaaattcagtgcattgctgttgtccaaaagcaggtataattttaaaaaatgtttttacaatgtggtaggtactaagagcatttgtaagcatcctctatacagtatatctttatgaaagccctgaataaaggtgagttgacagtaatgccaagagtatgtgaataggcatttctaacttatggattatatacttagtccatttctataaacccatggtcccttttctatagtcattcaaagcccagctaaccaatttgaaataacttcaaaaaatactccaaaagaactaaatgtgtgtacaaaagacactagatggatgaacctggttatctcattgggcccttcaaaccctgaggtccatactatttattaccattacaaatgtttcattaagttcttcctgatcagtgctggtttgaaaattctatgattttactcacttgtgtaatccacagtgaaggtcagcaaaattctcaatactactgactaagaatttagaattatggttatctaaagaacttgctttgcttgatctaaactagaaatatttaaaatttcaaacaattatttgtgattacagaaatttctcagatttcatgcagttcttctagagctctatctgtggaagtatagttgtgagtacatttatacttaagcagaattactcataggaaatggtaaggtcagccaaacacaatggctcacatctataatcccagcactctgggagaccaaggccagaggatcagttgagcccaggagtttgagaccagcctcagcaacatagtgagaccctgtctgtacaaaaaaaaaaaaaaaaaatttaaattagcagtcatgttggttcacagctgtggtcccagctacttgggaggctgagagggaggattgcttgagcctaggaggttgaggctgcagcaagctgtaatcacaccactgccctccagcttgggtgacagagcaagattctgtctcaaaaaaaaaataaaataaaaaaggaaatggtaagatcagatttgatatccttgcaaaagaagttcaaagtttaaataggtttaaataggtttgtgtttggggttttgatcagaacatactttctatgacctataaacaaaattgttgctcttgaggttagatgagaatattttgttgctttgtaactccttataatccttattattcactcaacaaatatttgtgcaaaagccactgtgctaagttatggaaatacaaccatgacagggactatcctgccctcagagaagttcatagtttaatggggacaacagacaagctaaatgggtaatgaaaatgtagtattcctgtgttaaatgctaggaaaggagtaagcctaggtatatcataggaaaatgtaagagaggcatctaagccatcctggggtgttgtggtgaagaatggcttccttcaatagatagcaactatgctaagtggagaggagaaaagagagaggaagcccattcccaaggagtattccctccattcccttggagtattctcaaggagggaaagaatatgtacagtcacatgccacataatgacattttgtttaacttcagaccacatatacaatggtggtcccatgagccgtcacacccagcctgttttttatctttcatagaatatttttactgtattttttctatgtttagatacgtttagacacatgaatacttaccattgtgttatatttacctagagtattcaatatagtaatatactgtacaggtttgtagtctaggagcatcaggttataccatatagcctaggtgtgtaataagttataacatctaggtttgtgtatactatgatgttcacactatgacaaaatcacctaatgatacattttgcagaacatattcccattgttaagcaacatatgactatagctcaatatgtatgtattattgactatgaggtagaaaacgtggagagatgatattggataagtaaagtgggatcagaccatgaagtgtctgtcctacatggaggacaataaataaatttgaatatttactgaagagttagatttaaaacttgaatattatttaaattggactaaatgaaagggatttgcaactaactcaccactgcccttctgatcaccaaattcatatacctttcctacttcctcatacctcttgacaaaattggtacattttaccttctttatgattttctccatgcatctctttcttttctctgatgtatatcaagtatatcattggcaaaagcattggactgatataaatcagaagacctagattcatgacttaggctctgcttctttctaacggtgattttaggcaagttttaagtttaaatactctggacttctgtttcctattttttaaatttgtggcaatacttaggttcttacaggagttaaataaattaatatatttgaaaggactctgtaaaacctttgattatgttaagggacacatagtctaaagagtcctgacttagatcacaaaatgataaggcccttgagcatgtaaaaaaaaaaatgtattcaagcagattgaagttaaaattaagaaatgtcaaccaaaacacttaggtaacagttctaagaataacattggacccttacttatgaatcttagcccttattatcccataattattcatgaacaaatttacccctgttattctatgagcttctagaatacagaatcctatcaaatttatctttatatcttcctacaatgccttgcacaaaataggtgctaaataaataccttcaaggaatgaaacaatgaattcttgtagagtcagaattcgttctggatacagtttaatatctaacatacttggatcattttgttttctatttttcagttttgtgaagatgtttaaaaatactactacttctctaaaatcttttatttttccaactttggaatctattaatgagatatagcatttaactcagcaagaaaggacagaagcttggtactggtctcatctacttggacaaggaaagctctaagagaagctggttacagaggttcagcaggaggggacattgagctgcacaaagattatagtttacctgtaatcaagggcagctattgttagcacaagatttaaaaacaagtagatagagagtcagataatacttgtgagtccactacaggtaggcagtggtcaacttgaaattctgtccaagagtaggagggttccaatcaccagcaagaatagagcttaagattgagtggctattcgacccagtgagtcagattattagttcaatagagtgaattggctgcatgggggaaaatatgaaagcccagtgataatcactagatttgaaatcactagataccaagtcccaggttataatagttggatggatggctcaaggtgtgtgctttcttagtggtcagtgcagggctaccattgtcttagaataacttagttagaaggatgaagatgattgagatggcctaagtacttctcacatcatcaagattgatacagcagtactcaaccatctagaaagccttttaaagtagcaatggcttttgaaaatggtgtagtagctcctattggatcagccctccagtagataacatttataaactctgaacaaaatataaaaacaactatctggaggaattgaagagtgaccaagtaggcagaaattgcattgtaatcagcccttggaagaccgtaagaagaggatagcactgggtgagtttccacttttataacagggcctactcagttcttcaaagaggatgaaaactgagtagaaatctgcattcttactttttgaagaatcaaaggacagcatttggggcaatggctgtaagtcagaagagatgtttcaggctgggtgcagtggctcacacctgtaatcccagcactttgggaggccaaggcaggtggatcacttgaggtagggagttcgagactagcctggccaacatggtgaaaccccgtctctactaaaaatacaaaaaattagctgggcatggtggtgcatgcctataatcccagctactcaggaggctgagacaggagaatcgcttgaacccgggaggcagaggttgcggtgagccaagatcatgtccttgcactccagcctgggagacagagtgagacttcatctcaaaaaagaagaaaaatgaaaaacagaagagattttccagaacagagaaattcatataagggaaggcctaacctctacatataaactgccaaaatctctgactaacccctaacctaaacatagatggggaaaaattcaggcagccaagctaaggctaaaataactcatcagcgatttagctgctgcctgcctatgcaggaaaaacataatttagagtttgggttcagccaaggtatctgcctgctaaaacaaaaaatgaatagtcttcagcataacataacagaatccagaatctttacaacacatcattttcagtgtctaagatattctcaaatattgctagacatgaggacaaacagtaaactgtgttccatactcatgagaaaaagtaacaatggagaacaactatctttgttgttccagattttaatgagcagacaaggaatttaaagcaggtcttttaactctgcttaaggatgcaaagaaaaatatgttcgtaatgaataaacagataggatgtcttgcagaaaaatagaaactctataaaaagaactaatggaaattctagaactgaaaactacaatatctaaagattcactagaagggcttatcagcagattggagatgaagagtcagtgaacttaaagatagatcaatagaaattaaccaatctttaaaaaaaaaaagaagcgaatatactaagaaaaaagtgagtctcagtgatttgtaggacaatattgaaagaccaaactgtttgtaattacaaagataggagagagagaatggggcagaaaaataattaagaaaatgatggccaaaaattgcccaaacttggtgaaagacatacatttaaatattcaagaaacgtaatgaactccaataagataaatacaaagaaaatcttggccaggcatggtagctcatgcctgtaatcctgcactttgggaggctgaggcaggcagaccacctgaggtcaggagttggagatcagcctggctaacatggtgaaaccccatctctactaaaaatacaaaattagctgggcatggtggtgcgtgcctgtaatcccagctactcgggaggctgaggcaggagaatcacttgaacccaggaggaggaggttgcagtgagccagaatcatgccactgcactccagcctgggcgacagagtgagatgctgtctccgaaaaaaagaaaatctcacctgaaaataccataatcaaattgctgaaaaccaaagatgaagagaaactcttaaaagcagccaaagggctgaactgagctggttgccttctgttactgtgggagaactcacttcatcccaacttcttcatactttcacttctggagctcatattcctctgacatcttccagaaaaacagtcttaaagccttagccttttttacagtccagctcttaaattttttcctcccctttttcaataataacatgagtgtgcatccagcttgtccccaaaacctgccttgctctgaagcatccaactgtaaagactctttgccaatgtctgtgatttgtgggcccaaaacaaactatccatccttgcatatatcttctgctgagatgcctcacacagagtctggacagctctaattctttcacgagtcccaaaggcagacaactcacttctgcagagaagagcaccgcaaaaaaggaagacaaagtcctggtcaagaaacagatgaccagaactgtgttctcttccacccagctgtgtgtactcagtgatagatttcagagacagaaatacctcagcctccagcagatgcaagaactttacagcatcctgaatcttagctacaaacaggttaagacttggttccagaaccagagaataaaatataagaggtggcagaaaaacagctgcccaaagaatagcaatggtgtgactccaaaggcctgagcacctacctaccccagcctctattcttcctgcctccaaggatgcttggcgaacatgtctgggaacctttcaatgcagagcaaccagacctgtagcagttcggcctggggcaaccagacctggaacatccagtcctagaacagccattcctgaacactcagacctggtgcacccaatcctggaacaatcaggcctggaacaatcccttctatagctgtggagaggaatctctgcaagtcctgcatgcggttccagcaaattcttctctcagtgacttggaggctgccttggaaactgctgaagaaagctacaatggaatacagcagaccactaggtattttagtactccacaaaccatagatttattcctaaactattccaagaacatgcagcctgaagatatgtaaagatgagtgaaactgatattactcaatttcagtctgggcactggctgaatccttcctctcccctcctgcctccctcataggattttacttgtttggaagctacatgttctgccttcatatctttgtttcctttatgcctatcaagtcgattttgtggagggtggggtatgattggagccaaatcagagagttttctttttttcctatgggatctttctggagaaaaaaggttttaataaccttggctgctaaggacaacatgatagaagctgtctctggctatagataagtagatataatactagtttgaatatctttaggatttagaacctagcgtcaagaataggaagtaaaagtacaaattgatgtggtgaaggtatagtcccattttctgggattgggggtctttgcttatttttatttttatttatttatttagagacggagtctcgcactgctgcctgggctagagtgcagtggtgcgatctcagctcactgcagcctccaccttccgggttgatgtgattctcctgcctcagcctcccaagtagctaggattacaggcacataccaccacacccagctattttgttgtatttttaatagacactgggtttcactatgttggccagactggtcttgaactcctgaccttgtgatccgcccgcctcagcctcccaaagtgctaggattacaccatgagccaccgtgcctggccttacttactgttaaaaacccaattattaaggtgaaggattaagctgtaacatacttcactgatttcatcagcccctttggctctgtgttttactatagcccctaattggttggttatgctaatatttatagacagcggtcttgtatttgctacatcacaatgacatcagtactagtttgcctggtttaagtacaaatgaataaaacaaccatatcacctttaaaaaaaaaaaaaagcagccaaagaaaaagacatgatgatgccctaaccaagggaaaccgtgaggcactgtgccatgagcaacggtgcattccggtccagatactacgcttttcccacaatctttgcaacccacagatcaggagattcccttgggtgcctacaccaccagggccctgggtttcaagcaaaaaaccgggcggccatttgggcagacaccaagctacctgtgggagtttttcttcataccccagtggtgcctgggaatgtcagcgagagagcaccattctctcccctggaaagggggctgaagtcagggagccaagtggtctagctcagcagatcccactcccacggagcccagcaagctaagatccactgactcgaaattcttgctgccatcacagcagtctgaagtcgacctgggacactctagcttggtggggggaggggcgtcccccattactgaggcttcagtaggcagttttcccctcacagtgtaaacaaagccaccaggaagctcaaactgggtggagctcaccacaattcagcaaagctactgcagccagactgcctctctagattcctcctctcttggcagggcatctctgaaagaaaggcagaagccccagtcaggggcttatagataaaactcccatctgcctgggacagagcacctgagggaaggggcagctgtggatgcatcttcagcagacttaaatgttcctgcctgctggctctgaagagagcagcagatctcccaacacagcgctcgagctctgctaagggaaagactgcctcttcaagtgggtccctgattccggtgcctcctgactgggagacacctcccagcaggggccgacagacacctcatacaggacagctctggcttgcatctggcaggtgcccctctggaacgaagcttccagaggaaggaacaggcagcaatctttgctgttctgcagtctttgctgcagatacctaggcaaacagggtctggagtggactttcatcaaactccagcaaacctgtagaataggggcctgactattagaaggaaaactaacaaaaataaaagaataacatcaacatcaacaaaaaggatgtgcacactgaaaccccatccaaaggtcaccaacatagaagaccaaaggtagataaatccatgaagatgaggaaaaaccaatgcaaaaagcctgaaaattccaaaaaccagaacacctcttcttctgcaaaggatcacaactcctcaccagcaagggaacaaaactggacagagaatgagtttgatgaattgacagaagtaggcttcagaaggtgggcaataataaactcctctgagctttttctgtaaaggagcatgttctaacccaatgcaagaaagctaagaaccttgaaaaaaggttagaggaattgctaactagaataaccagtttagagaagaacataaataacctgatggagctaaaaaaacacagcaggagaactttgtgaagcacacgcaagtatcaatagctgaatcaatcaaatcgaagaaagaatatcagagactgaagatcaacttaatgaaataaagtgtgaagacaagattagagaaaaaaagaatgaaaaggaatgcacaaagactccaagaaatataggactatgtgaaaagaccaaatctatgtttgattggtgtacctgaaagtgacggggagaatggaaccaaattggaaaacactcttcaggatattatccgggagaactttccccacctagcaagagaccaacattcaaattcaggaaatactgagaacaccactaggatactcctcaagaagaggaactccaagaaacataatcgtcagattcaccaagagtgaaatgaagggaaaaatgttaagggcagccagagagaaaggtcaggttacccacaagggaagcccatcagactaacggtggatctctctacagaaaccctacaagccagaagagagtgagggtcaatattcaacattcttgaagaaaagaattttcaacacagaatttcatatccagccaaactaagcttcataagcgaaggagaaataaaatcctttacagagaagcaaatgcagagagattttgtcaccaccaggcctggcttacaagagttcctgaaggaggcactaactatggaaaggaaaaactggttgcagccactgcaaaaacataccaaattgtaaagaccatcgacactgtgaagaaactgcatcaacgaataggcaaaataaccaggtagcatcacaatgacaggatcaaattcacagataacgatattaaccttaaatgtaaatggtctaaatgccccaattaaaagacacagactggcaaattggataaagagtcaagacccattggtgtgctgtaattcaggagacccatctcacgtgcaaagacacacacaggctgaaaataaagggatagaggaatatttaccaagcaaatggaaagcaaaaaaaaaaagcaggggttgcaatcctagtctctgataaaacagactttaaaccaacaaagatcaaaaaagacaaacaagggcattacataatggtaaaggaatcaatgcaacaagaagagctaaatatcctaaatatatatgcacccaatacagaaccacccagattcataaagcaagttctcagagacctacaaagagacttaggctcccacacaataataataggagacttgaacaccccactgtcaatattagaaagatcaatgcaacagaaaattaacaagaatattcaggacttgaactcagctctggaccaaggagacctaataaacatctacagaactctccaccccatatcaacagaatatacattcttctcagtaccacattgcacttattctaaaattgaccacataattggaagtaaaacactcctcagcaaatgcaaaagaatggaaatcgtaacagtctctcagaccacagtgcaatcaaattggaactcaggattaagaaactcactcagaaccacacaactacatggaaactgaacaacctgctcctgaatgactactgggtaaataatgaaattaaggtagaaataaataagttccttgaaaccaataagagcaaagacacaacgtgctagaatctctgggacacagctaaagcagtgtttagagggaaatttatagcactaaatgcccacaggagaaagtgggaaagatctaaaatcgacaccctaacatcacaattaaaagaactagagaagcaagagcaaacaaattcagaagacaagaaataactaagatcagagcagaactaaaggagatagagacacgaaaaacccttcaaaaaatcaagaatccaggagctggtttttttttaaaagattaacaacaggtagaccaccacccagactaataaagaagaaaagagaaaagaataaaatagacacaataaaaaatgataaaggggatataaccactgatcccacagaaatacagactaccatcagagaataccagaaacacctctacgcaaataaactagaaaatctagaagaaattggtaaattcctggacacatacaccctcctaagactaaaccaggaagaagtcgaatccctgaatagaccaataacaagttctgaaattgaggcagtaattaatagcctagcaacctccaaaaacccaggaccagacagattcacagttgaattctaccagaggtacagaaaggagctggtaccattccttctgaaaccattccaatcaatagaaaaagagggactcctccctacctcattttatgaggccagcatcatcctgacaccaaaacctggcagagacacaacaaaaaaagaaaatttcaggccaatatccctgatgaacattgatgtgaaaatcctcaataaaatactggctaactgaatccagcagcacatcaaaaagcttatccaccatgatcaagtcagcttcacccctgggatgcaaggctggttcaacatacacaaatcaataaacataatccatcacataaacagaaccaatgacaaaaccacatgattatctcaatagatgcagaaaaggccttcaataaaattcaacaccccttcatgctaaaaactctcaaaaaactaggtaatgatggaatgtatctcaaaataataagacctacttatgacaaacccacagccaatgtcatactgaatgggcaaaaactggaagcattccctttgaaaactggcacatgacaaggatgccctctctcaccactcctgtattggaagttctggccagggcaatcaggcaaaagaaagaaataaagggtattcaaataggaagagaggaagccaaattgtttctgtttgcagatgacatgattgtatatttagaaaatcccatcatctcaacccaaaatctccttaagctgataagcaacttcagcaaagtctcgggatacaaaatcaatgtgcaaaactcccaagcattcctatacaccaataatagacaaacagctaaatcatgagtgaactcctattcacaattgctacaaagagaataaaatacctaggaatacaactatcaagtgatgtgaaagacctcttcaaggagagctataaaccactgctcaaagaaataagagatgacacaaacaaatagaaaaacattccatactcatagataggaagaatcaatatgatgaaaatggccatactgcccaaagcaatttatagattcagtgctatccccatcaagctaccattgactttcttcacagaattagaaaaaactactttaaatttcgtatggaaccaaaaaagagcccatatagccaagacaatcctaagcaaaaagaacaaagctggagacatcatgctacctgacttcgaactacactacaagcctacagtaaccaaaacagcatgattctggtaccaaaacagagatatagaccaatggaacagaatagaggcctcagaaataacccaacacatctacaaccatctaatctttgacaaacctgacaaaaacaagcaatggggaaaggattccctatttaataaatggtgttgggaaaatggctagccatatgcagaaaactgaaactggaccccttccttacaccttatacaaaaattaactcaagatggattaaagacttaaacgtaagacctaaaaccataaaaacgctagaagaaaacctagacaataccattcaggacagaggcatgggcaaagatttcatgactaaaacaccaaaagcaatggcaacaaaagccaaaattgacaagtgggatctaattaaactaaagagctttggcacagcaaaagacactatcagcagagtgaacaggcaacctataaaatgggaggaaatgtttgcaatctatccatctgacaaagggctaatatccagaatgtacaaggaacttaaacttacaagaaaaaaacaaccccatcaaaaagtgggcgaagtatataaacagacacgtctcaaaaaacagacactgtcttcaaaagacgacattattgcggccaacaaacacatgaaaaaaagctcatcatcactagtcattagagaaatgcaaattaaaaccacaacgagataccaccatctcatgccagttagaatggcgatcattaaaaagtcaggaaacaacaggtgctggagaggatgtggagaaataggaatgcttttacactattggtggagtgtaaattagttcaacctttgtgaagacagtgtggcgattcctcaaggatctagaaccagaaatactatttaacccagtaatcccattactggatatatgcccaaaggattataaatcattctacgataaagacacatgcacacatatgtttattgcagcactattcacaataagacttggaaccaacccaaatgcccatcagtgatagactggataaagaaaatgtggcacatatacaccatggaatactatgcagccataaaaaggatgagttcatgtcctttccagggacatggattaaactggaaaccatcattctcagcaaactaacacaggaacagaaaaccaaacaccgcatgttctcactcataaatgggagttgaacaatgagaacacatggatacagggaggggaacatcacatactggggcctgccgggggatgaggggtaagaggaggcatagcattaggagaaatacctaatgtagatgacaggttgatgggtgcaacaaaccaccatggcacgtgtatacctatgtaaccaacctgcacgttctgcacatgtatctcaaaatttaaagtataattaaaaaaagaaaagacatgatccaatatagtaaagcatgaatacaggtgacaacatactcttcagtatcaataggcacatgcagacagtaaaataatcgctttaaaatgctgaaaggaaaaactgtcaatctagaattctgtatctggtaaaactatctttccagaataaaactgaaataaggacaaacaaaactaagataatttatcccaaacaaacctatattaaaagaaataatggtcgggcacagtggcttacgcctgtaatcccagcactttgggagactgaggagggcagatcacctgagctcagcatttcaagactgccctgggcaacatggtgaaacctcgtctctactaaaatacaaaacattagctgggtgtggtgatgcgcctgtagtcccagctactcgggaggctgaggcatgagaattgcttgagtccaggaggcagaggttgcagtgagccgagatcgcgccactgtactccagcctgggcaacagagtgaaactctgtttcagggaaaaaaaaaaaaaaaaaaaaaagcaccagaaaagataaataggtagctaaagataaacaattattttttcttaatttctttaaaattaatattgctatttaaagcaaaaattataaaactattatggaatttatagtaaatataggtataatacatatatatgatatctacagcataaagtatggggtggggataatgcaactatacaattgcaagggtcttgcattttgtataaagtgatacaacattaactctaaatagactttgtaaagttatggatatgaactataatacttggaggaaatactaaaataataatgcaatgaagtatcgctttttttaattcaagagaaaaaattttaaaggaattcttaaaaattgcttgagtttcacttcccaagattctaattcaattggtctgaggtagaaaccagacagtaatgctttttaaaagctcctcacctgattctaatatgtttaaaatgccagtgttgggaatgtttctagcagtgctaaatcaaagttattggatgtagttgtataagagagaagtatatgttgcatgtaacagagagtatatgttgctggaaaaccatgcagatcaccagagcactgttttacctcactgaaaagcattagttcctgtgaatccatagaccacttgcttcgtgttgatgacaaagtcctcaccattttgtaaaaaaatgaagaaaagatcattgtagtatttaacatatataggtttgtgtagtatttaacatataggtttgtgcatgtctgtgcacctatagtctgtatgtaataagtctgtcttcctgttactacagttcttgaaaatagttgggtggccttttgctacattgggaagacatatttagaataatatgacttcgtatataggctacatggtatacaaaaaaatgcatgtgggggaaagtaaggggagcactcaaagagatctttcagagcatctcaagcagagattcaataagaggcctatttaagaggtcattggaagggagatgccataattcttaaagacattgcatgcaggaaaaaacagtgattttgaatatttgccacaaatggaaaatgacaggagtagatactcaagttacaattaatttgtgatcctttgctataaagctatttcttacctgggcaattctgtgtaatgcatgccatagatttattgattgtcagttattaatgattttcctcaggcacgaaagatgtaaatagatgttggtgaaaagctaccagctgtcctttcaggaaggacagtcctttatttcctttttgagggcttacacttttttatgaaataatgttgataatagatttactttttaaaatgaacttagattgcaaaaatgtaaactttatactgtcatctttatatttgttccaataatattttttaatgattattattattgagttaaaatgtgcatacaagaatgtacagaaaaatatacaattagatatgtgtaataaatgtacctactcacatcaccaccaccacagtcaggacataaaacatttaggcaacaccagaaagttccttttttccccactttcaaccagtcaccacctccatggttaacaccattatgatttttaacacaaaagattagttttacctgttcttgaagtttttataaatagaattttttttttgctgtctacaagagaaacacttcattttgtatatgcatagaaatatatatatatatatatatatatatatatatatatatatattcattttagtagcttttatagtgcaagtggtttttggttacatggatgaattgtgtagtggtgaagtctaagattttagtgcacccatcacctgaatagtgtatgttgtacccaatatgtagctttttattcctctgcccactctcacccttcccctttctgagtccccaaagtacattatatcactctgtatgcctttgcataaccatagcttagcttccacttataagtgagaacatacagtatttgatgttccattcctgagttgcttcacttagaataatggcctcctccatccaagttgctacaaggacattatttcttcctttttatggctgagtagtatgccattgtatatatgttccacattttcttcatctgctcatcagttgatgggcacttaggttgattccatatctttgcaactgtgaattgtgctgcaatatacatatgcatgcagatgtctttttaatgacttactttcctcggggtaaatacccagtagtagaattgctggatcaaatgggtcaaatggtagatctacttttagttccttgagaaatcttcacgttgttttccatacaggttgtactaattttttttttctttgagatggagtttcactccgtcacccaggctggagtgcagtagcgcaatctcagctcactgcatccttcacctcccgggttttaaacaattctctgcctcagccccctcagtagctgggattacaggcacccaccaccacgcctggctaattttttttgtatttttagtagagacggggtttcaccatcttggccaggctgattttgaactcctgacatcatgatccacccacctcagcctcccaaagtgctgggattacaggcatgaatgaccaaccgagcccagccaggttgtactaatttacattcctgccagcagcatataaagtgttcccctttcaccccattcatgccaacatctcttgttttttgactgtttaataatggctgttctggctgggctatggtgatattatctcattgtggttttaatttgcatttcctgatgattagtgatgtttagcattttttccagatgttggccatttgtatatcttttttgagatgtctattcatgtcatttgcttactttttaatgggattatttgggttttttccttgctgatttgagtttcttgtggattctggttattagttctttgtcagatgcatagcttagaaatatgttcttccattttgtgggttgtctgtttactctgaaaattatttttttcactgagcagaagctttttatttttattaggtctcatttatttttgtttttgttaaatttgctttggggggtcttagtcataaatttttgcctagactattgtctggaagagttttccctaggttttcttcaagaatttttatggtttcaggtcttagatttcagtcattcatccatcttgagttgatttttgtatatggtgagagatagggatccagtttcttttttctacatgtgcgtatccagttttcccagcatcttttattgaatagggtgttttttccccaatttatgtttttgtatgctttgtcaaagatcagttgtaagtatttgactttatttctgggttctctattctgttccattggtctgtacatctattttcataccagtaccatgttgttttaattactatagccttgtaatataatttgaaggcaggtaattgtgatgcctccagatttgttctttttgctgaggattgctttggctgtccagactcttttttggttctatatgaattttaggattgttacttattctgtgaaaaatgatgttggtatttttatcagaattacattgaatctgtagattgctttgggcagtatggtcatttttacaatactgatgcttccagtcaatgagcgtgggatgtgtttccatttgtttgtatcatctatgatttctttttttttttttttttttgagacaaagtctcactctgtcacccaggctggagggcagtggcgtgatctcagctcaccacaacctccgcctcccaggttcaagcgattctcctgcctcagcctcctgagtagctgggattacagatgtgtgccaccacacccagctaatttttgtatttttagtacggatgaggtttcaccatgttggccaggctggtctcaaactcctaagctcaggtgatgcacagcctcccaaagtgctgggattataggcgtgagccactgcatccagcctcatctatgatttctttcagcagtgttttatagttcatcttgtagagatctttcatctttctggttaagtatattcccagttttttgttttgttttggtggtggtgttgttttgcagctatttcaaaagggatttagttcatgatttgatgctctgcatggtcactgttggtgtatagcagtgctactaatttgtgtacattgattttgtaacctgagatataattggattcatttatcaaatctaggattcttttggaggagtctttagggttttgtaggtgtacaatcatatcattggcaaagagagatagtttgaccttctcatttccaatttggatgtcctttctttctttctcgtgctgattgctctggttaggacttccagtactatgctgaatagaaatgatgaaagtgggcatccttgtcttgttccggttcttccagggaatgctttctaattttccccattcattaagatattggttgtgggtttgtcatatgtggcttccttctatacttagacggaacatacctcaaaataataatgtgttgagggtttttttataaagaaatgctagattttattgaatgctttttctgtgtctattgagatgattgtatgttttttatttttaattccatttatgtgatgaatcgtacttattgacttgcaaatgttaaagcatccctgcagccctggatgaaacccagggtgaattatctttttgatatgctgttggattcagtttgctggtattttgctgagggtttttgcatccatgttcatcagggctattggtctgtagtttctttcttttttttttttttttgtccgttagatcctttcctggtcttggtatcagggtgatactggctttgtagaatgagatagggaggattacctctttctcaatcttttggaatagtttcagtaatattgataccaatttttctttgaatatctggtagaatttggctgtgaatccatctgaccttgggcgttttttgttgttgttgttggcaatttttaaaattactgagtcaatctcattgcttgttattggtttgttcaggatttctgtttcttcctaattgaagatggggggctgtgtatttccaggaatttatccatttcctctagatttcctactttgtgtgcatagaggtgttcacagtagtctcaaatgatcttttgtatatctgtgatgtctttttgtatttctgtgttacagatattgctgtagtgtctccacgttcatttctaatggaacttatttgcatcttctttttttttttttttttttttggttaatatagctaatggtctatcaatcttgtttaccttgtcaaaaacacaggtttttgtttcattggttcttttatattgtttatgtttgtttgtttcaatttcatttgattctgctctgatctttgttatttcttttcttttgctagtttgggtttttgtttgttcttgtttctttacttccttgaagtgtgacaataggttgtcaatttgtgatctttcagactttttgatttaggcatttagtgctaaaaactttcctcttactactgcttttgctgtatctcggaggctttaataactgtgtcactattattcatttcaaagaattttttaatttccatcttgatttcattgttaactcagaaataattcaggagaaaattgtttaattttcattacttgtataattctgagaggtccttttggagttgatttctagtttttctccactatggtctgaaaagatacttgtttaccttattgatacttgattatctttgatatgattttgaattttaaaaatttagtgagacttattttgttgcctatcatgtgttctatcttggagaatgttccatttgctgataagaagtatgtgtattcttttttcttttatttatttatttgtttgtttttttttaatagacgggggtcttgccatgtcggccaggttggtcttgaactcctggtttcaagcaatctgcctgcctcaccctcccaaagtgctaggattacaggcgtgagccactgtgcccagcaaagtatggggtagaattttctgtattggttaggtccatttgttgtagagtgcagtttaagtcctgtgtttctttgttgactttctgcctggatgatctgtctagtgctgtcagtggagtgttgaagtcccccactattattgtgtttctgtccaactctgggagctccagagttaggtgcatatatatttaggattgtaatatcttcttgttggattgatccttttatcactatataatgactttctttgtctttttttcttttaaccattgttgctttaaagtctgttttgttaacatcagaatagctactcttgcctgcttttggtttccatttgcttggaatatctgtttccaccctttaccttgagtctgtaagaatctttacatgttaagtgagtctcttgaatacagcagatatttggtttgtaatttttcaaccattctgtcagtggaggatatagaccatttacatttaacgttaatattgagatgtgaagtactatttcagtcatcattgttgactgttaacctactttgttttcttcatgtgttattgttttataggctctgagttttatgctttcaagatgttctattctggtgcatattgaccttttgtttcaagatttagagctccttttagtatttcttgtagagctggtctagtagtgacaaattctctcagtatttgctcatccgaaaaaaaactttttttctccttcatttatgaaacttagttttgctggatacaaaattcttggctgacaattattctgttgaaggaggctaaagataggaccctaatcctttctggcttgtaaagtttctgctgagaaggctgttgttggtctaataagttttcctttataggttacctgatgcttttgtcttactgctcttagaattctttccttcatgttgattttagataccctgataattatatgccttggtgatgtcctttttgttttcttttttttttcttctgagacagagtctcactctgttacccaggctggaatgcagtggcatgatcatggctcactgcagccttgacctcctgggctcaagcaatcctcccaccttagcctcctgagtagctgggactataggcatatgccaccacatcaggctaattttttaattttttatagagatgggttctctctatgttgcccaagctggtctcaaactcctggtctcaagtagtcctcccacctcggcctcccgaagtggtattacaggcattagctactgggtccagctggtgatatcctttttgtaatgaatctcccaggagttctttcagtttctcgtgtttggttatctaaatctctagcaaggtcagggaagttctccttaattattccctcagataagttttccaaattttttgtttgtcttctccctcaggaacactagtgattctttggtttggcaattttacataatcccatatgttttggagactttattcatttcttttaattatattttctttactcttgtctgattgggttaattcaaaagctttgtctccaagctctgaaatttttcttctactagttctagtctattgttaaaactttcctgtgcattttttaattctctaaatgtgtctttcattttcaaaagttctgattggtttttctttaaaatatccatctctagaaaatttatcactcatatcctgaattatttttttaacttcactatgttggttttcacctttctcttgcatctccttgagtagcttaacaatcaaccttttgggttctttatctggtatttcaaagatttcatcttggtttggatccattgctggagagttagtgtgatcttttgtgggtactgtagaaccctgttttgtcatattgtcagaattatttttctggttccttctcacttgggtagactatttcttctagtatttttgaatttatttttcattcaactgtgttttttaatttttttattcccccttaaggatgtaactttaatgtttacagtttattatagcccaatttggctcttgatgatttccggtgtgaagactctgagttccttggttatagagaatctttgtctgatggctttctcagatgctgtttgtagtagcaaggtgcttggtgtgtgagcaggttcactgtcttaagttttccatctggctcacagggtagaccgcagcccaccatttctttcagagggtctgtgatttctgtcagttttcctgttaagttcctgtgttgcttcttgaacaaaagttcacagtatgactctctacacactcttttgtctttccaagtaggggaggcatgctaacaatgctttcagtccaccatcttggggaaaaaagagtgtgtgtgtgtgtgtgtgtgtgtgtgtgtgtgtgtaaatggaataatgcagtatgtattcttctgtgtctaggatctttcactcaatatttttgagatttatccatattgttgcacatatcatagcttattctttctctgttgctgaattatattctgttgcacaaatatatcataatttgtttatacattcatgggatgatggacatttgggttggttacagtctttagctattatgagagaatcttatgaataaactgaaaaaattaacactcttgtacaagtctttttgtggacatttgtactcatcaaataaatacctaaaagtgcaatgatctttaatagtgcctgcatattttttgctttagtagatactgcctaatggttttccaaaatgttgctaccactttacactctgaccaacaacacagtatgtgagagtttcagatgccatatatcttgggcaatatttcgttttgtcagtccttttactttgagcatttctagtgtgtttctcatttttgttttaatttgcatttacctaatgactgatgaagttgagtaattttcatatgcttaataataatttatatattttcttttgtgaagttgtgtgctcaagtcctttacccatttttttctgtattatttttagatgctactacaataagacactaaccaaagtttttaaataagatttcagattagattacctatgataccaatgtcttttttttttttttttctgatacaggattttactctgtcacccacactgaagtgcagtggtagaagcatagctcactgcagccttgaactcctgagttaagcattcctcccacctcagcctcctgagtagctggtactacaggcatgtgccaccatacccagctaatttttaaaatttttttgtagagatggggtgtcgctatgttgcccaggctggtcttatactgctggccatgaacaattctcccaccttggctgcccaaagtgctgggattacatgcatcagtcattgcgcccagtcagcaatatattttgattgattttttaaatctcttttgcacagattctttataaaaattttgcaaaaatatacataacatgaaatttgccattttaaccatttttgagtatactattcagtggcattaagcacattcacagcattgtgccaccatccccactattccttctgcgtatttagtattttcttgaatgtaattgatatgtaacaaattacatatatctcagatgtgtaatttgataagttgtaccatatttacacatcttcaaaagtttcctcatgaccatttgttatcctttcttcaaaccactctctgcctccaccctccctccccaagcaaccagtgatctgttttctgtcacaacagattgatttgcattttcaagaattttatgtaagtgaaatcatataaaactattctttttgcctagcttctttcactcagtataattattttgaaattcattcatgttattattgcatataccaatgatttatatattatcattgttcagtattattctattgtatggatatattacaaattgttctcaagctcctggtctcaagtgatcctcctgactcagcctcctaaagtgctgggattgcaggcatgaacaaggtaaaagtttcaagtttacaggcgtaagcaacagcacctagccttggatacactacagattgtttaaccatttgcctgttggtgaacatttgggttgttttctgttttgggctattactaatgaagatggtaagaacattcatctgtaagcatatgctttcatttctcttgggtaaatcattataaatgtaatggctgggtcatatagcaggtgtacgtttaacttttaagaaaatggtgaacagttttccaaagtgcttgtactattttactttcccactgatagtgaatgaaagttctatttcctccataccctcactttcttatgaggatactttgtatagtcagtctttttcatttgagccattctaaataaagccatttattccatttaggtttgtagtggtattaatttgcatttctctaatgacaaatgatgctgagatcttttcgtgtgcttgtcatttgtaggtctttgatctttttgcattgatcttgtttctgcaaacttgctaaagttcttcattcattctattagtcgtttcatagattttttagtctcctacataaacaatcgtcttatatataaattaaaatgagggttttttttttcaaatctttatgcccttctttcctcccttctttcctttcttccttcttttctttttttcagccttatttaactggctaacacctccattacaaatttaaatagaagtgattagagtagacatccttgccttatttctgatcttaggaagaaagcatgtagtatttcaccactaaacatgaaattaacttcaatttttaaaagatgtccttgagctaaagaatacaggaataacaaatgtagggggaagctactacctctgaggcttagggagagtatccaagggaggagcaaacttggaagctgagattcaggcctggtaggaatgagtgtggctgtgcccctggttggtgaagttcactggaatgccaagggccagagctagagagctggggctgatgagcagaaagttgcccactggggtagtggtgaaacttactggaatgtgagacccactgagtctcctatagacctccgacatctgcatcataggagcaaaaagagcacattggaaccagtgtgaagagccccttcctctgctattatttgtagtgtccctgctgcgcctgctacagataaagtcaaatattgtggcaactgcaaaggagaaattttcacagggtctagtctcacaaaacatggtaaagaagctgatttggagctgagaggcaaaaaactgataaatgatacactgattgaggaaactttcttttgattctagttcgctgagaatttaaaccaagagttggtgttgaatattgtcaaatgccttttctacatctattggaattatcatatagttgttgttctttatttattttgctcattatatcaattgtttaaaaaaatatatagagatggagtctcactgtgttgcccaggctacacttgaactcctaggctcaagcaatactcccacctcagcctctcgagtagctgggactacaggcacacaccccaccacacgcaacacatcaattgatttttttttttgagacgggagtctcgctttgttgctcaagctggagtgcagtgatgtgatctcggctcactgcagcctccaccttccaggttcaagcaattctcctggctcagcctcctgagtagttgggactacagctccgcaccaccacacctggctaatttttgtatttttagtagatacagcattccaccatgttggccaggctagtctcgaactcctaacctcaagtgatctgccctccttggcctcccaaaatgctgggattacaggcgtgagccaccacacctggccacatcaattgattttaaaatgtgaaaccaaccttgcacttctgggattaagtcctactttttatgtattgctcaatttaatttgctaatacattaaggatttttgcaacagtgttaaaaggaatattggtctatagtttagttgttttttttcttcttataatgtctttgtcaggttttcctatcaggatttgcagacttcataaaataagctgggaaactgtcttatcttcttctattatttataaagttgagtaagactggtaagattggaattatttatttcttaacttttttgtagaatttaccagtgaaaccatctagtcttgctggagttttttcttttcgatttggtaggaaggtgttttggcaacaaacctactttcttttatagatttagacttttcagattttatttcttcttacctccattttagtatgctgtctttttcaatgatttctccaaggcccctcaggaagaaatttagaacaaaaagtgatggtcagaattcagtcctcaattctcctttgtctgaggcctgtgtgatagctgttggcatttttcgtctggtgggagtttctgataaacaactcaagaacatatgttaagatgttatcttttagtttccatgggacatcagaataccttgtgactctggcttgcttcggaaactgtttttactaccttcttgcttatcaggttgctcatttacttttcaaggctagctgggtgcctggactttcccttgaagggactcaaaatggttcctttatttccatgctgaggggggcccagcaggtccctgaaaggggtcgctgttctatctcaatctttttctagcttcttatgctggaatcttaggtcaatgattttatataatcattattatgataaaattattataaaatattatatataatatataaatatattatttataattacctaattgtatacatagttttcttaaatacatataattatttaagcctgtgaaattttcctaaccactgctttagctgcaactcacaagttttgctatgttgcattttcttcaagtttgaaattctgaggggagaaaacacacttcacctgtttgggtttttttctgctctctcactcgacacaaaatcaacacagaagacttcagtgaccaaatatatggagacctctccaccagcaagcaagcagtcagttctgtagcagacacccagctggatatcccctaattcaattctaacactatctacccagagatggtatcagataccacagattgaagtctcagtgtccagactgcctcatgcttcagacaccagttacaagtcaaggccccctgaacttctgaccaaaccagcttcaagttggggttcctacaactccctgtctagtttcaattactttgctagagtggctcacataactcagggaaacatgtttactagtttattacaaaggatatattaaaagatacaaataaacagctggttgaagagatacatggtctgggtaccatagctcatgcctacaatcccagcactttgggaggttgaggcgagaggatcccttgatcccaggagttcaagaccagcctgggcaacattgcaaaacactgactctatcaaaataaataaataaaatagaaaaaagaaaagataagctgcataatgcaaggtatagaagggtcccaagcacaggagcttctgtctctgtggagtggggtgcaccaccctcccagcatatggatgaatttcttgttcaccttcctataagcctccacatattcagctatcctgtaccccatccttttgggccttttatggagacttcattggataggcatgattaacaaccatgtagaaatgtgattgggccaaaaaggtgtgatctaattgtaatagattgagggggaaacccattaaggcctgtctgttcagattcatcttggcctctctgcagcattccttcctccagggtatggggcaaagctcttttgaaacagaggtcttgtaacctacagtcagacaaggtaggtcagagaatttctttatggccagaggcagaggaagagtagagtatatttttagtttctaagggcctgccttggggagaaaaaggatcaggtgaaaggaaagcagaaggtcagagagagagattgttttctgaggcctgtttctgaggcctaaagcacccaacattttaacaaaagactgtaactaggtctgtgggagttaagagccagaaaccgtggacaaaaatctatgtctatatctatatcactgtcaaaatcagataattaaaatttatacaacattatcctcagaccctattattatcccaataatatccttaggtattaagttcagaatcacacattgcctttgtcaaacctatttagtgtccttcaatctagaaaagtttcttaatctttcctcaactttaatggtgttgacacatttgaagattgagggctagaatttttttttttttttttttttttttttttttttttttttttttttttttttggagacagtttcactcttcttgtgcaggctggagtgcaacggtgcgatcttggctcaccgcaacctctgtctcccgagttcaagcgattctcctgcctccaaagtagctgggattacaggcatgcaccaccaggtcccgctaattttgtatttgtaatagagacggggtttctccatgttggtcaggctggtctcgaactcctgacttcaggtgatccgccctcctcagcctcccaaagtactgggattacagacatgaagatgtgagccaccgtcgcctggcatttttttttttggagacagactcttgctctgtcgccaggctggagtgcagtggcatgatctcggctcactgcaacctccatctctggggttcaagcaattcttctgcctcagcctcccgtgtagctgggactacgggcatgcaccaccacgcctagctaatttttgtatttttaatagagacagggtttcaccatgttggccaggatggtctcaatctcctgaactcatgatccgcctgcctcagcctcccaaagtgctgggattacaggtgtgagccaccatgcctggccctggctacatattttatataatgtccctcaatttgggtttgttaggtatcttctcatgattagatttgtgttgtccacattcgcagagacgtcataggagtaatgctgtgttcttcctattgaatcctattatgtgtcacaaaattttgatgtttttcatcactaattacattcacttgctcacttaattaaggtacttgtaggctttttatctttataatcagtaaatattttgagggacagtactttgaaactatgtaaatgtcttattgtttactttatctgctactaatgtagccactccaactttcttatcactcatttcaggcaaatgtttttctattattactttcaacctatctgtgtctttatatttaaagtgtatctcttgtagacaacataagcatctcttatagactttcttttttatctagtctgacaatatctgcattttaattgaaacattagtccatttacatttaatgaattcttgatatggttgattttaagtttttcatcttattatttttattttgagccatctgttattgctcctttcaatctgttttctttttctcttttgcattaatcaaatttttaatttttcattttagttcttcaattggctctttacctatacctatgtattatttttaagaggttgctttagggtttacagtatgcatctttcacttaccgcattggaatattatactatgcctcagaaaacttaactatatcattttattgttttctggtagccatcggttccgatgagaagtacaccatcatccctgttgttcctatgtgtataatggtggtggttgtttttctgacttctttcagtgttttcttttttagctttggttttcaatagtttccctatcatgtgcatagaggtagttttctttatattaaccatgctttggattcactgagtttcttggatataaaagttgatatttttaccaaatttaaatcatttctcaaatactgttatctgttccattctctcttcttctgtgacaccaattacacataacattagacttttctatattgtcctacaggtcattgaggttctattgatttttgaaacattttttccttgtcttcaaatttaattatttctgttgatctaaactgaaatttattggcttgttcttctattttttagtctactattaagtccatgctatgatttttacatttcagatatagtactttccaattctggaacttccaattgtttctttttatgtaatttttctctgctgagattccctcatttgtttggtaattatgaccatctttttctgttaagtctttgaccatatttataaagctattgtaaattccttgtgtgctaattccaacatctgggttatcttaagatatctttattttggtttttttctcttgaaattgagtcctgtttttctgtttgtttgcatatggagtaattttttatagcatactcagaattgtggatgataccttgtagggactcttgattctgttatcttcctctaaagaatgttgactttttgttttgtaaaagttaaagctgactaattacactgaacttgttgagtgtctcggtttttcccttagtctagttgaatctattagaccaggtccacagtcctggtacatagtctatacttttaaggcatggcccttctgagatttcagtgggaagtctgaaatatgtactaagacctctaactaagtggaactcaaactccaaattctacccctatgccttgggtagtagctgaaatctctgatcagcttttcaactttccttttgtgggtttctgcagacatcttggagtctcccatacattgtcaattcagggatcagccaaggattttaagggagtctatatgcatatatggggcttcccctttttggctcttttacccatctcttttattccatcattttaatcttatttaccacatctaatgtctaaccaactgaagtagcctaccaatcttcctgattcaagtctttcccctctttaaaccattcttcacactgcggccagatttcattcactcatttactcatgtaacaaatagtcaatgagcactttcctaaaagacaatactgtcaagcagtcaagctactgcagctgctaggctggcttgccacatagattcagctgttaaaaagaccataagtccaaattgatttagacagtttattgcttatggcacagcaggtagcatgagcttcatgtctgcattggttctccttgcccccaagtcccataagggtggtatggaggcaggtccacgtagatgctgcaaaggcagagggtcagtgtcacacctgaggaaacttgaactttaaaaacctccaatcttacatcaaggctgtgagcaaacctgcctatcctttgccaccaaatgaaacattatctttattatcctggttagcaaacaaatctgtcctctaacctgaagggaggtaccatttttagcttccaaagcaactagttatgcagacgtctttgaaaagatagtccaaattaccagatatgcagaaacatgatggacaattgcttccaaacaagtacaaggagaaagcaaaccacttaggtcaagttttgagaatgatttcagagatatcagaaatgtgtccatctgctccccaaccccagttatcattctcctttccatctgcaaagataaaagaatctcaaccacttgctaattatagacataaatttccacaaaaggttttaaatatttcatcccacaacaagatataagactggaagccagaattaccttggaagtgttgggctagcactcctttacactaaactggaaaggtatagtctgcaaaagcaggcattacctgtttataattagcaatttatgtatactttaaacagctatccaaaggaattgagttaggtttaatcagaagagtaagagactagagacatgcactatggttctagctgcaagggccttacacccaagataaggagaatgggcgcatatacttaaagagggcataatcttacaagccagtgttagtatgctgagtgtcccatacaagcaagtctggccatagtgcttctcatattcagaggcgggtacagtcattagggggtgcttttatagaacatttcagtttccattattcttctgactgggtgttgaaaagcagttattacaatagtttttttttttttattttgacttcctgatgcatctgcagatgtgcactgaacttaatactgtagtcacaatggtgactttacatcattcagggagtcattccttaagcctagctagagtccttccacttactttataagtacataattccctgtattaaaatctttcctgcctaaaatacctaaatggcttctgtttcctgtactgaacctgcctaatacatggaggaattgaaatttcaggtggatcttaaagatatggtcaacttttgacatagaatgagaacccagagagaacttcaggcagagggaatagagtgagcaaagattaaaaggcagaaatggccatggcattttttagaaacattgaggaaactgattacagaagagaatgatagagtttcctgttatacaaatttctttatttcctatcaaatcctaaatgttttcatctctttttcttttccacttccttttcttctttctctcttccctctcctttctttccgcatatcacttgtctatcgctttaaccttccatgtcacacagtagcattcatagacattgcttacttattttgggggccttcagaattaaagaagttgctgcacctccaaagttttgttctttccactgaatattccactattaggtcagcaggctcattcttgaacttggctctattactaagcagtctcattcataaatttagtctccttagactaactagatttattgtgggctatcagaaatcctccccagatgtgcatgactgcacttggaagctttgagctttacagccctgtttactgccacctgattctaaccagagcaatatctcttatccattggcagaaaagagttaaggatgtgatagggaatttgagttagtggtaggcatgaaagtaatgtgatgggcttgtagaggatgagtgcaaggcatgttggaggcaataacatagatatttcaccatagctctcagcaaattatatctcctaaggtacaaagcataaagtccaacatacatttgatgtttagcatctatagtatttggtgagccattgtgaagcacataccagttacttttgataaagtagcttgaaagaactcttgatttttttttaaatgcttgcttcaaacataccctgtaattttgttttcctgccccatttactgttactcattctcaatcttttatattgcctattactcagtagctcgacttcttgttgttaataactgtagtctcgggtaactttttctttgtctttgtgaacatttttttctcaagtttattttatccaggctaggtatttaacagctctgtgtttcttataaaaagaaatacaaattataaaagctaaaatgaaccttgaaaaacatttactgcagcatttcccaaagcttcctttttttttttttttttttgaaacagagtctcactctatcatctaggctggagtgcagtggcatgatctaggctcactgtaaactctgcctccccagttcaagcgattctcctgcctcagccttccaagtagctgggattacaggcatgcgccaccatgcgtggctaatttttgtatttttagtagagacaggtttttaccatgttggccagattggtctcgaactcctgacctcaggtgatccgcccgcctcagcctcccaaagtgctgggcacgcccagccccaaatcttctttcttaaagtaatattcacatgtaatgttgtgtaaaaaaatgggtcccatggtcagataagtgtaggaactactgcatgtttctccttgaaaatttagcatgtataagcattctagaagctctgagaagttgcacagtgaagaaacccattaattttttaagtccaaaatttctcataatcatttgatcccaatgctttttttttccagcataaactaacagcatttaaggaaacagtgatctgtaaaacactttggtaaataaaatactagtttataacttaaatgaatttcctcatttcacaattgaggaaactgaggcccagaaagttgttttattcatcacaattaaaaacaatgccttacacaaagaaggtactaaataattgtttggtaaattgaatgatatatttatgtttagataactagttagagccaggactaaaacccagctgtcctgacaagttagacctatagcatttaataaggataatgcagttcacttctattcactgctatttaagctgatgataaaaacattttataattgctattaaaaaagcatcatatgctggtttaaaaggcaaactaaagaagttgaatagttggctgatgttttaaatcgacttagaccacaggtatctatctctttagtttttaacagtgtcaaatattggtctcttgatattgttcagagcactctgggttttgaaaaaacagttcaagtatgtgcaaaggcatctgaaaggggaattttctgaagctttttctactcccatgattctcacaaaattcttcaattcattctagtctagaaagtaatggatcttccataaagatgtgctaatcccaaggtgatcacaaaaaaaaagattttcccacctctgaacaggtttcttttgttgttgttgttgttttgctacttttttttaagtatgcttagcatgttataccaaaaataatgtttcttttttatataaaatattgtactatatatataagaaatacctcagaatttctgtttttaaggactccattttggcatgatattttttggtcattacctacttagctatgtcatattttaatatcaccaaagaaaatatcttaaaatgaaattcttgaattgcgcttgacctttccggttgacagtcagcttaaattatatagtatctcccattatctcacaacagatgtcatctcttaggaatgcttcctttcattgaagacactgtgacaataggaaagggatgtggggtgaaaaaaaagtcacgtatcttttgtttatctgcaaaagtctgtgcatagtttttattgctgaaaataaacatgtatcatgattggtgtatgggggttcacattagtatcagaagtttttatggccactctgctggtgacctagtatattgtgctgttttctcaactgcctttgtaaacacagtagccttaatagatcattttgaaagaagctgccatcctgctgcatctgttggtagcctttctcaggtttctgacatatccttaatctgatgctcagccttgtcatttggatcaatagtaaactagataagatgtcttctacttgcaaggctatggctataaaatgtatttgaaaaataaattcactttttatgtccatgccacaaacctggggagtactaatttgtcattctctctccatctgtctgtaaacagtcagttaaattggttattgatgagaagaaggtgaattatacttgaaacaagagtaatatagaaataaacttcatagtaaatgtcttagattcctacaaaaaggtgacatattttagctgttgtcttaactttaatctctagaataatgagcaatttgttttatattttctattccaaatcatcaataataattataattaattataattataaattatactttacaaaccactcacatatagtattcaatcttgataatctctataactatccattttacaatttgtaaagcatttatttattcaaaaaatgtttatgtagtgcctactataaatgaggcactgtgctaggcactacaaattctctatacaaaacaaaattgtgatgatagaacatgttagaattgtagcattttaatgttagaaggaatcctagaaatcatctactactaacttctcattttacaggaaactagatcttagacagtttgtgaatcatgctcaaccagctatttagtgactttttttctattataggatataaacagataatcttttaaaagtaaacccatagtttaatctttttgaatgtatatttcctcatctaagtagtgagaatacttctggttttcacaacaagaatactgtgaatattaagtaaggcatgagtagggagcattttgaaatttaaatataatctgaggataagaaacaactccttgtagacaagaggaaaagagtatgtaaaaatgtaaactgcgattacctcaggtttaagaggtgcaggctgatcactgttttcttctttatactttatttttgacattcctttaatggacatgttattacttttataacaaaaattttaagttttttttctttttttctaactttatgttttgatataatctcaaatttacagaaaagtttcaagaacagtacaaataattttcatatactctcaaattcctcaaatgtgcacattttgacacgtgtgctttatccttctctctactttgccttgatatatgggaatgtgtagatattgccttctgaatcatttggagtaagttgcaggtgtgatactcctttgcccctaaatttcagtgcatagtttctaaaaacaaggacattctcttacatagccacagctcaattatcacaatcaggcagttaacataaataatattatctcatccaaaaatcttacttagattttgcccattgtcccaacaatgtcatctatttaaaaaaaaaaaaatccaggatcaggcactccattcaatcatttatgtctttttagtcttcattaatctgcaacagtttttcagtcttttgtgtatgtatgtgtgtacttcatgatattcacatgttgtaagtatacaggccagttaaattgtacagtagccttcctttttaatttgtctgatatttccttataattagattcagattatgcacttttggtaagaataccacaggagtgatgttgtattcctctcagtgcctcatatcaggaagcatgtgtcatcaatttgtcccagtaatggtgttaattttggattattcacttgaataaaggagctcctgccaggttcctctgctgtgacgtcactattttttccattgtaactataaataataagtatcttgtgggagctaatttgaaactatataaatatcctggaaccgtccaacccactctattgttagcatcgtttgaccactcacacctgagttggttgttatgatgatggctgccacatgaaagagttatttatttattcattcattttttattttttgtttatttatttatttttcaggcagagtctcactctgtcacccaggctggaatgcagtggcactatcttggctcactgcaactgctgcctcctggattcaagcgattctcatgactcagcctcccaagtagctgggaatacaggcgtgcaccaccatgcctgctaatttttgtttttttagtagagatggggtttcgtcgtgttggccaggctaatctcaaactcctgacctcaggtgattcacctgcctcattctcccaaagtgctgggattataggtgtgacccactgtgcacagctgcacaagttatttttaaaaccactgcttatttaagatatacagttagatgtatacttagatgaaaactatgcaaatcctctctctttttaaacaaaaaaactaaaaaggattagaagagttttcacagaaatgctagcagagcttgtgttaggcttagggtaataaaattgttggtaaccttttttcttactttgttttcccaatttttaatagtttttcaaaattttcaatatatgtaaagcataaaatttctaatttttgaatgtgtttctaaaatttatgtttgtttatttccatttggtccacaaagggcttgagggagatactaaaatattgatttcagaattgtagtgtgcttgcacttgaaagaatagttagattacagttaaaacatagctataacaaacaggacatctaccctggcataaactacagattgacacaactaaaatagtctttaatctgcaaatctttattcctcacttcagccaccaagctgtagcattatgctttctcaactcggttgcttctcttagtttcaaataaaaaggtctaaaatggtggcagacagatgaagagcagtatagagttcagggattgacttgcagatggaggtatgttttgatataattttttaaagatggctaaatttgaaactagaagatacaattttgaattcaagcactcactgtgaggatttaggctaccattttgaaaatggataatagttactaagtcagattactagttatggtcagcatttgattaaaccctttaatgcatggtctgaatgaggttcattaaaggttttttagtataatcgaatttacttacacatttgtctgtatatttgtcttttcccaccatctaagaaatcccatccatagtgtggaactgaagtagagaaggcaaaagatggattcaatcagttgtttgaaacaggtcccccaaaggcacacatcttcgcagagtaggtgaattgatttttctaaactgcatgctaggatcaataaaactaaggtacattgttggaaaactaaagatggagcctacaagacttggggtgcttcaaaggaaccaggagttaaacaaaatttgttgcatttagcttctgagtttaatattaaaatatgatgttttaataactttgcttgcagtgtcactgagaaggctggtcagggtcagtaagaagaacaggctacacagattatcatggacatcaaacaatgagaacattaggagcaaatgaaagctgttttgtttacagatactacttttatgatgagaggagagcaatgatggtatctgagaaagaaaccaatatttgttgagtactcgctgtgcactggtcacttttttttcttttttaccaatgggaaatctgaggctttgagaagtaacttgctcacagttattaataatatagccaatgaagtgcccagatctgactggttccaaaatccattctcattttattacaccgtactgcctccccatggagtagcatttttggatcccctaaagcgaacatcaatatgctaggaaaatgaattacttgtgcagtattgggaaaaaggaaatggatgtaaaaactgttaccctgtggttaaggaaaataaaaattattagaaattaagtcattgttgagtcagttagaataaaaaacatttagttttgaagtagctatagggagcaggtcttctgccttttagaattagaatcatagagtcaaaggacattaagctgggtgggctttagatcagaatccaccctccttatttttcatgtgggaggaaacagaggctaggaaaaattcagtgatttgcctttgggtgtgggagtgttctggctgagacctctctcatgtccctcccttacttaaatccttcagtactggccgggtgcagtggctcatgcctgtaatcccagcactttgggaggccaaggcgggaggatcacaaggtcaggagatcgagaccatcctggctaacacagtgaaaccctgtctctactaaaaatacaaaaaattagccgggcgtggtggtgggcgcctgtagtcccagctactcaggaggctgaggcagaagaatggcatgaacctggaaggcagagcttgcagtgagccgagatcgcgccactgcactccagcctgggcaacagaacgagactccgtctcaaaaaaaaaaaaaaaaaaaaaaaaaatccttcagtactgcttcagaagactgaaaggaaaagcccaaactccttgaccctgcacttttcgtcatcgagttcttgcttatcttttgggcttcagtgtcctgtgtctccagttctactctatcctcagacatactgtgtttttaaagctttcattctagtcacctctttttcatcctccacacacaatgccgtcgcacattcagcttccttcctactttaagctggcttaattgcatatactttcaacatgcagctcaggcactgttttctccaataagcttctactgacccctcaaggctgggttaggtgcccctctacagagttcttactaccgtgtgtccttacctctatcatagaactgatctcattgtatgacagcagtgaatagcattgcatatggtttcactttctattacggtcaaagggagggatagtgtgggggttattggagcatgtaataagtggatccaagagacatgatatacacaacttactaatgttggcttcagaatatgcatataggaggagcttatggggacaaattgattggaaggagtgggagtaagatttgaagctgtctttatatagcactttacataaaattcagaaaatacttattgccctccatatcaaagaaattgggagcaggaacaagatggagacattgaggagtgtcaaagtgttagtaatcctaagttaagatcctgttcaactgccatctctttcatgaagtcattctgttctaaccccttcccctcttcacaaggacatcttggggaagtcacaaggaatgacttttaagtacatcatctatcctgtctttgtgttctgtttttgtatcctttttgtgcatttacccttccttgcttataattttgcattgcatacaagcgtacatctgtataaagcttccccaactcttagcatggagtctgatacagagtaattacatcaaaaataaccattgaatgttgaatgaatggtttaattaggtcagtgcttctcaatcccggttgcatttttgaatcacctaccgaaaatttaagaaatattaattccaaagtcccagaaattctgattttgttgatctaggatgggaacagactttttttttaagctcctaaggattgagaactcctagattaggttctttgtttcaacagtggttctcaaagtttaggattctagaccagcagcagcagcacttcccagaaacttgctacaaaatgcagattcttggcccctacaccagtgaatgacaaactctgcgggagggcctatgtgttttcaagccctccagacgatcttgatgcatgctagagtttgagaacttcttttgctagagtttaagacaaaaaaaaaatgttgtccttaaataaaataccaactgtgagaaaccaaatatactttataatcatcctaaaaggttgtaccaatttaaagcaccactctaaataaatcagagtacctcacaagcacaacagaattatccttgtggaaataagcatcccagcattttataacttttttcaatatttatttttggttagtttcctatatataaaaggctctccaatgaaggcattaattttcataataatctaaataaaataggctatattagtcaggaagagcacctgaaaaatctggcattggataaggaagcctcagagtcaagaatacctttccataatttcctctcatagagaaaagcctttttttgacagtaacattttctccttctctcatttgtgctgtttgactccgtgccacttgatagctctgtctattcctatggaaaccaagttagtggatggagccaaggcttggagaaggcattggggggaaatattagaagagttcagccttagagcaactaaagatgttgcctttccctcagtcaaatcctctttgagagccagaactatttcaagccagagagatgttcttggctgatgtattgtctagctgctctgccagatggatgaacatcttaaacttggaaaatagcaaataaagctcctattctgtctttggagcacattcttagcctttgcttacagaattgtcaaataactaaaaaatatatttttaaagatttgcttaagatggcaggttagtgatgtggttctcatcatatttgttaagtacttagaaattttagcaataaaacacagaattaagccttgacaatcagaagtttaagtaaagaggaagaatgtcggtcagtggaaaaagcaatgcagatttcattttatttctgtagctcagtgaatttatgtctttcatgagttgattgctgtaactgtttgcttccctataaaatcactttaaagactaagcaaccagagtacaaacagacatctaaatcaactgaaataagaaaattatctaagcatacaagaaggcattctcctttctaatccatttctgctctacattttatatggcactggtagctaactcatgattgcattgtactgagccatttatgtggatatttatattatgtttatatttcaagaagggtgtagagattcatatttccaatttatattctttgatttatgtcagaaaattaatgtcttctgagaaaacagttgagacaactattaatatagatgcctcataaatctatatcttgaatctagccatctcttctaatgttcaggtctatatgtatctgcccctccccaacaaccttttctttttgctagacctctctgcatagattcccttcaggtgcctcaaactccactttagaaaaaaaaaacagaactcaaaaatttttatccctaaccctatttttttctcccatctcttcagttgttggtaacaccctctatctggtagccattcaggaatcttcttatgtatttcactgatctcttcccttatttccatttagctctcaacatttctattgtgggttgctgtaataacccccttactgctctgcttgcctaaagattttttcccctcaaatcagtgcttcacataacctccagtgtcttttctaaaaacacaaatccagtcatgtcatttccttcttaaatcttctctttttcctgtcttagtttgcttggccttctataacaaaaatactttagactggatggctggaacaacagacatttatttctcacagttctggaggctggagagtccaagatcaaggcaccagcagattctgtgtctggtgagggcctgcttcctggttcatagatggctgtcttcttgctgtatcctcacatgacagaagggagtgaaagagctctctgaggtctctttttaggggtactaatcccatttatgagctccaccctcgtgatgtaatcatcttccaaatgtcccatatcctaataccaagacattggcgttagaatttcaacacatgaattgggggggtttgggggttggggggacatatattcagtctgtagcactcctttttaccaatatgatcaactttaggctccttatcataacatattagactatccattttataacccctgctcacctctctgatcttacttttcacttcctcttacagtgcatttcttttcttttttctttttttttaattagagaaagggtctcactatgtggctcaggctggtttctaactcctgggctcgagtgatctgcccaccttggcctcccaaagtgctgggatacaggcatgagccaccattcctggcccttacaatgcatttcatattacaatgatattgaattatttgcggagtttgagatgagattttaccctaaatataagctaagaagttagtctgttactgtttcatggatgctaacaatagatacgagactccgcagtcagagacaaagtagtttactactcacaacacagcaaaaagaatgagcaccacgtctatgcttcccttgcccccagagaacatgtggaagttgcagaggctgcacacagtgggttttcatcacaactgaggaacaccgaacttcaggaatctaccacttttatagtaagcacttagtaagcccagaggaagacattacctcatctctccagttgcttgttgcaaacacaaccctgaaaaattacctaagtaaagagtggccaagactttgcattcttggcatacccagtaagaacgtttaggaatgcttcaggcccatggtagattgactcttccaacaacccatccctcagcccagcattgtcttgacatgagtatgccactacatcagctacttttatttatcttaccaagagagactaggaccatcgctttaatttgtctcatacagcacttacttaacaagactccaagtagcaggataaaaacatcctgtaatattggtatcaactatgtccctcagtatcttggactaaatcaactgtgaataagccccagaggagaaagtagatcttactttatacagctaggatgtaatctaagtctggtctgttatctattttgacccatgcaagggagtttagactgacatgctaatctttggcctcgttgcagatagttacaggaggcgctagattacaggggccaaaaagcaacccccaagctcaaaggtggaatacaccatggcctactctttcctacatacaaacatgtagcctaaagaggctgaaataaagagtcactttatttcaggatttgtcattaaacttggatcaaccattacattgatttgtctaagccacatgggcagtatcactaagtagttgttacttcagttgccatgcatggcataatccaaagctgctcacatgtcagaagaagcatatggatttgtgtacatcagattaaaataaggttgtgccagtccctttgcttccatgtatacaacggggtccacattcaggagctgtcattgatggtatcaagcacagcaaaagaattaagaaccaccaatgcccatgtgaatttttctgtttcatagcaagcacatggtcagagataaaacagacgcaggtcagatggctggcctcagctgctgtttgattcaggtagctcactatatatttgttttgccaggatgcacttgcggatccagaggacaaagaaagtattaattgtcctccccatccctgtacttcctgaggtctcatgtgtttccttcctaggggctgaagttgttgctttccttctttggccacatagttaatgtgtcccattccagtagatataacttcgccttttctccaatcatcccctacttgtgcctgtagcttatagaagggtaagtacatatgggacaaatttagaaacctattatgtcttccattttggcctatatggaccactatagaatgactcagtgagcagggcactcaatcagatggtcattatggatatttatgatctgggaccttatcagttgaacaaaatgaatccaggtgggtaaacccaaattaagcttgaatctctaagcccccttttggctggctgccacccaagggatatatgaaacaaaccatcctgagattgcttttgggaaaaagaaagaagcaagataaccagggttgggccaggcagaatcccaaattttcaaaacagatgtatataatcccccactccttttgtcctgattatttcccaggaggctacaaggatgaaatgaaccctttctgaaggtggccacagttagtaagcaaactgcttcatacaggagtgtggaccaggaggaggtaagagaggtggagccagaaacatttttgagttgattttcaagaaggcctttccaagctctcaacaattccagatacctgaggatggtaggaagcatggaatgtccattaagtacctaactattggctcattgttaggcatatcatggtcagactatagaaggtctaggaaccccaaaacatggtcctcagtgctatagcttgaataggctaatcagattggagcagcaactccatatggtggagcagcaacaccataacctgaaaaatgtctatggtggaaaggcacgaggtgagcccaagaggaggtgacagaggtccctgctgggaaggggcaagggcaatcctccatgtaatgtggactccttcaccacaagaaaaggaggccaactgggcaagatacataagtctggtatgcagtggtatcttctgcatgaaaaacataccttttactttgtatccattctattgtggtgggttcattgccttatctagtgcagtgatggatcctagtggcaaatcccagtgaccaggcaatacagacttgttcagcgacttgatttcagtcggtcttatcagagagcaggcccttactgttactgtgggtatctatgtgagtgacccaaagtgtctgattggcagccacaatttgtttgtagtttgtggccccaaacaggaatatctttaatttaccaactgtagtcttccaagtggcagaccaggtgactacagtactgttagcagaccaagaatcagtaaaaatacggctagtctttgggagtattgcctaaggtaagggtgatggcttttcatttcagcccattgggctaactggtcattaccactcagtctcctggagctgtcattgaggttggacagctactgccccctactggacaccatcgggttttaacttagccaaagcatcagcaaaccaggccaaggcatttaagggaccattaagccagcagctttgcttcagacagtggccacctgtatacccagtgctttgtcctcaatgtcaaataagtcaggctaaagcaggaatcagatacatagaacagttgactctgtcctattaggcaaggttttgcattcacattcacttttgagcacctgctcactcatgtctcaaccaaatgaacttctaatgttttcaatccacctaaagatccatgtcaaatagcaaaatcttcattgttctctccatttatttctgttttggagatttcttggccctgcagccgcaaccacatggtctttcagcttgctgcccccgtggtcatgtaccattccttcttttgcctgcccagaggaaggtgagcaaaaacaaaggcactatttgggtggcttgctttaatcccacctctcaccattcagactcattaacagagagaatactggggtcactcgccccttaaccttgcccaccacctgggcatgatctcagggggtcttctcacccttgaacctaaggatacctgagaatgggcctctagggttcttgtccttactcttcaagaaaactatgtctctccagctgggtgcagtggctcatgcctgtaatcccagaacgttgagaggccgaggtgagtagatcacttgaggtcaggagtttgtgaccagcctggccaacatggtgaaaccccgtctctaccaaaaatataaaaattagccaggcatgggggcacacacctataatcccagctacttgggaggctgaggcacaagaattgcttgaacccgggaggcagaggttgcagtgagccaagatcgcgccactgcactccagcctgggcgacagagtgagactctgtctcaaaaaaataaaaggaagaaagaaaggaaaactatgtctctgtcagtatcctatcatcttttactgtcttgtcagttctggcatttaattaaccctatttacaaggtaataagttagctgcagatgctggcagaagacacaagactcccatcagagacgaaaagcgtcattactaatggcatagctaggagctaggagtacttatctgtttgcatgagtttccctcccctccaaggattatgggggcaatatggaggactcagatgggcccagcacacagtgggtttgcatgacatctgaagagtgctagattttgggaatctccagcttttagtaaatagagtagtaagcaagcctgcttgttctttgccctggtgggtgacattacctcgtcactcaagattgctcactgcaaaccccactctggaaaatggtcccagtaaagtggagtcaagcttttgcattcttggcatacccagtaagtacattcagggacattcaaggcccagggcagattgcctctcccaacactattgtggtatttccaaaactcatttgtgtctgcaaccactacagaaaagtttgatataatgaaattactgatatttgcgacctatatacttcctagggatagtaattctttttacaaattaatacagtaaatgccttgagagtttataaatacataattatatagctataattataattaataaatcatgtttctatttttccatttcaattttaagtaatgtattttgggtatataatatatttaggatttaaaatgaactatgacagagtacctactttacatttgtgtgtgctattataaatatagttatctttctaggccaaaattttataccaatttgtaaatgaacaaaaaaatatagtgaacatttatatatatatagtgagcaattgtttttctctccaagtacagtgacagaaaatataagcactggggacacagaacaagaatgcaaagaaattaattggaaaacatgtaggtcccaaagtattggttttgggaaaacatctggcctcttcagtactccagtggggagaagggccaccgtaggcagttttagtcaagtcttgggcattgaagtctgttaaagtaatcgtctcagctgaagaggaagcaaatagcaaaggccccagggagacagatatagaaaatatggtagccattttggggaaaaaatgtagaggtaggatccagaatattttgaggatcagctgccaattatctataagttaatcataaaggcacttactgggaacaaacagcagtcctgtagaatatgatttcagaatagggttcaggaagatgcctccttccttttcactgattgaaaggtggtcatatttgtgcaaaaggcaagaaaattcttagaattttggaatattctttgcctcactatgaggctacagctttataggaagctgtttatctagagaaatggcagaagcaggacaccatccaagcctcaggtcaggaagctactcactagctcactgttaataattgtgacatccctaatatcactgaagacagggctccaggagatctgtgtaggagcagattgttataatggactaggagctgggtggaagatgctctatgggtcaacaaggagaaaaaaggaaaacaaagcaaacaaatgaaaaacaaaaatgaacctgcagacagaaatttcaaaatatttgaagaaatctaatgctaacaaagcaaacaatattattcagattacgaattcattcctagtgggagagcataaataaagcaaaaaaataagccacacagagaagatatttgcaaaaccaaccaagaattagtatccagaatacataaagaactcctatagatcagtaagaaaaaaaaacaaatagccaagttcagaaatgagttacaacacaagaaggctatttacaaaagaaacaaatatccagcaaacatataaaaacattccacctcaattcgggaaatgcacattaaaacacagctgtaggccaggcacagtggtgcacgcctgtagccccaactacttgagaggctgaggtggtaggatcacttgagcccaggagttgagtccagcctgggcaagctatagcaagaccccttctattaaaaaacaaaacaaaaaactgtaaccgtcagattggcaaaaattagcaagtcagacaaaacccagtgtggtgaggatgtggagaaacaggaactcatacattactgttatgaatgttaacttggagtagctattttagagagcaatctcaaaccagaagtttcagaaattcttatgtacttaccaggagatatgtatgagaatattcattacaatattgggtaatcttgaaaaatgagaaacatgctaaatatccctctagagaagaataaatatattattttcatatgacagcatacttattccagtgaaaatgtatgaacccaggcaacttgaataaatctgaaaaatactgctttgagtaaaaaatgacacgattcatgcaagaccatttgtacaaagattgaaaacatgtaaaacaatactatgtcgtttatggatatatatatatatatatgtttgtatgaaatagaagcataaaaacattcattggaatgataaacacccaattcaggatagtagtctccaaagagggagagaaggtaatggaattggggacacaaaggaagtattaactttatctgttaggttttattacttaaaaaatgaaaaatccaaagcaaaatatcaaagtatttttctcaaaatctccatatcattgttattaccattaaatagctatgtgctttttttttaaaaaaaggagttcatcttaagagaactggacagacacaaatataaagttaaaaatcacattttgacctaatttgtttcccagattcctttcaagtgctgttctctgggtcagagaacttttaattctctttcacccttttcatacatttggagaaaatctaagtgtcataatctttatgtgacagatgaaagaagctcttggtgttaattacaggaagatttagaggaaaattatgaccacctaatgaaaaacgaaaaaaaatttattcactgtttcagagatattgggaaatgttttcacatttcagaagcatgatggacctgatcatagcagagtaatgtccttttaaatgactaaatcaagaccttcctgtaacttcagctcccttacttctgcttacctaccatcagagttttcttaagtatatatcctcttttgatctattatctccttcgctcttatactatttcctacccactccaaaattataaaagcagaccctaaaacaaaccgtcctccaaacaggatcagtttctgtatagctctaacaggttatactaaatgattaacttccaggccaggcacagtggctcacgcctgtaatcccagcactttgggaggctgaggcaggcggatcacctgaggtcaggagtttgagaccagcctggccaacatggtgaaacctgatttaccaggcttggtggcaggcacctgtaatctcagctattcaggaagctagggcaggagaattgcttgaaccctgaaggcagaggttgcagtgagctgagattgtgctactgcactctagctgggcaacagagcaagactctgtcccaaaaaaaaaaaaaatagattaacttccaaatcctccaaaaagtatttgcattataagaatattctcaaaaacataagaactcctcagttcaagaaataccgaggaagtatttagactttctgtaatgagaaggttttacaggaagcaaagtagcctataacatgggtccaaagggtcacacaaccttcagagggttgtcaaattagcttactgcctcaaactagtatcttcctctgttccattgatactagaaatattctcctgattttagcacttaaagttctctgtcccttctgctcattcccaaagattgaatttgcatacaggacaattttttttttttttttgagacagggtcttctctgatacccaggccggggtgcaggggcacaatcatggcttactgcagttttgacctcctgggctgaagtgatcttcccactccggcctcccagagtgctaggattacaggtgtgagccactgtgcccagccagttgcttgtttaggagaacaaacaggttggccttggtccaagtaaattatattgtttctagtccagccttcatagataatatctgatgggtctctgtcatttgaaataggagatgctggcctcctccccaaggtacctgctaaattcctattgtctatgcctttgttggtcctatatcatcattatctgtaggcagaatatagacatctttctcagtgaaaaaaaaaaatcagacaaaccactactgtaattccccattatccacggttttgctttctgtgatttcatttactgtggtcaaccatgatctaaaaatactaaggtattttgagagagagagaccacattcacataacttttcatacactatattattataattgttctattttattattagttattgttaatcttttactgtgcctaatttataaattaaactttaccatagatatgtgtgtatatgaaaaaaatagtatatatagagggtttggtgctatctgcagtttcagatattcactggggatcttggaatgtatccccaggagataaagggggactactctatttataacattctaactatttttacttttaccttttcctaatcttggttcttaatcactagctgaactgtgtatattacaatcagatctttctgtctgcatgccctttatcttgggccattcttggttctatctgaccatctatgttttgttgaatactacacactggaaaactatttataataataaaaacatctactgagcatttgctttgttcactgttctaagaacttttacaaatatcatttgtctcatttcatatgcataataacttcaggtaccattattacccctgttttatatatgagaaaatagaggcacaggaggataatttatttaatctgtgaaaatgtttgatgatacttctgtgagaaacaaagatgaaattatgtcaaagagctttgtaatacgtaaaacaaagtacgagcattgtactgttatctgcttcataacaaggctcaatgaatatttgttgaatgaatgaatgagtaaatatcattactgagttgcactgtgtcttgtgagggtagagtcctcagaataatgtaaagtgtaaatatgccaagcactgtgtctatagctcagtagttacccccaccaacatatactagtttccttcttctccttcccttttcctctaatttccaatcgaaatgactgtctgattgaatatctttaaaggtcatgatgaattactctgtaatatttgaagtgttatgttcagaaaggtcaaactttatttttcggtatgaagtgtcacacagatttgtttttcctgggcaaactttttttttttttttttccccaaagaaaagatggcaagaaatttagagcagggtgccctcttgaggaaattttagcatcttccttctcaagaactgacatcaaatgaaatgacaagtccagataaatgatgtacactattaatgaagctcagaaaaatgaaacattaaaaagtaagaataaccaaataccaggtatttgagaattaagattcttaactgttatgatctaatatagcaactgtaaataagaatttttatcatttatttatttatttatttttaatttttttttttgagacagagtctcactgtgtcacccaggctggagtgcagtggtgcaatctcagcttactggagcctccgcttcctgggttcaaggattttcatgcctcaccctcccgagtagctggaaccacagcttgcaccaccatgcccggctgattttttttgtatttttagtagacacaaagtttcactatattggccagcctggtctcgaactcctgacctcaagtgatctgcccatctcggccacccaaagtgctagaattacaggcatgagccaccactcccaggcttgtaaataagaatttttaaatgaaaacaaaaacctctagaagatatttcatttcttcttatttactcatttcttcaagtaatatttattaggcacctattctgtgccaggaactatgctgagcacagggatcaataaaacatggtctctgctttcatggagcttacagtttgtgagggagctcacactgaagagaaacaaacaaatatatatgtaattgcaaactgagaaaagtactatgagagaaatgaataggtactagaataaagaataacaagtaagttctatttagggtcatcaagggaaacctctctgagaggaaatatccagcagagtccgttggcttttccacctattccaagtcttcccatctaatatagacagtctacagatcctctttcctagccatggtctttcttatcttctcttatctctgcccctgtggtggactgagtcaatcctatctctgcccctgtgggcaagcagttagttctcattcgtccttctgcacctcactgtcactctagtaaccttgccttacagcagggatgtccaatcttttggcttccctgggccacactggaagaagaagaattgtcttcggccatacataaaatagcactaacaataactgatgagcaaaaaaaacaaaacaaaaaaaaacacgcaaaaaaatctcataatgttttaagaaagtttaagaattttgttgggccacattcaaagccatcctgggccacgtgcaagccaggtgccgcggtgtggacaagcttgctgtagagctgcacattcttcacagtaggtggtctgcttgattaaaaaatgtattccttactaatattgatagtccctcataggagaacatcaatgcattatcatgctaaaagggcccacttctaacaaggttaaggatgacaaatggacaaataatcctgcctgccattatcctctgaatagggagagataaataggcacgaagtaggctgagaacctgatcaggcaatactgtttggtcacactgaccttgaaatatctgaggtaccaagcacatagaaacctccaactggaagtaaaaatgaggaaatagatctgagaaaagagcccagaagaacaatttttagagtcttattttgttcaaagctgccatgttacacagacttactatgtaatggttggcctggctcattaacactcttgctgtggcccttgtaactaagcttctttctctttttttttttgaaatggagtccggctctgtcacccaggttagagtgcagtggtgcgatctctgctcactgcaacctctgcctcccgggttcaagcaagtctctgcctcagcctcccgagtaactgggattacaggcgcctgccaccacgcctggctaatttttgtatttttagtagagacggggtttcaccatgttggccaggctggtctagaactcctgacctcgtgatccccccacctcagcctcccaaagtgctgggattacaggcatgagccaccgcacccggcctgcttctttcttgaggtgggttgattctaccagactggaggatttaactgacttggagagtactgcctgcaagtgggtgggcctaccatgacttctgagttggcatttaggtgaccgtttgagtctgggatccaaacttggtttttttgtttttttttttttgagacggagtctcactctgtcgcccagcctggagtgcagtggcacgatctcggctcactgcaagctccgcctcccaggttcacgccattctgctgcctcagcctcccgagtaaatgggactacaggcgcccaccaccacgcccggctaatttttcgtagagatggggtttcaccgtgctggccaggatggtctcaatctcctgacctcgtgatccacccgcctcggcctcccaaagtgctggggttgcagatgtgagccaccacgcccggccctgggatccaaactttgaataagctgcctctaccttagttgtacccataaatagctttctttaagaaaactaatcatccataccttattaaccagaggtcctgaacaaaacgtttaactactttgaatctcagtttcctcacctgtaaattgggatttaacatctctgcttatttcgcattattacactttgagtataaataataggtactatgttggtcaaaatgtgctgaaactaatacacctacacattgctgctgttagatagcaatttggaaaatacaccaaacactgtaaaatgtgcaaacgtctttgacccaacaatttggttcctgataatttattcttgtgaaaaaattaagaaaaaaaatgtgaaaaaagatgtacagtgaagcatttactacaaaaaaaatattagaaacattctagatatctaacaataatagactggttaaataaaacatgttgttttatttgcaataaaatattggccagccactatgtaaattatattcatgtagaaagttcttggaaggaaacatgaaaaaataaaacaattgatagtatagtggaattacaagcatttttccttattaatttctctggatgttattactctaggagaataattaacatacttaaaacattttaaaattaaaaaaaattttgaccccatagtacatttttttcttatcatctcttgttttttatttagggaaattatcgtttcatgaaactcttacttacacgcagagcaaactggatgcaaaaggatctggaagagatgactcctttgcacttgaccacccggcacaggagccctaagtgtttggcacttctgctgaagtttatggcaccaggagaagtggatacacaggataaaaacaaggtaatggatactcaaaatcaaagactaataagaccagaaagcaaatgcttccttttatgatgtgaaatttcaaggaagaaggcctgaattaccacatatatacatggtagaacaattccaaatctccatacatctcagggaagtatttcacttaaattctgtcattttatcctctcagcaaccatgtgtgttaggtagtatcatctttttacagatggaaaaactgaagctcaggaagattaaaagtttgcccaagatgcaagtggcagaactagaattcaaatctagtcctgtcggccgggcgcattggctcatgcctgtaatcccagcactttgggaggccgaggcaagtggatcagctgagttcaggggttcaagactggcctggccaacatagtgaaacctcatctctactaaaactacaaaaattagccgggcatgttggcatgcgcttgtaatcccagctactcgggaagctgaggcatgagaatcgcttgaaactgggaggcagaggtttcagtgagcccagatagtgccactgaactccagcctgggtgacagagtgagactgtctcaaaaaaaaaaaaaaaaaaaaaaaaatcagtcctgtcttaactccaaaacccaatatttgacagggagtcataatagttactataggtggttagactcatgatggccaaatgcccatggcaatgtcctaaatgcttagtggtttagtggcctacgctttggtatcagccttcctgggtttcaacccagaatccactacttaacttgttctgtgtccttgagcaaattgcttaactcctctgtgcctcaatttttgtatgtatggaaaaaggttaataggattactgttaggttcagcatagtattacatttcagtaaatagaatcagaacaagtataacataggaaaagaaaggaattacgtgttgtttattgaagatgtggttataggtaattagtaagtgctattatacttgtggctttttaaaaatctgcagttgttagtaagcaaaagtagtaagttaaatagtgagtgttcatattaaatgcctataggtacaccttgaaggaataccatgtatgtcagtttctaaagtttttaatgtgacagatgagcttggttcctgctcattaaattatctaattgtagattggattgctgacaatgctactcacgagggctaatatatatttaaacagttcttacattttttcttaataattatcctaatagggaagccagtcttatagaattatgttgacgagaacagcagaagagattttaaagcaacttcaacaagttcaagatgatcattttcaacttttatctgaaataaagtgtgaacattgtcaaaatcaaaatggagttgtttctgtttaaaacaacaacaacaaaacctgacagagccagggaaggccatgaagagaggattcttgtgcttgtaagcctgattaaaaaaaaaaaaaatcacagactgtgcaaaaaccacagccttgcacaaaggccatcataaccttacacaaaaattacttcttcaaagacatttgcccagcaactgcctgtccaaccttgcactggcattatctttgttatcgatctttgtagccaaggatcatcatttgaaaacaattacgtaatcctgctcatttttcttttaaaaacttttgtcttcctttacttgagtacacatagtttagcaatgccctactaccagataccaaataaacattattttctttctttctttttttttttttttttgagacagagtctcactctatcacccaggctggcgtgcagtggtgtgatcttggctcactgaaacctccacctcccaggttcaagcgattctcatgcttcagcctcccaagtagctgggattacaggcatgcgccaccaggcccaactaatttttgtatttttagtagagacggggtttcaccatgttgaccaggctggtctcgaactcctgacctcaagtgatccacccgcctcgatctcccaaagtgccgggattacaggcatgagccactgcgcccagccaaacattattttcttttagagagactctgttatttaggttgactaaagcaagtgctgctgtattttcaaaatgtatcttttcatcaataactgggtctaataatttatcctctaaaattatatttaaattaaaatttgtctactgatacatggaatgggttccagatgcatgaatttcctatgcatgtatttttttatagatattaaaattcgaaacatcctgtcaagttcttaaggtccttggtgataaccagatgtgcattatcaagatcatcacttactttgttgatgattatttataaatgactgggccgctttctctttctcagtgttatcagtaccggatgaactaaataactgtcatgcctaagaggtcagattctggagtcagactgcctgggttaaaatctcagttcagccacttacttcctttgtgtcccagagcagattacttaggttccgtgtgctgtttcctcatcaatcacatgcaaatttaaaaacatacttgtctcccagagatagtaagatgactgcatgcaattaaatagacaatagtctcccttgttcaaaggaaatatattccaacacctccaatggacacttgaaactgcggatagtgtcaaacccaattcccgtcaataggaacacatttctgttcatatcttctacccacaaatttagtactttttccgtcttaactaagcacttatcaggcactatggccataatttttgcagtttggtatgcaacagcaaaaccagcatgagtttcttcttccttctttacagtttcacagatagatttgttcttacggtagagcttagcaaactcaacaaacaattttttcttattaagttgagagctttcaccttttcacttaaaggaaacacttcatagctgctctttggcatatctgaatcaccagtatcaataattttgagctttggggccattaagtaaaagaaggatgacttgaacacaagcactgtgaatctaatattgtgacaatgaatgggataactgagttggctgctaggtgactaactggcagggaatgtctacggtggggatatgctgaacaaaggaaggatttgtgtcccaggtaggatggggtgggatgaagcactatttcaacatgttatttagaatggcacacaatttaaaacttatgaattgtttatttctggaatgttctatttaatatatttagacttcggttgaacacagagacctgaaatcatgaaaagtgaaaacaaagatacagggcaactactgtataaaactcttataacagtgcctgtcccacaataaaagattggggaaagttagttgttactgttgttatttcgagaacctctcgattttgcagcaaacagctctgcattggagtgcctactacaataaccctgagcatgtgaagctgctcatcaagcatgattctaacattgggattcctgatgttgaaggcaagatcccacttcactgggcagccaaccataaagatccaagtgctgttcacacagtgagatgcattctggtgagttgaatggtactgctagacctgaatggccttgaaatttttttattatgaattatttaatatatacaaaagtgtatatttgacgtacaagcaaattattaagcaaaagaatacaacagacatatggactcatcccccaagaagtagaacatttcagtaccactatttaagaccacatagaggtttcctatgtcccagtttttaaacgcattcattccccctacgccgtgctcattcctgtaccccagcaactacttccctgaatcctgaatttatatttatttccttactttgtttcatacttgtttttattaaacagtgaatagatataagtatcagtaaaatacatgtaaagtataaataataatgaaacaacaaatactcatatactcaatatcaagtttaagaaaaagtatattaccattacctttgaagtcctctgagtggagtacctctcagtctcattctattctctcctttcacagaggcaacaactgtcttcaatcttgtgttatcattcccctgatttccattaccacatttatttgtatccttaaacaatatattgctcagtatttaaaggttttgaatttgatatacaaggaattatattgcatgtttttgtttttgttttgttttgtttttttgcagtgccctattctttctcgctcaaccttatgctgtttattttattttattttattttgagacagagtcttgctctgtcacccaggctgtagtacagtggcatgatctcggcttactgcagcctccacctcccaggtttaagcaattctcctgcctcagcgtcccgggtagctgggactgcaggcgtgcgccaccgtgcctggctaatttccgtatttttagtagagaccgggtttcaccatgttggcaaggatggtctcgacctcttgacctcgtgatctacctgcctcagcctcccaaagtgctgggattacaggcgtgagccaacgtgtccgaccactggtgattttatctatgttgctgcatgtagccatgatatattaattcttactgctatataggattccatcttacgaataagccacacagtattcattctgttattgacagatactttgtttccagttttttgttatttacaaacagtgctgcattgacatttttgaacatatctaggatatatatttaactggttgttataggtgtataggaatgcagttgatatttttgatcattgattacatatctaactaattcgctaaactccttatttgtttcgaatatttatcagtagattctttgaggttttctaatccctctgtcccagcttctaatttacatgctatgatagtccaatagttagtcatatttgtttttaacacacaaattagactttaaagtattattttttaatcgttttttacaacctctgatactaaaagtattattttgtatatgcaatgcttagctctgcattttttttgtatctcaaattttccttctaaagttattattttacatcctgaaatatagttcttagattttttttattattatactgtaagttctgggatacaggtgcaaaacgttcaggtttgttacataggtatacatgtgccatggtggtttgctgcacccatcaacctgtcatctacattaggtatttctcctaatgctatccctccccttgccccccaccccccaacaggccccactgtgtgatgttcccctccctgtgtccatgtgttctcattgttcaactcccacttatgagaacatgtggtgtttggttttctgttcttgtgttaattttcggagaatgatggtttccagcttcaaccatctccctgcaaagaacatgaactcattcttttttatggctgcatagtattccatggtgtatatgtgccacattttctttatccagtctatcattgatgggcatttgggttggttccatgactttgctattgtaaataatactgcaataaacatatgtgtgcatgtgtctttatagtagaatgatttataatcctctggatatatacccagtaagaggattcctgggtcaaatggtatttctggttctagatccttgaggagtcaccgcactgtcttccacaatggttgtactaatttacactccaccaacagtgtaaaagcattcctatttctccacatcttctccagcatctgttgtttcctgactttttaatgatcaccattctaactggcatgagatggtggtatctcattgtggttttgattttcatttctctaatgaccagtgatgatgagctttttttcatatgttttttggccacataaatgtcttcttttgagaagtgtctgttcgtatcctttgcccactttttaatgagttttttttttcttttaaatttgtttaagttccttgtagattctggatattagccctttgtcagatggatagattgcaaaatattttctcccattctgtaggttgcctgttcacgctgatgatagtttcttttgctgtgccaaagctctttagtttcattagatcccatttgtccattttggcttttgttgccattgcttttggtgttttagtcatgaagtctttgcccatgcctatgtcctgaatggtatcgcctaggttttcttctagcatttttatgattttaggtcttacgtttaagtctttaatccatcttgagttaattttttgtataaggtgtaaggaaggggtccagtttcagctttctgcatatggccagccagttttccaaacaacatttaggaaatagggaatcctttccccattgcttgtttttgtcagctttgtcatagatcagatgattgtagatgtgtgacattatttctgaggcctctgttctgttccattggtctatatatctgttttggtacaagtaccatgctgttttgtttactgtagccttgtattatagtttgaagtcaggtagcttgatacctccagctttcttctttttgcttaggattgtcttggctatacaggctctttttttgttccataggaaatttaaagtagtttttttctaattatgtgaagaaagtcaatggtagcttgatggaaatagcattgaatttatatattactttgggcagtatggccattttcatgatattgattctccctgtccatgagtgtggaatgtttttccatttgtttgtgtcctctcttatgtccttgaacagtggtttatagttctccttcagggaactacaatgtgaagaagtccttcacatcccttgtaagttgtattcctaggtattttatttctctttgtagcaattgtgaatgggagttcactcatgatttgctctttgtttttctgtttttggtgtataggaatgcttgggagttttgcacattgattttgtatcctgagactttgctgaagctgcttatcagcttaaggagtttctgggctgagacgatggggttatctaaatacacaatcatgtcatctgcaaacagagacaatttgacttcctctcttcctgtttgaataccttttatttctttctcttacctgattgccctggccagacttccaatactatgttgaataggagtggtgagagagggtatccttgtcttgtgccagttttaaaagggaatgcttccagttttgccaattcattatgatattggctgtgggtttgccataaatagctcttattatttttagatatgttccatcaatacctaatttattgagtggttttagcatgaagcggtgttgaatgttatcaaaggccttttctgcatctattgagataatcatgtggtttttgtcattggttctgtttatgtgatggattacatttattgatttgcatatgttgaatcagccttgcatcccagggatgaagctgacttgatcatggtggataagctttttgatgtgctactggtttcggtttaccagtattttattgaggattttcgcattgatgttcatcagggatattggcctgcaattttctatttttcttgtgtctctgctaggttttggtgtcaggatgatgctggcctcataaaatgagttagggaggattccctctttttctattgtttggaatagtttcagaaggaatggtaccagctcctctttgtacctctggtagaatttggctgtgaatccatctggtcctggacttttattggttggtaggctattaattactgcctcaatttcagaacttgttattggtctattcagggatttgacttcttcctggtttagtcctgggagggtgtatgtgtccaggaatttatccatttcttgtagattttccagtttatttgcatggaagtgtttatagtattctctgatggtagtttgtatttctgtggggtcagtggtgatatcccctatatcattttttattgtgtctatttaattctctgttttcttctttattagtctggctagtggtctattttgttagtcttttcaaaaaaccagctcctggattcactgatttttttgaaggatttctcatgtttctgtctccttcagtactgctctgatcttagttatctcttgtcttctgttaggtttttaatttgtttgctcttgattctctacttgttttaattgtgatgttagggtgtcaattttagatctttcctactttgtcctgtgggcatttagtgctgtaaatttccctctaaccactgctttagctgtgtcccgcagattctggtacgttgtgtctttgttctcattggtttcaaagaacttatttatttctgcttttatttcattatttgctcagtagtcattcaggagcaggttgttcagtttccatgtagttgtgcggttttgagtgagtttcttaatcctgagttctaatttgattgcactgtggtctaagagactgtctgttatgatttccattcttttacatttgctgaggaggttttacttccaattacgtggtcaattttagagtaagttctatgtggtactgagaagaatatatattctgttgatttggggtggagagttctgtagatgtttattaggtccacttgatccatagctgagttcaagtcctgaatatccttcttaattttctgttgtgttgatccatctaatattgacagtggggtgttaaagtatcccactattattgtgtgggagtgtaagtctctttgtaggtctcaaagaacttgctttatgaatctgggtgctcctgtattgggtgcatatatatttaggatagttcgctcttcttgttatattgatccttttacctttaaggaattcccttctttgtcttttttgatctttgttggtttaaagtctgttttatcagagactaggattgcaacccctgctttttttttttctttccatttgcttggtaaatcttcctccatccgtttattttgagcctgtgtgtgtctttgcacatgagatgggtctcttgaattcagcacgctggtgggtcttgactctttatccaatttgccagcctttgtcttttaattgaggcatttagcccatttacatttatggttaatattgttatgtgtgaatttgatcctgttatcatgatgctagctggttattttgtacgctagttgatagtttcttcatagtatggttggtctttatatattggtatctctttgcagtggctggtaccagtttttccttcccatatttagtggttcctacaggaactcttgtaaggcaggcctggtggtgacaaaaatccctcagcatttgcttatctgtaaaggattttatttctccttcacttatgaagcttagtttggctggatatgaaattctgagttgaaaattcttttctttaagaatgttgaatattggcccccactctcttctggcttgtagggtttctgcagagagatctgctgttaagtctgatgggtttccctttaagggtaacctgatctttctgtctggcgccccttaacatttttttcttcatttgaaccttggtgaatctgatgattatgtgtcttggggttgctcttcttgaggagcatcttaatggtgttctctgtatttcctgaatttgaatattggcctgtcttgctagattagggaagttctcctggataatatcctgaagtgtgttttccaacttggttccattctcctcatcactttcaggtacaccagcataggtttgggaaatagtcccatatttcttggaggctttgttcattccttttcattattttttctctaaccttgtcttcatgctttatttcattaagttgatcttcagtctctgatatcctttcctccacttgatcgatccggctgttgatacttgtgtatgcttcacgaagttctcgtgctgtgttttttagctccatcaggtcatttatgttcttctataaactggttattctagttagcagttcctgtaatcttttatcaaggttcttagcttccttgcattgggttataacatgctcctttagcttggaggattttattacccaccttctgaagtcttcttctgtcaattcatcaaactcattctctgtccatttttgttcccttgctggcaaggacttgtgatcttttggaggagaagaggcattctggtttttggaattttcagcatttttgcacaggttttccctcatcttcatggatttatctacctttgatctttgatgctgatgacctttggatgggatttttgtgtgggtgtcctttttgttgatgttgatattattgctttctgtttgttagttttccttctaatagtcaggcctctcttctaggggcctgctggagtttgctggaagtccacttcagaccctgtttgcgtgggtatcaccagcagaggctacggaacagtaaagattgctgcctgttctttcctctggatgctttgtcccagatgggcaactgctagattccagctggggctctcctgtatgaggtgtctgccgacccctgctgggaggtgtctcccagtgaggaggcacaggagtcagggacccacttggggaggcagtctttcccttagcagagctcaagcactctgttgggagatctgctgctttcttcagagctggcaggcaggaacatttaagtctgctgaagctgtgcccacagccactccttccccaggtgctctgtcctagggagatgggagttttatctataagcccctgacaggaactgctgcctttctttcagagatgccctgcccagagaggaagaatctagaaaggcagtctggctatagcggctttgctgcgctgtggtgggctccgctcagttcaaacttcttggaggctttgtttacactgtgaggggaaaaccgcctactcaagcctcagtaatggtgacacccctccccccaccacgctcaggcatcccaggttgacttcagactgctgtgctggcagcgagaatttcaagctagtggatcttagctttctgggctccagggaggtgggacccactgagcaaaaccacttggctccctggcttcagccccctttccagtggagtgaacggttttgtttccctggggttccaggtgccactggggtacaaaaaagaactcctgaagctagctcagtgtctgcccaaacggccacccagttttgcgcttgaaacctagggccctggtgctgtaggcaccctagggaatctcctagtctgaaggttctaaaaaccgtgaaaaaagtgtagtatctgggccagataccgtccctgccggcactgtgcatcacggcttcccttgactaggggagggagttccctgatcctttgtgtttcccaggtgaggcgatgccctaccctgcttctgctcaccgtctgtgggctgcacccactgtctaaccagtcccaatgagatgaactgggcacctcagttggaaatgcagaaatcactcaccttctgcattggtctcactgggagctgcagaccagagctgttcctatttggccatcttgctgagttgtcctcttgactccctttagtatagatctttcggtggtcaactctctctggttttttgtttgtttggttttagtttttttgggacagagccttgggctgtctcccaggctggagtgcagtgatgtgatctcagctcactgcaacctctgcatcctgggttcaagtgattctcctgcttcatcctcctgagtagctgggactacaggcacatgccaccacgcacagctaatttttatatttttagtagagacggggtttcaccatgttggccagactggttttgaactcttggcctcaagtgatccacctacgtcagcctcccaaagtgctgggattacaggcatgagccaccacccccagccaactctcctttttaattgttaagaatgtatgcctcttgaaaaaaaaatgattatcctgtgtacacagtcctaggaatctatttttctcagctctttcagcatattattttgctactttctgccttttattattgctcttaaggagtctgttattggtctgtcattcctttatacatgatgtatcttttctctcaggctgcttttacattttgctctttgtttggcattctacagttttactacagtgtgtctaggtgtggcctttttaaaaaatcctgtttggtatacattctgattattgcatctcagttctgccaaacatatatagctgttatctttaaatatcacctctccttcattccctttactcttgcctttagggtctccaattatatatcttttaaggctttttatctaatcctccatgtcttttaacttctcttttatattctcatctccttgtctctttctgttgcgtcctaggtaatgacatcagatctgtcttcgagtttactaagtttttcttcaaataagtccaacctgttgtttaccctatccattgaactgttaatctttgtgatgacatttttcacttctaaaagttctatttggttctttttcaaatctgcctggtaattttgataatgcttgctataaagatccagtagaaaaattaattaacattgtgaactcactaataaacacatgattaaaaaatctcaaccccattcataaatgaactacaagttaaaatagcagtgaaatgtctttcataaccataagggaaaaatgcagtaagcttgataataccaaatgattaatttctgccagcatgtagggaaataaaaacttttacatattgtcatgggagtgttaattggtaagaccatttggagagtgatgtgacaatacctgtttgaagatatccttcaccccagcagttccccttctagctgtctagcctatggaaaaatctcacacatgtgctacaagggatatgtaaaggaaacattaattgcagcattgtctgtaatagtgaaaaaaaatgggaatagcctaaatgttcctcagtaggaaaatagataactatattgtggtttattcaagcacctcaataattgaactattaccaacatagatatccaaggtatagtgttgagagaaagaattgccaaaggatacatgtccgttgccataatgtaaacatttgaaaacacacatacaaaatttatatattgtttatggatacatacatatatacaaaagtataaaaacatacatctttagttgaatgataacagaaacaaaagcatatcaggcaaaatgttgacacctttttaatctagataatcagtatgtaatggttatattattttctgtactttttataattaaatatgaaaataattttttaaagatttagactttgtaccttttccatgatttatcacttgtgctgagagataatgtagaggtcttatttcgaaaattcctcagttaattcctgtgccaggctgggcacagtgactcacaccataatcccagcattttgggaggctgaggtaggagaattgcttgagcctaggaattcaagaccagcctgagaaacatggcaataccccatctctacaaaaaacacaaaaattagccaggtgtggtgggatgtgcctgtagtcccagctacttgggaagctgaggcaggattgcttgagcccaggagtttgaggctgcagtgagctgtgatcatgccactgtactccaacctgggtgacagaacaagaccctgtctctaaaaaagaaagaaagaaaaaaatacttacaccaaatgtaatttattgaggattccatgtatgtctgaagtctctggttccttcaaatcaggatgctgctccaacagagtctttactgaactggcaagactacgagggtcgaactcctcttcactttg

SEQ ID NO: 15639 - DNA, 126911 bp, Homo sapiens
ccgtggggtctgacctggctggatatagtgtaccggcccggcaggaggggcggcccggtccgggttgcgcctcctggagccgcccccgggacgtcagtcctggaggaggcgagggtgagtaggagggggcctggctggggaggctcagatcattcggtccgcaccgccttggcccctgctgcagactcacggccttcctggcctaggctgtggcctgagcctccatcattggcctcctcgcccgctgcctcttctttctgctctaattcctgcattataaagtcagagccaccactcggggcctcagttgaatgagtcaatgacttatccctgattgtctctgagggctcctgtaaggagtagatgtggtacgggatgggatagcacgtcgtaaactggaaaactgtgtgagtgattgctgctaaggcgtggatcgctcctccagtataattacgaaattccctagcaaagcagtcgaggatcctaacttggccccaggtagctctgcggcttcttctgcaaacactcagtgaggtccaggagcccacgcgatctctgcttagtacccaggaggcacactgtgcttttgtggttctccctgctcccgcctttgcttcagctttcctgctgcctggaatggccttacccgttctctctctggaatgctatcttaaatgtcaccatctctgagaacttcccgaacaaccaaccctttagtcctaatcagaattactcttcctatgagtgtgactgcagtacctctagttttgtacggttataattattagagcatttattacacgggcttgttgtataattaggcaaggatgatgacacctttgcattttatagcactttatcaaagtggttttgacttttttctataaaaaatgatttattttcttaaaggggcaaaaaatacattttttcttaagaaaaaaaaagagccctgcataatggctttctcagggtgacaaaattagacagtgatagagccaatactcttaccaaggcggcctaactcctagactagtgctcctatctcttgtccacgcccctgacagagcccaaagatagttgaaatgggaaattttaaaagagcagagacttgtaagtatgaactcattattcaagaaattaaactttgatcctgctcactttttggacttagcactcagcctgtgacctttcatccaacaaacatctactgagtactggctatatacctgttactgtgctaagtgctaagaattatgaagtaaaaagtatatatatataatatatataatatatgtacatataatatatataatatatgtatatataatatatatattatatatgtatatataatatatatattatatatgtacatataatatatatattatatatgtacatataatatatatattatatgtacatataatatatatattatatgtacatataatatatataatatatgtatatataatatatattatatatataatatatgtatatataatatatataatatatgtatatataatatatatataatatatgtatatataatatatatattatatatgtatatataatatatattatatatgtatatatattatatgtatatatataatatatataatatatatacatatatattatatatataatatatattatatatataatatatatgtatatataatatatatattatatgtatatatattatatatattatatatgtgtatatataatttatatatgtataatatatacacacacacacatatatataaaacagagatcacatttttagtgtatttttcaaagggtataaagaactttttttgtggttctgatgtgcctaaaactctgatcacttagaatgaaaaatgacaggtcttagagtttagaacagtgcctagcacatagttgtcactcagcttgttgaatgaacgaatgtgaacatggtctaaccttattattttttgcattttacagaaacctagaaagctgacatagcctgaggacacactgctgattataaatacaactgggcctagaacccaagtgcagttactcccctcccatgttttcacctccacctctattttgtagcttctctcaaataaccttaatataatcctggatatgacagtagttcttctgacatgactgttagactcagacatgactgaagtgtctcacaacaccctcttcctccatattttctgccagtccttaactcaaattgtcagcaaaataaagacgtaaggagctgtgctttaccataattaagaaagtattaatatgttctctcaagggcagaatttgaaccaataatccttgtcgatgacaagacaaataccagctcatccgttataaatttatcttagaaaactctcagatccccaggagtaacagcgattggcgtgacctgctttttggtgaaatcagaaaaggacttgcctaccctcatggcagcaattaactggagctgattaacagctgctccctttagataagtacatatgcttgagtttaccgtgattctgtgactccctacgtttctaacagttgttacctctctggtccttgtaggcattcagctttggaactttgataaagcagcttaagggtttaggaaggatgtttaagatcactgatgcaactattcatctttccttcccatcaggtgtttgaattgttgctgcatttctccagcctctgctttcttaaacactcttgtgatagggatctcactatcttcctatgcggctgatacttattttttattttattttattttttttgagacagggtctccctctgtgcccaggctggagtgcagtggcatgatcttggctcactgcaacctccatccacctcccaaattcaagcaattctcccacctcagcctcctgagtagctaggattacaggtgtgtgccaccacagcccagctaatttttgtgtttttagtagggacggggtttcaccatattggtcaggctggtctctcaaactcctgtcatatgtttttaaaaggttcttacaagctccatgagactaccggtcagaacaaaattgtccttattgaaatatggttcattttagtgatacgatgttccaagtaagatcttatggttaagacctctatctaggtatattttcctggtggaccaaggagagaacaaataaaaatttcactttttgtgagaatgacggcaagacctagataccttttaatttagtatttagccaggtgtgatggcacatgcctgaagtcccagctattcaggtggctgaggagggaggatcgcttaactcaggagtttcaggctgtagtgcgctatgccattcaggtgtccactttaagtttggcatcaatatggtgatctcccaggagtagaagaccaccaggctgcctaagaaggaatgaactggtccacgtcaaaactcctatgctgatcgtagtgggattgcacctatgaatagccactgccctccagcctaggtaacatagcaagatcccatctctttaaaaatagttttttaactaatttttttttcagatggagtcttactctgttgcccaggctggagtgcagtggtgcgatctcagctcactgcaacctccacctcccaggttcaagcaattctcctgcctcagcctcctgcatagttgggattatgggcacgcgccaccacgcccagctaatttttgtatttttagtagagacacagtttcgccatgttggccacgctggtctcgaactcctgacctcaggtgatctgcccgccttgccctcccaaagtgctgggattacaggcgtgagccatcacacccggccttaactaatttttttatttttttctgagtcagggtctcaacctgttgcccagtctggcatgcaatggtgtgatctcagctcactgcaaaccctgtttctcaggttcaagtgaaacttccacctcagcctcccgagtagctaggattacagtgcatgccaccatgctcagctaatttttaaaaacttttggtaggcagggcatggtggcttatgcctgtaatcccagcactttgggatgccaaggtgggcagatcacttgagatcaggagttcgagaccagcctggccaacatggtgaaaccccgtcgctactaaaaaatacaaaacttagccggtcgtgatggcaggtgcctataatcccagctactgaggaggctgaggcaggagacttgcttgagccctggaggcagaggctgcaatgagctgacatcgcaccactgcactctagcctgggtgacagagcaagaccctgtctcgaaaagacaagaagggaggaaagcagggggagaggaggggaggaaaggagaggcgaggggaggggaggggaggcgaggggaagggaggggaggggatgggatttgtagaaatgagctctcgctatattgcccaggctggtctcaaactcctgggctcaagaaattctcctgtcttggcctcacaaagtgctgggattacaggcatgagtcaccatgcccagccctaattaatttttttaagtttatttagtgcttaaatccagctaattctgacttcacaattgagtttatgttatactctttttgtggatcgggctcacttttatttgcaatatcaattctaatgtttaatattatgtggcatcatattacttgtattaacttagattatgtggcatcatattgcttgtgtcactgtaaccctgagccctgtgcctaatgttaaatattgtctttgttttttcctcagatagtccctaagaagagtcctagaagcacctaccctctcattttacagatgagcagatgagcaacttgtacaaaagtcacctaatttgccacctaatgccaattccaggactaggactatagctttttttcttttgagacaggtctcactaagatagacagcctcactatcttgcccaggctgctctcaaacttctggcctcaagcaatcctcctgcgttggccttccaaactgctagtattacagatatgtaccactgcacccagccaggactatagatttttctaatcctagtcaagtatttctagtaagccatatttataaaatacccacttggaactgatgagacaggtttcagaaatgtttgctgcatgcgctcattgtctgaatcattgtttcaggttgctccggttgctaagaagactatgaacaagtcagagaacctgctgtttgctggttcatcattagcatcacaagtccatgctgctgccgttaatggagataagggtgctctacagaggctcatcgtaggtaagcagtccccttaagtacagaaactttaaaagcaactgtttgtcctgaggaagtttgttaatgttagttttaatttgcaatgtactcatacattttaatggaaatatgttattatttatattttcttccaacacatgaacaagaaaggaattaagtcctaaaacttaaaaatatgggttaggattaggtgaaaagtacttgagaaatttctatgtatttagcactaagtctagatagatattctaaggtactaagggaatgaattcatctttatgttaacagatctcgaatgaaacagtggataatcttttaacatttaatatatacccaaagtattaaagtttacaaatgatttaatttttaatgatttaaaattgattcaatgttccccctgtgatttgcatatataagtgatatatagagaggtccaatgcaggagttctagaggagagaataaagagaacaaagaatagctaagaattttctagaaccttagcttcctgctaaagcagagcaaagatccatctttctatcacaaatccagatattcacaagttgcaaatcccaaagagaaaaaaataaaaatatattatttgtagtctttattcacaccagtgtctgatgacatcatgattgacaacttgggctacaaaataaagtccaaattacttgaactttcatacctgttccttccgactttgtttttaccctacatttgcagtttctccaggaacttctactggtgtaccgtaacctctggctaagctagaggttacttctatttcccaataagccatgaattttgtctcactttctccatatgttctgtttccccaccttttttctatctgctactctgttaaccttcttctgtgctaaacaaactcctacttatctttaaagacaaaactattgtatctcacactctgtgaagatttctcttcctctgcttatccttactttacctcagctatctacattcactggaacttgacattttccaccacctccaaatcactcaaacattctaccattcaactaaaactcttactttcagctcacttactgatgacaaacaatagttttccatgctcactgagacctccaatccactagcttctctagttttgaccatcagttttccttctgtcttttccttcctcactactcagccttgattctatgtctgttattaaaatccttctcttggaaaaattccctttttttttttttttttttttttttgccttctgttgcacttgactgttgcattctcaactctggatgtaccaaacctatcttgctaagcagttgaatccagctgaaagattgatagcaccccaaattcatgattacccacttcaaataggcactcagtacttactactcatcataccacattttttctgtaatgaatgtttcatacctctcactctactgaatcctgtgactgccagttccccctcctttcattctctttaatgcagtaggcttactagaggaaatgaagacattaagtaggaactccctcatctttcagtatggtatctacaaatctacctcgatctgtacccatcttctctcttcatcttcctgctaaaacagagcaaagatccatctttctgttaaaggccagttcttccacacatgctctgtgttccatcccctcctgtcttctcagggacattgcttctttttttccccctctgattactatatcttcaacctttcttctatgctaaattctttccatcaacacttaaacatgcttcattgtttccattatttaaaaatcccatctctgtttcttcatctccctttaggtattgccattttcaactttccctcacgactgcattagcgcacaggctaaactgctacaaccatgacttgaataagatagaagtatatttcattctcataatattgcaatcccaactctagatggaccaaacctatcttcctggcaactactaagcagttgaacccagctgtgtaatagtacacagttatgtgggcagtctaggttagatagatatctccatttcacaaaaccatttaggtatactgccaggccttggttcttccattctcaacatgatgcttctatttctgggtcaaaggcagatacgttcattatagtcatagcccagtcagcaggaaggaggaagagagagcacagggaaagcaatttgtcagtaaggaggtagactagacttagaccacaaagccacacctagaacaaaagaagctgaaaaaaaaagtcttgccctggatggtatcatgcccagctaaaactcacggtgctcaattgttgaaaagaagaatgaaagaatgaatggggggcaaatattgctgtctgtcaccaaaaccaagattcttgggccagctgtacccattgtccacacttatttaccttaattcactcttttattaaaacaaaatatactttcttattttgaagtatacatatagagaagtgcatacaacttatatgtacaatttaacaaataaacataaagcaaacatccacttaaaccacctaggttaaggagcagcacattgtcagtaaccccagaagcccctaatgcatccttctctccccactagaggaataggctatcttgacttttataataatcattacattgtggttttaccacctacatatacatccttaaacactttagttaattttgccatttttgactttttgctaaatgttccatgttcacttgaactaaaaaatgtatgtatattacatttttgtcattttcctgctcaaaattctttcattattcccattatacttggaataaaatttgacaggttacttgtatctctttacctgtccatcctcacgttttacctcacgtggtaaaacttgccttctttcagtgtctcacacctgccaagccctttttcatctcagggcttttgcctgaaacgctgttctccctattctctgtctgaataactcttagtcatccttgagatttcaattttaaggtcacttcttcaaagaggcctgctaaccatccagtctcaatgaaatctgttcattgtattccctcttggccctctgtagtttttcttcatagaacttgtttcagattatcactgtatatttatgtgtatgaatattttaacatctctctcctccataagctagtggccttcatgaaagtagtctgggtctgtttaattcatcactaaatccacaaaatccagcacagtacttggcacataagaaatatatttgttgaaggaatgaataaatattttaatcattctttaagtatcttttctcccaagtagtctataatcatcttgagggccaggactaaaaatgaattgagttgaattaaattgaattgaggagcagattgggactaaattccatgagaaaaaaaaattttaagtcaggacgtatgaagaaaaagtaccaagtaaaatgaattcattaatgctttaattaaaaatataaccttcaaagaaaaaagtgcagtatgttataaattaaaaacacttatatttttatggctcagtcatacagattaattaatgtgttattattaaaacctgaaaccttgaaaatccccaaagagaaaatccttaaaaaccaaaaagcaatcatgatgtgaagccagtaggtagctaataaacttatttataaattgtttttctgttttctatcatcttgtctgaggaacttcttattaattactgactgagggtgccactcctcatcttttaagaattgtgccattatgttttctgtgtacctttgctctagagtattttccagcatttgtatatttgtgcaaaaataataactgtttcatcttaaatttcaatgtaattttttttctatgcatatgaatgccaggtggtaatttcaatgtattttaaacatctttttatgtatcacatatttgatgatctctaaatatatgctatttctcttttctaaactagtgacatagtactacagatgaattttttttcttgaatccttgttcaccaactgctcagtgaattcattcactttagcattttctgttttcccctctctgtttccatggagaagtatgtcagtgatgtgtttgactccatggaaacagatgagtgtctctttctacatacacaacgaattaaatcgaacactttctgtgctgcccattgtcctggaggaggactggagaggccttctctgaatgaaacatcatttcagtagcaattcttagtgtttaacctaatacagtggattaatgttttaccataacttactgcttctagattcagatgtattagggcttacttctgagccttaaaatataaacatacatagtaaaatctgaatatgctatggttctcatttatagatatttagctttttctcttaacaccaaactcaaataatttgaatgaatactagaaatgtaattgagaacagaatttagtagattcattttaatactatacagtgtagtattggtagaaaaaagtatagattttagagtcagataaacctgagttttaagttctaactgttatttattagtagtaatatcttggctaagccatttaatttttaagcctcagtttcctcatccgtaaactatagattataatatttcacttgtgtgagagttaaatgaaataatgacagtaaaatatctagcatggtacttgacacatagtagacaataagttaatatcctattactgttattgttatgtcagcttagactaaaataatcaagtttttcatagcttcagatgtctcaatatgaaagagcactaaatgcaacaaagattaatattgtgggttttttgtgaaaactaaacaaaataatttgtaaatatgcatggtgtgtaatgatcaatgttgtcattactgccaataatatttgaggtcgcttgcagtggtatcgtgaccaggaagcaccattctgattctactacaacttttgtttcactgtccatgttctgagcagcataatctctctaaatcatttcctctacttgtttatttatttatttatttttgagatggagtttcactcttgttgcccaggctggagtgcaatggcgtgatctcggctcaccacaacctctgcctccctggttcaagtgattctcctgcctcagcctcccaagtaactgggattacaggcatgtgccaccatgcccggctaatttgttgtatttttagtagagacggggtttctccatgttggtcaggctggtctcgaactcccgacctcaagtgatccgcccgcctcggcctcccgaagtgctgggattacaagcctgagccactgcgcccggcctctacttgtttttaacatcttctgacacagtatttagatacggaagtgagcctcataaatgacagagtagaggtactatttcaggttacttcttcccttacctcaatccctaccttaaaagctagagtcattaaatgtttttaaaatgcttgcctacatgcaaatgtgtttataaatatacttaaatgtttatgcatccatcctaacaatagtaataaaattagctaacatttataaagttatgttttatgtgccagccactgtattgtttggcaactcattaacttaacagtgaaataatatgaagagtttggggtattagtattaccctcatttttaaataaggaaattgagatgcagagaggttaagtaacttgtctaagaagtatcagaactgagattaaagccaagaagtctgattccagagtccattcttttaactgctaaagtatgggacctcaatgtatgggtagatatttttgtacacacgtgcactttcatatgtataaataaataggaatgagaaagataagaaagaaagaaccgattaggtgtgaaccttgcatgatgaaatgaatgattatctagatgggatttttcttaacatttttgtgctatgggcccttctggcaatctggtaagcttctggactcctcagaacaaaaatatatgtatatttttaagagctgaaatgcaatatagaggattacaaaggaaaccagttatattgaaatatcaaatatttttaagttgagacataacaatattctgccataattttttatgaatgtattaaatagcaaggtgttggggcaagtcttacagctatgataattttgaaatagcagtgagtgaaaatgatattttaacatacctgcacaaattataagttatagaaatattttataaaatctcaagtcctctcaaaatacagtatgtctcatgttattattattctcattttgcatgttaggacactgagactcagaagttgagaaatttagttgcacagttaataactggcaaagttgagcctcaaaccaaattatctgatgatgaatcctatgttctttccattgttcccatgttgtcactctataacaataagcagagattttttaatgacagcaaaatgccttcccaagattgtaacagtataaaatatgtaaagtaagaagtgggtgaaatcagatgaaataaatacatcttggatgccatgcaaatataacattttagaacaagcaaataagatacaaatagagactactcttgttacttgtattgggcattgtgttgctgtagctattgtgcggactagcacaactataactgcaagtgacagtcatttcctctaactgctagagttggcgctctggtttctgcacataccagcccattaaccatatgtactcttatgcttccacaagccttaaaataactgaatgcggtagagcagtggctttccagtcatgcttccagctcagctttctggactgtgttgagacagagcacaggcagaatgccagccacgttgagcaagcaccaattggtcatggattagaggccatctccacagttgccagaataattagcacaacacagcacagtagccagctgctttctatattaactgttcctgacaggaatgcaaatttaaatgcactgccatccagtgaatattagtttacatcataagctctacgtttgtacaacatgttacaattaccaaatatttccaaacaatacattgttttattggatcatcaaacaagttgcggtgtagattggacaagtattagctgaatgttataagtgaggaaactaaggaagagagtagggtggatagataaaggcacagacctcgctcagttactggccaggaagcccagaacctaatggtaccctcattattcagaaactagccatgaagccactgtccccctagagctactcaagacaggacctaagtgaggttgaatgctgctttttctaatcatttaggggatatatactttctttctttctttctttctttttttgagacagagtctcactctgtcacccaggctggagtgcagtggtgcaatctctgccttccgggttcaagtgattctcctgcttcagcctcccgagtacctgggaccacaggtacatgccaccatgctcagctaatttttgtatttttagtagagacagggttttgctatgttggccagactggtctcgaactcctgacctcaggtgatccacccgcctcagcctcccaaagtgctgggattacaggcatgagccaccacgcccagccgggggatatatactttcaatttcctcaaatagacaaattttgccttataggcacaaaatattggattgtggtgacataacccaataacatcttctcttctgggaaatacatatatcggttacaaagaaacaatgtatgtcagggaacaaagagaaggcttgaagtttccctgtatcttatataagacttaggaagatgacaggattgacctaaagttctgtgtccttgaaggtgagttgcctattaaccccatgatgctgactctgctttgaccctgaggagcctaatcaattaggacaggggtgttcaagcttttggctttcctgggtattggaagaagaattgtcttgggctacacataaaatacactaacactaacaatagctgatgagctaaaaaaaaaaaaaatcgcaaaaaaaaaaatctcataatgttttaagaaaaattataaatttgtgttgggcagcattaaaagccttcctgggctacatgtggcccacaggccacaggttggataagctcgagttaggattatcccagaatgtgagatggcctctgtttctcagcacttactcttgtgaccatagttcctaatcctctcctttactaaagcttctaaggaggaatgtctctctaggcagaaagtgtaaatgaattactgttatcttgctaatactagctactactatctttgcttaacctaacaagatgccagtagagactgccctttaatcatgaaagacaactagagactagtctcattatggcatattctctataagtatcactgactccagaaggactcaaactgataaaaggaacatgctcttatactacattttagttctgttaatgagtttcagtttaaataaatctttatctataaatacagtgatagaatctttggaatcttctagattagatattgaaggctctagtacaaagaatatactgttgtactacacagagtcttgtgcataagggcttctgttattatatgtgttgaatccaatgcaaaatttgcctccatcttcaaaaaagttctgaaaaagaatatctgcctcctctaggagttacacacaacctgaatacatctgtaaggctctttcaaatttccagagcaatgacctttcttgctttttaccagcgaagtaaattgctgaaaagctaggaagtctttctgggttccagcgtatccaagattaaaatatatgtcgaagtattgcaaactaaaacagtagcttagtttcatgcccaaaacaacccaggcatttatctggtgtcttttttgtttgtttgtttgtttgtttgtttgtttgttttagttttaattgatacatactaattgtatgtgtttatgggggtggagtgtgatgttataatacatgtatagattgtgtaatgatcaaatgatgatatttagcatatgcattaactcaaacatttatcatttctctgtggtgagagcattcaaaattctagctattttgaaatatgcaatacagtattgttaactatagtcaccctactgtgcaatagaacaccaaaacttattccttatatctaactgtacccattgacatttctagcattctattttccaaagaaaacactttcattttgtctattcacttcctccattagcacagttcaggccaagataccttggaagtaactggcttccctcttgttcaacccagatgtaattaccctcagctagtaagagatgaatacttgatgattatctgtaacaaaagtggcaacatttttttcacttacaatacatagctggagccatggcatcttttgtagttattgtttttaactaaaatttattgaggtatataatacagtaaatttcacccttgttcgtatacagttatttaattttgagaaatatataatcatgtgatcaccatgaccatcaagataaagaacaattctatcatgccccaaaatgttagaactgtgtccttttatagccagtttctccccacattccacatattccagtccctggtaaccactggtctgttttctgtctctatagttttaacttttccacaatcctatgccaatgtgtcacatgatatatatgccctttgaggcagatttctttcttttttttttttttttttttttttttttgagacagagtctcactttgtctcccaggctgaagagcagtggtacaatcatgactcactgcagcctcaacctcctaggctcaagcgatcctcccacctcagcctcctgagtagctgggactacaggcatgttccaccatgcccagctaagtgtgtgtgtgtgttttgtagagatggggttttgccatgttgcccaggctggtctcaaactccaggcttcaagggatcttccccccatcagcctcccaaagtgctgggattatgggcgtgagccactgtgcctggtgaagtggatttctttcacttgacataaggcatttgagaattttccatgttgttgagtggatcagtagttcattcctttttattagtgagctatattccattttatggatgtactgcagattattttctcattttgcagtttaaggacaattgggatgtttccagtgtttagcaattatgaataatgctgccgtaaatattcacatacaagtttttatattaacttaaactttcatgcttttatttctcctgagtaaacacttaagtgaaaaattattaggccataattattaggctacagttttaatagtagctataccattttgcatttctaccaacaatggctgagaattctattaatagttctacaactaggttctacatccttaacagcatttggtattgtgaagtttgcttttgattgttttcattttagccattctaatagatgtgcagtggtatcgcattataggttaagtttacatttccctgtgtgttaatgatgttgagagtcttttcatatgcttatttagtgaaatgtctattaaaaccttttggccaccgtttaatttctctttttttattttatttttattttatatatatatatttttattatactttaagttctagggtacatgtgcacaacgtgcaggtttgttacatatgtatacatgtgccatcttggtgtgctgcacccattaactcgtcatttacattaggtatatctcctaatgctatgcctcccccgtcccccgaccccacaacaggccccagtgtgtgatgttccccttcctgtgtccaagtgttctcattgttcagttcccacctatgagtgagaacatgcagtatttggttttttgtctttgctgagaatgatggtttccagcttcatccatgtccctacaaaggacatgaactcatcattttttatggctgcatagtattccatggtgtatatgtgccacattttcttaatccagtctgtcattattggacatttgggttggttccaagtctttgctattgtgagtagtgccacagtaaacatacattgtgcatgtgtctttatagcagcatgatttataatcctttgggtatacacccagtaatgggatggctgggtcaaatggtatttctagttctagatccctcaggaatcgccacactgtcttccacaatggttgaactagtttacagtcccaccaacagtgtaaaagtgttcctatttctccacatcctctccagcacctgttgtttcctgactttttaatgatcgccattctaactggtgtgagatgatatctcattgtggttttgatttgcatttctctgatggccagtggtgatgagcattttttcatgtgtctgttggcttttaatttcttttctttcttttttttcttttttttttttttgagacagggtcatactctgtcacctaagctggagtgcagtggtgcaatctcggctccctgcaacctccgcctcccgggtttaagtgattctcatgcctcagcctcctaagtagctgggattacagacatgagtccagccactgcacctggctaatttttatatttttagtagagatggggttttgccatgttgcctaggctggtctcaaactcctagactcaagcaatctacctgcctctgcctcccaaagtgctgggattacaggtgtgagcactgcacccagcctaagtttcattatccatcttattattctattgtaaaagtttttatttattctggaataaaaggccttatcaaatatgtgttttgcaaatatttcctcccaatttgtggctttttaaaaatttttcttaattgtgttttcaaacacaatttctttatttggatgaaatctaatttattaatttttatggattattcttttgtatcatatctaagaaatctctgcctaacacaaaatcaggaagattttcaccttcaattgcttctaaaagttttatatagttataggttttatttattttttatttttttaacaggctttattcactttatttttcttgtataaaaccctatgttgtagccacagctggagcctgagtccgctgcacggagactctggtgtgggtcttgacgagttggtcagtgaattcctgacagggagacttggtaaatacaatcttccagaggtcgggggtcaggtagctgtaggtcttagagatggcatcaaaggtggccttggcgaagttgcccagggtggcattgcagccccgggctgaggtgtagcagtcatcgataccagccatcatgagcagcttcttgggcacaggcgccgagacaatgccagtgcccctgggtgcagggatgaggcacaccagcacagagccgcagcggcctgtcaccttgcaagggacggtgtggggcttgccgatcttgttcccccagtagcctctgtgcacggggacaatggagagcttggccaggatgatggccttacggatggtggtggccacttccttggagcacttaacacccagaccgacgtggccgttgtagtccccgatagcaacaaacgctttgaacctggtgctctggccagcacgggtctgcttctgcaccggcgtaaccttcaaaatctcgtccttgagagaggcccccaggaaaaagtcaatgatctcagattcattaatgggcagggagaagagacagatttcctccagggacttgatcttcatgtccttgaccaagcggcccagcttggtgacgggcatgcactccttatcctcggccttgccttctcgagctccacggcctcagcccgggccccgtccacggccgcaaccccggccccggatgccactgcggaaacctccgcggaagccaccgcggttccccatcccagggccaccagggcctccggccccccgccccccccgcccacctcccgctgcaccggcgttatcagccatttggtgttttctcggagaagaagcagttataggttttagatttaagtttatgatacgttttgaggtaatttttatatatggtgctattatggactgaatatttgtattcctccaaaattcatatgtttgaaaccctaaccctcaatgtgatgatattaggaggcggggtctttgggagataatttaagtcatgagggtttagccctcgtgaatggaattaacacccttataaaaggaaccccagaaagctctcaagccctctttttcatgtgaggatatcagaagtcagcagtctgcaactcagaagagaggcctcaccagaacctgatcatgctggcatcctgatctcagacttctagcctccagaactgctaggcacaggtgcataccaccaagacagattttttctttttttttctttttttttttttttagatatggggtcttgctatgttggccatgctggtcttgaacccctggcctcacgtgatcctcctgcctcaacctcccaaagtgctgggattacaggcaggagtcaccattcccagccaatttttgttgttgttgttgttgttgagacagagtcttactttgttgcccaggctggagtgcaatggcaatatctcagctcactgcaacctccacctcccgggttcaagcgattctcttgcctcaacctcctgagtagctgggattacagacgcccgccaccacaccttgctaatttttgtatttttagtagaaacggggtttcaccatgttggccagactggtctcggactcctggcctcaagtgatccgcccgcctcagcctctcaaagtgctgggattacaggcatgagccaccacacccagccccaatttttgttttttataagcctcccagtctatggtactttgttacagcagcttgaactgactaacatacaaaatataggttgaaagctttgggtttatttttgtttttgtatatgtttttgtttttgtatatgaatgccaaatttttccagcaccatttattattattattatattattcactcctgttgcccaggctggagtgcagtggcatgatctcggctcactgcaacctctgcctcccaggttcaagcgattctcctgcctcagtctcctgagtagctagaattacaggtgcccaccaccacacctggctaatttctgtacttttagtagagatggggtttcaccatgttgaccaggctggcctcgaactcctgacctcaggtgatccacccaccttggcttcccaaagtgctcggattacaggcatgagccaccatgcctggtctttccagcaccatttatttaaaagattatctattggtttgcctttgcatctttgtcagagtcagttaatcatgtctgtgtgtgtctatttacatactctcaaatctgttctattggtctataagtctatttctttgccactaccacattctcttcattactgtgggtttacaatatgccttgatatcatacaatgtgagttcttcaactttgttctttttttcaaaacctttttattcttctacttcttttgccttttcataacaattttaaaactgcacattcatttctacaaagattgctctgggaagtttttaacaaattattcttagtagtaccttatagtggggattaattatgaatttaatttaattttttaataaagtactatattaggtttttattgctgtgtaacaaattaacacaaacttagcttacaaacaacaaacatttattacttcacagtttctgtatgtcaggaatctagacactgctcaagctgaggcttttgctcgtggtgtcacaagactgcagtcaaggcgtcagccagggctaaggtctcatctgagatttaggattctctccccactgcacattggcagaattcttttttttgagacagagtctcactctgtcacccaggctcgagtgcagtggtgcaatctcagcttcactgcaagctctgcctcccgggttcacgccattctcctgccgcaggctcccgagtagctgggactacaggcgcccgccaccacacctggctgatttttttgtattttttagtagcgatggggtttcaccatgttagccaggatgtctcaatctcctgatctggtgatctgcccacctcggcctcccaaagtgttgggattacaggcgtgagccgctgcacctggtccagaattcacttttttaaaggtacttaatatgtcaaccttattgtttctctatatgcacatttatttgttactgaaaattgaaaaaatagcatgttggaattttcttttaatataattcaaatttttaaaaaccagaaaatctaattagttatgctctaatcaaacttctcaatgttttcttttcattctttccccacaagttaccgtgcttcaaattccagatgttgggattcatctcactgacttaggttctaaaacatatgggagccctgtgtggtggcttatgcctgtaatcccagcacatgataataattcagacttattggtgctgctttgggttcaaattaaaaagtagagctaaagtatattcgagttattcaaatacattcaaacttacacagattccttataaattactgctatcaaggtaagaaggaaaagatacaagaagaaaaagacatcactcatgataggttattattggtatacagtctatcctagcatagactgctgcataaatttgccagcaagaaagaaaagtacaagaataaagtttatgactaaatcacctcattgtcataatttcctattctagcattctcagaaggatcccatctatgatacatgtagaaactgcagccacatttgaatggttcaattcttgattcattctgaaccctcttaggcccaatatttgttagctttcgtttaagctgagaaaaatctgttgagtaacaggtatctcagttttaccatcctttctttccacaaataacgatgtcctttttcctctcctcctgtaaggcaaaccatctctgatgtcctggaaggtctttgcttttctatcttgttgttggggtgaaccttctggtggaggggaagggaatttggtacctgggtggagaatcaagttatcaaggttctttattaacgttttggagcagaagttgtgagaggcctctgaatcatcctgggaatctttctttggtgagcatttgtgaagactttgggatcaaggtgcacatttgtgatgagtcgatcaatggtctagtcatagctctaagctccttctggatctttagtcccagcagaatgtgttgctgaactctcaaattgctacaaggtaccctggaaagaactatgtagcccagaaagagcctgaaaacctaaactccaacaaatagtgatgaacaagttgactacagtttttttttaacaattttaaaattcattgcagtttgcttctccaaggccagcaggaaagtgtctctgctgcttcaaatctctacaatttctacctcggacctctagacactcttttgaaagactcacctgattaggtgaaagcaacccaaactaatctctcttgattaacttgaagttaaatgattaagagacttaattacatttgcaaaatcccttcatatttgccacataacaaaatctaatcatgggagtgacatcatagtcctgcccacactcaagaggaagggatcatacggggcatgtataccaggggctggaagtcttggatgccatgttagaattatcctaccacaagtactgttgagagtatctatatcttaagtggactttgaaggagtatatcttccaaggaatttatccatttcacttaaattgtgagtttatagcatatgacattctcttatttgccttttaatatctgcaggctttgtagtgatgtcattcttgatactgggaatttgtgtctgctctgtttttaatgatcaatctgattagagatttattaatttaattttccaagaaacaacttttagcttcattgattttctctatttttttctgattttaatgtaattgctctctgttcttatttttcttatgtacttccttctgcttgttttgggttaaatttgctcttctgttttagtgttctaaggtagaagcatagataattgatttgaaactattcttctattctaattaaaagcattcattactatatatttccttctaagcttccctcatgtgtggtgcaagaaccttacaacaacatgtttttattcatttaattatgctttttaatttcccttgagattttctctttaacccatggattatcttaaatattttgttatttcttgttattattctgttattgatttctagtttaattacactgtcatctgataatacactttgtatgacttcacttctttaaatctgttagtattcattcatgacccagtatattgtatattttggtcaaggtcccatgggtgttttgaaagattgaatttctggctgtcattagatgaagtgttaaataaataccagttggatcctgttgctttatttttgtgttcagttcttctgtgtccttgctgattttcattttagtggttccagcaattattgagagaagagtgttgaagttaccaattataattgtgttttcaagtgtttctttctattctatcagtttttgctgcctgtatcttgaagctctgtgatttagtatgtatacatttaggaattttatgtattcttggtgaattgacccttttattgttatataatatctctatttgtttctggtaattgtcttttctctaaagtttaccttattagatattaatatacttaactccagctttcatttcattagtatttattatagttttgctaattctttgacttttaacctcctatgttattgtattttaagtgagtttctttttttttttttttttttttttttgagacagagtctcgctctgttgcccaggctggagtgcagtggcacgatttcggcttactgcaagctccgtctcccgggttcacgccattctcctgcctcagcctccaaggtggctgggactacaggcacctgccaccacacccagctaattttttctgttttttagtagagagggggtttcaccatgttagccaggatggtctcgatctcctgacctcatgattcgcccgccttggcctccaaaagtgctgggattacaggcgtgagccactgcgcccagcctaatcaagtcttcttttatatctcagcctttttattgatgtatttacatcatttacatttaatgtaattatgaatgttaagatttaagatttccaatttattgtgtagaacactgcatgttccttctatttttcattcctgtcctcctttccgtttcttgaatatttttagtattccattttaatttatatatggtagagctttttgtaatgctttattaagatataattcacatactatacaattcaaaatttaaagtatacaattgagtgattttgtgtattcagtgttggacaaacgtcaccacaaatgatattagaacactttcattatcccacagagaaacccttcaccctttggctgttactcttcaaatttgtgcccaacccccagtcctaggcaactactcatctactttctgtctctatagatatgccagtgccagatatttcacataaatataattatataatatgtggtattttttgactggcttcttttgcttagcataatgttttcaaggttcatccatgttgagcatatactagaccttcattccttttgctgagtaatattccactgtagagctatacaacattttgtttaaccattcgtcagttgatgaatagcttatggatacttgcattatttccaccttttggctctcatgaataatactgcaatggatatttgtgtaccagtttttgtgtggacatatgtcttcgtttctcttgggtacatacttgggattggaattgctgggtcaaatggttacttaatgttttgaggaacttccagaatattttccaaagtgactctaccattttagattcccaccagtagtatatgaggattttgatttctccatattctcattaatacttgttattatgtatattttttattataaccatcctagtgtatgtgaagtggtatcttatattgtggtttttgttctgttacccaggctggagtgcagtggtgcaatctcagctcactgcaacctccacctcctgggtttaagtgattctcatgcctcagcctcccaagtagctggtattacaggcatgtgccaccaccacacccggctaatttttgtatttttagtagagacgggtttttgccatgttggccaggctggtcttgaactctaggcctcaagtgatccgcccacctcagcctcccaaaatgttgggattataggcgtgagccaccctgctgggtctatgttgtgtttttaaataaatctctttgtatagtttgttttcattggaggttttttatttgtttctgagtgtgtgtgtgtgtgtgtgtgtgtgtgtgtgtgtgtgtatgattgttctaggtattagaatatgtatacttattttatcacagtctgtattttccactttgagtacaacatagaagccttatcactaattaggtccctttacccttctttttgatatagttatcttaaaaatcacctctacataaactgagaaccacatcatacagcaaggttatctttgctttcaatcatcgaaacataactctaaaaattaaagaggataagccaggcatgcactgtagccccagctactcaggaggctgaggcagggaggattgctttagcccaggagttcaagaccagcctgggcaacacagtgagaccctcattaaaaaaaaaaaaaaaactaaagaggttaaaaacagtctattatgtttctcacatatttacattctgcttctcttttttcattcctgatgttctatttgtttcatgagtgttcatagttggttgttggagcacttttttgagagttgttttaaaattcttgtcatataattctaatatatctgtgtcatcacagtgtcagtgcctgttgattatcttttcttgtttaaattaatattttccaaacttttgagttgtttcataattttggattatatctttgacattttctgtattatgagactctggatcctatttaaatatcttactttagtaaacggacaatctgtcaaggtttagaatgaacattctctttcaattttgtggttcaaatttcaagttagttttcagagatcttgcagggctcttctggtttgccccacctctgggctgctcaggcccatttagaaccaaggcaatgatctaactatagttcaattctcagagcttttgctatcttgattctgaccagtttcacacatgggctgctcaaaagtgtcctgactttttgtaccaatttaaagaattacttcctccaactttgtcctctccatattcctatctcctactctctaattggaaaggggtaaaatactacctcattgctatcctttgcttaattcggggcattgatagtttgacagggctcctcccaacggtctctatagtgtccagtggggaaaagaggtgcagtttcttttattgtatgtgttttgagtagagcatagtcaaatggttcactcagcagagttacctgcctcccagtctttttactagagagagtagacttctcttgagaactttggcatctgtgcaccttggtgtttctggattataggctactgtagcccataatgggaggcaaaagcaaacaagcaaacagaaaacgcttcagggaacttaccaccaggttgtctctcaagttccaaagttcctagtccaagatgccttcccttctctgcctgtcatttattttgccttttgccctggggattttagttgtaattagcaggaggatgaggatgctatgtacttgctctatcttgtcatcttgtctagaaagggaaatcaactgtgatttttttttttttttttttttgagatggagttttactctcgttgtccaggctggagtgcaatggcacaatcttagttcactacaacctccgcctcctgggtttaagcaattctcctgcctcaacctcccgagtagctgggattacaggcgcccgccaccacgcctggctaatttttgtatttttagcagagactgggtttcaccatgttggtcaggccggtcttgaacttctgacctcaagtgatctgcccaccttggcctcccagagtgctgggattacaggcgtgagccaccgcacccagcctgtaattcatttttgtatcactcataaaacataccacaatgcctagtgtacaattggcattaattaaatatttgtttcaaaagacaagagtgagtgagggaggaacataagtagctctgtatctcaaaatgttagttcagcataatatgattgagtcatcagtttaaattctagccccacctactttcagtgtgaacatagactggttacttaacttatttgagcctcagtttcctataatatgacaatggtaatatctacttcttaggacaagtaaaaataagatgatatacttaagcatttagcacaatgtttgataataaacagcgaatatagttcctacttatattagtaataacaattatcaaatatcactatctgtttcttatccttataggaaactctgctcttaaagacaaagaagatcagtttgggagaacaccacttatgtattgcgtgttggctgacagattggattgtgcagatgctcttctgaaggcaggagcagatgtgaataaaactgaccatagccagagaacagccctccatcttgcagcccagaaggtgagaagtaaaatttccttgaagagtaaatgttttgtgtgatgtctgctagttgattagtggaactatgcaatggacagataataaagaagtctcaaatgcatgactcataggttttatatattttctctaaaagctgtctttaagctgcagagagtaaaagcacagataactatcagcggctgcatttcaggttcctcaaacagtagaatttattctgtgatctaaagtttattgggaaaaaagtgatcaaatttatatatacaatgtgatgaaacaatgttaccaatctatgtatagggaaaaaataaagaccaaaaagaaatactcaaagatattaatagtggttgggtttaaatttggggaatatatatggaatttttttacttttcactgtttaaaattttttccttaatgagtattacttttactataaaaagttgaaatcccagcctgggcaacatagtgagaccccatctctacaaaaaattaaaaaattagctgggcatggtggcgcacacttgcagtcccagctacttgtggggctcaggtgggaggatcacttgagcctgggaggttgaggctgcagtgaactgagttcacatcactgtactccatcctgagtgacagggcaagaccctgtctctaaattaattaattaattaatttaatttaatttaaaaggttgaaatgtcgcttgaaatatgtggcattaagaagcataaaataaatttattttctgaatgtattttcaactttttaaaatctaaaactatgttgccaatattaatgatttcacatttttaaatgtattattaagagctcagatttttaagattaaacccatcaaacagataaaataggaagcttctacatttagttaaagacttattcacctaaaaactatttttcttccataaaattttggtccataaaatagatttccagtgcctggtatttttctttttgttattttagatttctgtattttttgaataaaaagcaattaaaatgagttagatccagcgggaactattagagttattttctatttaaaaatgtgaaccagatatagctaattaattaaggggttagaaaaatacctttcattagttgaatgcataaaaaaaggctgacattaagttatactactgaatatgctagttatatgcgcttctcagttaggtctgtcaggttattttcaaagttacttctcttgaatttggtttttattatagtaatttttttaaaaatctccctcattttcaatctcagttttaactacttctcgggtatttataacctttcacttaggcttgtcagctaatgaaattattcactcgagaaaggtaactccatttaacttgttatcataaaaaagcaaatagttcagattgggaaaagccgcaaaattaagactttgataccctttagatttttcattatgattgatttaggtgtaaaactcagcttcaaaaatgtagagtgaaggaacctagcttaacatcaagtagattatgtggagcaagtgaggatttcagttgatgatccaacagtataacatcctgtagaagtattatatgacaaagatggttgaaagaaggggaatgtacaaccagacatgttagctgtaatcttttcatcagataccatgcattgttttctttagtttttttgtttctactttgattttttaattataagtttttcatagtatcgaagaataaatagaactatgatttatgtggtggtatttacatagttggttttataacagatttcatgttctttcaagtatctgataattatgcatttccttccttactctgtgttgctgtttgtttttacatgcttgccaaaagcagtaatggatccgaattcccagaaaaggatagtaataattctttagtattctcctgtgtccaattaaatctgggtactgtgttagttcatttgtgctttatacaaagcaccagcattcagagatgaaatatagtatgcaccagtcaggaataagatagtaaatgatctacaaataattttcaaataatagttggagataatatgtcccaggcctgtaatactccttgcccccaaagagacacaagcacaaattctctttagagaaaacatcttcaccttaaacttccaagattttcccatattaaataaaccaaacgtgaactgacaatgaaagatcaccaaactcataagggaacaatctactatgaatgagagtcagcagaaacaacaaacagatttagtctatgaaaaacatcagggattggcatcattagagaaacaatataaaataaccactgatggaatgcttaaagatatgaaagaagaaatcagccaagcacagtggctcacacctgtaattttagcactttagaaaggccaggcaagaggctctcttgaggccaggagtttgagaccagccagggcaacatagagagactctatttatttaaaacaaaaaaaaattagctgggtgtagtggcccacacctgtagtcctagctccttgggaggctgaggcggaaggattgcttgagccctggagtttcagaccagcctgaacaacaaagtgagaccctgtctcaaaaaatatatattttatttaatattataattaaaagaaggaatctggcagggtgcagtggctcacacctgtaatcttaggactttgggaggccaaggtgggtggatcacttgaggccaggagtttgagaccagcctgggcaacatgacgaaaccctgtctctactaaaaacacacacacatacacacacacaaattagttgggcatggtcgtgagcacgtgtactcccagctacttgggaggctgaggtggaagggtcgcttgagcctgggaagtctgcagtgaggagagatcataccactgtatttcagcctgggggactggagtgagaccctgcctcaaaaaaaaatgtaaatacataaaaaaattttttaaaaaaacaaggaatcagaaaaataagaaaccaacaagacactttcataactaggcatcaattctggccataatggcttattttaaactaatttgcctgtcaaaaaaatctgtaaaaactgaataaaatactatatacattgtttgaaggcattgagaacaatcagcacaggcaggatctaagagactacaatcattcaaagaagagaaacacgtaaagtgagtaccacattcatcctggccttttcctttatgacattttccaaactggaatgcaaaagaatacaaccctaacaggaagcagcagccttaccaggctgaagaaactgaggcagagtttggagataatagtggctggaacttgaaagtcaaaatcctggagaggagggaattgcagagaaagaatgcaagaatctggatacaaattcctcacaagtttttaacagattcctaaactgtgcttgtatagggtggtgctctaagaaacctagtattaaacaacagctgggagactagacagctgagtagagattattttaaattatcctatattttcttttatgtttaaatctcttaatatataacacattgatttttgtatggggatccattctcattttaaagcatatggataactaattttcccaacacaacctagttcattaatttttggccatttagtatctgctctctgtcagttccaggcttttgtactacgaactccctatgcatttctgtttttttaaatgagggatcctgaatactagggagcctttgggaaatttgaaaataaaagttacatgatcagtgtattttagggggactaatatggcaactaaagctactttggaagagaaagagtggagatacatagattgctattatagttcaggccaatagagaggaattgggtttaagagatacattatggaggcagaagtgttcattcaacaagcgtttgttaaatatctactatgtaatcatgattatacaactagagagaatatgaaaaaaatgaattacgtatgttagcttatagatggatgctctcagtacccatccctattaatcgtcatttccctttgtttagtgaaccttctgatatattggatatcaaatatcctttccaagtattgtctgtcccacttaattctggtatccatgaatgcagaagtgtgctatttatgtaatcatgaacactcatgtatatgtgtataccttcattcattcaacatgtgttaaaactattatgtaacaggcatcatgttaggccttggaacacaaaggtgaacaacatgattcctgctcttaagttgcttacaaagatcatggatgaagatattaaatgataattaaagctgattgatctaccttgtaatacataagtgttttataaaatatctatagccataatagtcattgttattattgacatgagaagaccaaacattctcatacattatttattatgtttctagtttttgtgtgtgtgtgatagtgaactgtattatgttatcttttcttgggttcattagtgggaaaagctcatattcccaaagcattttgctcacatctctattagagccccattaccttatattgtaattattgcttacttgtctcttttctactaggctggagctccaggcaagtagctctttttgtttgtttttgaatctctctgaatctagtaagttctgacatgtcttggttgaatgaattttattttacttttatagaaagtcattactaatacaaatacgagaccttttgtttattggaaacatttatctactttaaaaatatatatgtttgtggaaaaacttattgaactgtgctgcttggcttagttattttggcacatgttcacttctctggaaacaaattactgttagtccaagaaactgaagaaatggtacccatgagaataaaattaatctcaatatactgaacatctgcacctaatttgtttttcatttagaaccatcagtttaatccaagaaagcaattggtcataccttttctgggcttctcacaaaagatatctaattgttagaaatgttttgctccagggaggctactatttctctgacttctactgatacatttgttaataaggataaaaaagctttagaaatattagtatatgttaatagttatgcatgtttaatcttccaggaggttatttatttggcttcaagaagcttaagactacccactttgacaaattatatcacagtaaacacaaaaattaaagaaccttctggttgtggctgcattgtcctttttttaaattcataaataattctcagttcatctatgaaaattgaatgtttattttcagttttcaaggtacgctgtttccatgttactgatttacaaaaaggagaaagaatacctctgaaacttttcaggaacacttataccaggtaacactattaggttttcttattttgcagatgcacacacaaacacaacaaacaatccacgccccagtccccttcagctctgtattccccctcagtacatatatagctctaccataactcatcaccacagtttattggagattttgtttatctaggtctcacgcccagtaaagctatttgaaggcagtgaccatgtcttatttgatttcatagttacagtcctagcatagcttctgccacttaataaagacagtaatttatttaaggaatacatgaatgaatgaatgaatgaatgaatgaatgaatgaatcagtaaatgtgaatatcaaatagatttaatatgaagggcatggccttcaagactgttgaaatttaaatgaataattatatttattccttttcactatccactccctgcccttacaattttgcaatcaggattttttaagattttctgtgagcttaatttcttaataaacaatgctcttgtatgcctcaatttcttcatctataaaatggaataatacatcctatcttctatgtagggatgatgagtccttagatataaagcattctgtttgttggagaaatttattctcaaggactacattatcaatattattgctattagtcacactacaatgtaggtgcaaacatcaaattactgtttagagatcagcagatgtcagagatagaaaggctctttgggatcttcttgtccaatttgtccttggatgaggaaactgaactctactccttttacatctcttctctttaaaaattactgtactcacattctctttgcctttgcatatgcctggaattttttttttttaattatcttaagcatagagataagaaagaacagggcctggtgccatggctcacgcctgtaatctcagcaatttgggaggatgaggcaggaggatcacctgaggtcaggaatttgagaccagcctggccaacatggtgaaaccccatctctactaaaaatacaaaacttagctgggcgtgatggtgcgtgcctataatcccagctactcaggaggctgaggcaggagaatcgcttgaacctgggaggcggaagttgcagtgagcggatattgcaccactgcactccagcctgggcaacagagtgagactccatctcaaaaaaacaaaaacaaacaaaaaacaatggagaactgagaaaacattaggtacctaatacctcgaagagatcaaactcagtatttcttatttttgcttcagaatttttaaacaaaactatagattcacttgaagtcttccatttatcttccaaaacccttctttccctgtctcctcagtctgtcttgattttgttggtttcaattcccatgcatatgtttctacctttactttatgtgtgtgtgtgtgtgtgtgtgtgtacatgtgcacatacactattatgggtaaaccatattattttgcatctttaaattaatggtattatactgtgtgacatttaccaacttgctttttcaacttaatattatgtatttgaaacttcttcatgttgaaacatgtagccctatttcataaaagattatatccagatgcctaaaagacacatgagatggtacacaacatcattactaattagaagcaaattaaaactccaatgagatactactacatgaccagtggaatgtataaagtaaaaaagtctggcaatcaatattgattgatggtgaagatatggagcaactggagctccccaacatttttgttgagaatgtatattggtacattcactctcgcaaactatctgactatatctgccaaagctacacacacacacacacacacacacacacacacacacacacatacacacatccctcatctcaattcatgctcccagccccggtaatacctaagaaaaataagtgcctctttctactagaagacatgtatgagaattacatgatagttttatttagaaaagcaaacattcctttttttaacttctatttttccataagttattgggggtaaaagtggtatttggttacatgagtaagttctctagtggagatttgtgagaacctggtacacccatcgcccgagcagtatatgccgcaccatatttgttgtcttttatcccttgcccccattccactcttccccccaagtccccaaagtccactgtatcattcttaggcctttgcatcctcatagcttagctcccacatatcagtgagaacatatgatgtttggttttccattcctgagttactttacttagaataatagtctctaatctcatccaggtcattgcaaatgctgttaattcattcctttttaaggctgagtagtattccattgtgtatatctatacaccagagtttctttatccactcgttgattgatgggcatttgggttggttccacaattttgctattgtgaattgtgctgctataaacatgtgtgagcaagtatctttttcgtatgatgacttcttttcctctgggtagataccgagtaatgggattgctggatcaaattgtagttctacttttagttccttaaggaatctccacactgttttccatagcggctgtactagtttacattcccaccagcagtgtagaagtgttccctgaacgccccatccatgccaacatctactgtttttttattctttgattatggccattcttacaggagtaaggtggtattgtgttgtggttttgatttgcatttccctgatcattagtgatgttgagcattttttcatgttttttggtcatttgtgtaacttctttataaaagcaaatattcttaatagtgcagacaacccaaatacgtaccaacaggtgaatgagtagctaaattgtgatgtattcctacaatggaacactgcatgaatgaactgctgacacgttcaaccacataagttaatttcatagacattatgttgagtggaacaagtcagacacttataaaaaatttatttgctgttcatatcaacctcaggaacaagaaaaactaatctatggtgagtcaaatcagatttgtggttacctaaaagatgggtaatatactgagaagaatatgaataagctttcaggggtgctgaaaatgttctggatcggtgtgtgtgttggttacattaaaaggtaccagtctgtatgcttaagatttatgcactttactgtatatgttatattctcaatttttaaagtattatttaaaaaatgataaaatgttcagaacttggtagacattatttgtagggaaggtaagggaggacggaaccaagaatggttcctgacctagactgttaagcactcaggtcaaatttcccccatccttagcctcaggagctatatgaaagccctgtgtctatgctcttatccaggggttcttagatgaacatgcagcagaatcacttggagaacttgttaaaacatagacgtctgggccccaccaccagtgtttttaattcagcagggctggtgtggggccagagaatgtgcttatctaacaagctcccaggtgatggtgatgatgtaggcaacacactttgagaatcactactctattctgcttataccatttgtctttgctgcattttcaatgctattggctccataacctctagatacctatcctgttttactggggactcttttgactggtattcctagctcttgatgacatgactcatagaggtaggatatactagtccaggtacaattttgagaggaagttatcgagttcagttgtgaaaaatggaattttaggcttcggtgataatgactagtatgaattgtgatagtttgcatctccaaagtaaggtcttggctggagttattagtatacatatagaaaccatagaagtagttgaagggctcaggtatggtttatagatgggaagaggactagaaatagaaaacaccaatatttaaggtttatttacagaaaataaacttacaaaggagacagtacaagataggagaagaactagatcagagtggtgttatggagccagagggacaggtttcaagcagaagaggatccatttgtttcatcttttttactatgatgctaagatttgaatagttccttttccactaaatgactcaataaatggatggatataaatatgataagaattaaaaggcttccactggatttttcagttagaaagtgaccttagcaagagcaatggtatttagtggacacacaagctagatatatatcactgttgagtaaacaggaaatgaggatatggagacagtacgagtgattgattaatggggttattgatcaggaaaagtatggacggaagaaattgtggtgggaaaatttttaataaataataatctctcccagtataaccgtcacccactttcaataaatattaattcataaacttgtttctgtagacttcaaactgttttattatatattctattatttcatccataaatatttcagtatatttataattcatatatccccacgatatcattgtaccaaaaagaaattagtgataattctgtaatattattaaatacctaatcagtgttcaaattttcctgattatatctcaaacatttttttacagttgatttattcaaatcaggacctaaacaaggtctatacattgtatttggttgataagtcttttaagtctcttgtaatctaatagatgagagatatttgaacacgtttaaatgttaaggaaaaggagacatcaaaaatttaggagaaagaatggattattgatggatcaaagtcgctggggagatgggaacagaaaggacagtcgggtctgggcacagtagctcacgcgtgtaatcccagtgctttgggaggctgaggtgggcagatcacctgaagtcagaagttcaagaccagcctggccaacatggtgaaaccccatctctaataaaaatacaaaaattagccaggtgtagtgacacacgcctgtaatcccagctgtgcgggaggctgaggcaggagaatcacttgaactcaggaagcagtggttgcagtgagccgtgatcgcgccactgtactccagcctggtcagcagagggagactccttctcaaaaaaaaaggacagacagttggaaagtttagatacacagtaggaaagtttgttcaatgaatgagtatgctatgaacttagaatgtatctgaatattcttgacaatcaattataaaatatgaaaactggaagggccttggaaattattcttattttacacatgggaaaacaaggagttctaggttttcttttgattagagggagatgttttgtccctaaagcaggggagactggataggaaaggaaaccttaggaatataggggaccactgctgctcctctcacacctccccagaccctaacacccttggttccattaaactcctaaacttgggcttcaggaacagaggaagtgagaaagctagtgtttaatgataacttgttttttcactgcataacaaggaccttgttattttctggtgctctgcagagtaaatatagcataatgaaaaagaaatggtatctggtatcagaatttataagatctatattcgagtcataattcaaagacatttggtactctgtgaccttgagcaggtagtttaactctctaagcctctgtaaaatggagataatatttctaacatacttacatcataagattgtaagtatgaaaatacattgaaatactgattgatgtgtatgccaaagaccctgaaaggcagcaaagttatacatagtgtttacaaatatatatgagtatgaaacatctgaaaaccatataaataatctcttttgcaaatataggtactttttccaattgtatttaaaagttgatgtgattaattgatgtgattaagaaaatggcatttcatttaaaattgtagctgaattcaattctcatattttttcaatgaaccaacaaatactaaatttaaacattaaggttctactgaattttttgtaggatttttttgctgttttttaactttaaaaagagttaaactttaaaagactgagagtcaacgtaataatatatgtgtataaagtgctttatttataagtaactttaattgagaataacagcaagtaggtatagccatctagtgactttaactttctttttaaaatatatgtaactcctcagccaggcatggtggctcatgtctgtaatcccaatactttgggaggctgaggcaggtggatcacctgaggtgaggagttcgagaccagcctggccaatgtggtgaaaccccatctctactaaaaatacaaaaattagctgggcgtggtggcacgtgcctataatcccagctactcgggaggctgaggcaggagaatcgcttgaacccagtgggtagaagttgcagtgagccgagatcgtgccattgcactccagctagggtgacaagagcgaaattccgtctcaaaaaaaaattttatatatatatatatccttatacatttaaccctcagagcaacatctttttattctttaattggaaacattagatttgagttgaagaaacattatcatatacttcaaccattaatgtttctgtacccagcttctaccctttccggctctgtcatttgctcaaacaaatctgtcttatttaaatcaaaagagttgcatataggcacttttgataaagagtctttaaccttgaaattttattgatttcgacttttgtttttaaattatttttattgatggtttccttttttttttttttttttcctttcaagagagagtctcgctctgtcacccaggctggagtgcagcagcacgatctcggctcactgcaacgtctgcctcctgggttcaagcgattctcctgcctcagtctccgaagtaacagggattacaggggcctgccaccacgcctggataatttttgtatttttagtagagatgggtttcaccatgttggtcaggctggtcttgaactcctgacctcaagcaatccacctgcctcagcctcccaaagtgctgggattacaggcgtgagccaccgcgcccggccttattgatggttttccttgtcaaaacattatttaatcaaaacagatgaaagcatgtagggagagatttcttttacaaacatattttgtgcttctttgttttatattatagggtacagaaatgacttatttgttgttgttgttttcatgatgcacaatgtgacctaatttacctaggcttactcttttctcagttctcgtacttctgtgtttctctgattcattgatatattgaccacttgttcatttcagaattttctctggactttgatactgcagtaacttatttttctgctactcctttgatagttcattgttttctttattaactcctttcctttaactcccatttctgccccaagataaaagtctttctatatattctacctttcagaggtctcatctacttctataagtttcggctattttccctcaaatatttgtctctagccctagcctctccccttattccagacttatatttccagctatcttctagaaatctctacctggatatcttcccaaaatctcaatttcagcatatctgaaacaagaccttaccttttaacctgtaatcagtcccgtcatctgatttttaaaaacaatttattgaggtgaaatacacatagcataaaattaaccctttttttgtggggggagatagagtctcactttgtcacccaggctggagtgcagtggtgtgatcagggctcactgcagcttcaacctcctggattcaagtgatcctcctgcctcagcccccaagtagctgggactataggcacgtaccactacgcccagctaatttttgtattttttatagagacaggggtttcgccttattgcctgggctggtctcaaactcctgagctcaagctatcagcccgccttggcccaccaaaatgttaggattacaggcatgagccaccgcacccagacaaaataaccactttaaagtgagcaattcagagaaattttgtacattcgttatgttgtgcaaccactacctctatctagttccaaagcatttccatcactctcaagtaaaaccacttatccattaaacagtttgtctccattgccctctctccctagcccctggcaaccaccagtatgcattctgtttctatggatttatagatatttcatgtaaaaaggaatcatatatgacctttgtttcatgcacgtctgtgtaaagagaccaccaaacaggctttgtgtgagcaacaaggctatttatttcacctgggtgcaggcgggctgagtctgaaaagagtcagtgaaggaagatggggtggagctgttttataagatttgggtaggtaaaggaaaattacagtcaaaggggggttgttctctggcgggcaggagtgggggtcacaaggtgctcagtaggggagcttttgagccaggatgagccaggagaaggaatttcacaagataatgtcatcagttaaggcaagaataggccattttcatttcttttgtggtggaatgtcatcagttaaggcaggaaccggccatctggatgtgtacgtgtaggtcacaggagatatgatggcttagcttgggctcagaggcctgacattcctgtcttcttatattaataagaaaaataaaacaaaatagtggtgaagtgttgggacagcgaaaattttgggggatggtacggagagataatgggcgatgtttcttagggctgcttcgagcggaattaggggcggtgtgggaacctagaatgggagagattaagctgaaggaagattttgtggtaaggggtgatattgtgggactgttaggagaaacgttcgtcatttagaattactggtgatggcctagatacggttttgtatgaattgaaaaactaaatggaataagagaaggagaaaaacaggtattaaaggactaagaattgggaggacctaggacatttaattagagagtgcctaaggaggttcagcatagttctgccagcaaagattatttatttacttcaagagttaagagtggcagtttggggatagctccaggagatatcagctgtgatggcttggagaaacagtgtaaaccagcagtgtaaacaagagcagggcatgtgtgagtagttgagaacagtgaataggagtatgattagacagaagatagtagggatgacaagttttttggggcacagtccaagttggtcttggaatgatactggggcctaataaaaaggagcatctatacaggagcttaaatgagctgtaccttgtaacattctgaggacaggcctgaattctgagaagggaaagtggtaaaagtattgtctagtcctttttaagttggtggctgagcttggtgaggtgtgtttttaaaagaccgttagtccattctacctttcctgaagactgaggaccgtaagggaaataaaggtttcactgaataccaagagcctgaaaaaatgcttggctgatttgactaataaaggccggtctgctatcagactgtatagaggtgggaaggccaaaccgaggaattatgtctaacagaagggaaaaaatgaccgcggtggccttctcagaccctgtaggaaaggcctctacccatccagtgaaagcgtctacctagactaagaggtattttagttttctgactcggggcacgtgagtaaagtcaacttgccagtcctgggcaggggcaaatctccgagcttgatatgtaggaaagggaggaggcctgaacaatccctgaggggtagtagaatagcaaatggaacactgagaagtgatttctttgaggatagatttccaggatggaaaggaaatgagaggttctaagagacgggctagcggcttgtaacctacatggaagaggttatgaaatgacgacagaatagaatgggcctgtgaggctggaaggagatattttccttggtctaagaaccatttgccttctgtgggaagagattgataggtggaagtttcagtgggggagtaggtgggagtgactgacgtgaaggagaaaaactggctgtgagggacagaagttggaatgctagctgcttgtctagccacctaatcagcgtaagcgtcgcctagagcaatgggatctgatgccttttgatgccccttgcagtgaatgactctagcttcctttggaagttaagcggcgttgagaagcgtttttattaaagagggattaatgatagaggacccttgtttagtgaggaaacttcttgcatggtggtgcacgatatgaaaggcatatttagagtcagtataaatattgacgcatagtccttttgcaagagtgagggcttgggttaaggcaactagttcggcttgctgagaggtagtggaggggggcagagcggtagcctcaatgatagatgtggaagatactatagcatagcctgcctttgctggtgagtggcatttaggcctggtggaactgccatcaataaaccaaatgtgattagggtgaggaacaggaaagaaggaaatacggggaaatggggtgaatgtcaggtggatcagagagatacagtcatgagggtcaggtgtggtatccagaataatgtgggaggccgggttgaagtccgtgccaggaacaatggtaattgtgggagactcaacaaagagtgaatatagctgaaggagccagggagcagagagtatatgcatcaggtatgaggaagaaaatagattttggaagttatgagaactgtagagagtcagttgagcatactttgtgatttttagggcctttaaaagtattaaggcagcggcagccgctgcatgcagacatgagggttgggttaaaacagtaaggtccagttgtttggacagaaaggctataggacgtggtcccagctcttgtgtaagaattctgaccttactaaccatgcctaggaaggaaaggagttgttgttttgtagaagggattggggtttgggagattagccggagacgataatcagggagagcacgtgtgtttttatgagaattatgctgagataggtaacagatgaggaagaaatttgggcttgactgaagtaatgggggctgtctgtgaagccttgcagcagtacagcctaagtaatttgctgagcctgatgggtgtcagggtcagtacaagtgaaagcgaagagaggctgggatgaagggtgcaaaggaatagcaaacaaagcatgtttgagatctagaacagaataatgggttgtggagggaggtattgaggataggagagtatatgggtttggcaccacggggtagataggcaaaacaatttggttgataaggcgcagatcctgaactaacctgtaagccttgtctggttttaggacaggtaaaatgggggaattgtaaggggagtttataggctttaaaaggccatgctgtagcaggcgagtaatagcaggctttaatccttttgaagcgtgctgtgggatgggatattgacattgagcagggtaagggtgattaggttttaatgggatggtaaggggtgcaggatcggtcactaaggagggagtaggggtgtcttatacttgtgggttaagatggggagatacaaggggaggatgtgaaggaggctttgaactgggggaaaaggcagcgatgaggtgtggctgtagcccaggaatagtcagggaagcagataatttagttaaagtgtcggcctaataagggaactgggcaggtggggataactaaaaaggagtgcttaaaagagtattgtctaagttggcaccagagttggggagttttaagaggtttagaagcctggccgtcagtacctgcaacagttatggaggcaagggaaacaggcccttgaaaagaaggtaatgtggagtgggtagcttccatatcgattaagaaggggacggacttaccttccactgtgagagttacctgaagctcggcgtccgtgatggtttagggggcttccgaggcgatcgggcagtgtcagtcttcagctgctaagccgagaagatctgggaaggagtcactcagagagccttgggccagagttctaggggctctgggagtggctgccaggtgagttgaacagtctgattttcagtggggtcctacacagatgggacacggcttaggaggaatcctgggctgcgggcattccttgtcccggtggccagatgtccggcacttgtagcaagcttcttggggaggaggttctggaggaactcctggctgctgtggttcaggtgtttggaagttcttgtgtgctggtgatgtggctgggatatgtctcacagtggaggcaaggaattgcaacttttttctattattgtacaccttgaaggcgaggttaattaagtcctgttgtggggtttcagggccggaatttaatttttggagctttatttaaagtcaggagctgactgggtaatcaaatgtatattgagaataagatggccttttgaccttttagggtctagggctgtaaagcgtctcagggttgctgccaaacgagccatgaactgggctgggtttttcatatttgatgaaaaagagcctaaaggctaactgatttgggagaggtcggataaagaaaaaggagcattaaccttgactatgcctttagctccagccactttcctaagaggaaattgctgggcaggtaggggagggctagtcgcggaacaaaactgtaagccagactgggtgtgaggaggggagatgatagaaggattatagggtggaggagctgaggctgaggaagaattgggacttagctcggcctggcgacaagcagcctggggaggaggggaaaggtcagatgggtctgtagaaaaggaagactggaaagactcagcgacgcttggggttgggactgaggggacagccaggagggaaagaaggaggattggggaggaatcacattgggaacagagactagggagggaacaacgtgtagaagaatgcctggacgtcaggcacctcagaccatttgcctattttacaacaagaattatctagatcttgtaggatggaaaaatcgaaagtgccgttttctgtctatttggaaccactgttgagtttgtattggggtcaagcggcattgtagaagaaaataagttgtttaggttttaggtcaagtgtgagttgaagaggttttaagttcttgagaacacaggctaagggagaagaaggaggaatggagggtggaaggttgcccatagtgaaggaagcaagcccagagaacagagtagagacacggagggaaggggtttgggggttcttaccttccagaaaagcaggaaaggggtcggggcatggagatataaggggttggggtgcagagataagaggtcagggcacagaaataagggatcagggcgcagagataagaggttggggcgtggaaataagggatggggtgcagagataagaagtcagggcatggaaataagggattggggtgcaaagataagaggtcagggcatggaattaagggatcggggcacagagataagaggttggggcatggaaataagggatcagggggttcttgccccctagaaaagtggtacttgccactaagggtgaaggagaaggggttggggggttcttgcccccctgaaaaagcagagaaggggtagagacacagagagaaggagttgggaggttcttgccccccagaaaagcagtacttgctgctaagggtgaaggaccaaggcaggcgtccccgtgtggtcagacacctctgaaacgtgggtgagtaatcaggcagtcgtccccacgtgattaaacaccaagggaagactgtcttccctagtctgtgaccagcgccggagttttgggtccacggataaaacgcgtctcctgtctctaccagaaaaggaaaggaactgaacttaagagaagggagagattgaagggtggtaccaagattgaaaggagaaagtggttgagggatagtgagagaggttggagaagagattaagaagaggcggcttacctgatttaaaattggtgagatgttccttgggctggtgggtctgaggacccgaggtcgtaggtggatctttttcacggagcaaagagcaggaggacaggggattgatctcccaagggaggtccccccgatccgagtcacagcaccaaatttcatgcgcatctgtgtaaagagaccaacaagcaggctttgtgtgagcagcaaggctgtttatttcacctgggtgcaggcgggctgagtctgaaaagagagtcagtgaaggaagatggggtggggccgttttgtaagatttgggtaggtaaaggaaaattacagtcaaaggggggttgttctctggcaggagtgggggtcacaaggtgctcagtaggggagcttttgagccaggatgagccaggagaaggaatttcacaagataatgtcatcagttaaggcaagaacaggccattttcatttcttttgtggtggaatgtcatcagttaaggcaggaaccagccatctggatgtgtacgtgcaggtcacaggagatatgatggcttagcttgggctcagaggcctgacactttgtgtctggctttttttcacttaggataatgtttttgaggttcatccaagctgtcacatgtatcagtacttcattcatttttatggttgaataatattttcttttataaaaccagtgacactatatttaattattaaattttttaaatgagtctagagtttaaaagacagtttgttaggtgaaattaagtgatttagaaaggaaagagaaaataacagaggtagtatattagaataagcttctagttgacaatatatagctaacatatggatgaataatattttctgttgtgtgtatataccgcaatttatttattccttcatccaagtgctgtttccactattgtgaatagtgcttccgtcaacgtaggtgtacatatacttgtttgagtacctgttttcaattccttcatttgattgtccttcatcaacttatggtactgtattcttttagtcactggagtttaaaaactgcatggcatgtagtaggtgctaaatatatgttggttgaatggatttattaaattaatgtgttgaattgttatcattctcttctttcccctttacctcttctgtctaatcacatgttaattcaattatagacttaactctgccacaaactgtataacattgggcaaaacacaactatatgcttagttttatatgcttagtcttctgtagacctctataggccctctacatactcagtcttctgtaaaatgactttcttgaaccacaaacataaagtcaaagacaacctgggaaatacatcttcacttacaacagagggcaaatatgaattgctccttggaattggtaagcaacctagagaaaaatcagcagtcagtttacattaaaagaaattcaaatgaccctcaagcatatgaaaatatgttcaaatatacgtataaaagtcatgcagattaaaactgtgctaaaatattttttctcacctattgcctcattgtgttggtgaggctgtggataaataagttttttcatactctgctcctgggatagttatctaaattgcaaatgcatataccctttgaccaggcaattccatttctggtaatttatcctaaaaataagcctgcacaagtgaaaaatgatatatatagaaggttttttatggcagcaatatttacaaaaacaaggttggaagcaacccaaatgcccatcaaaaggaatctggtttaaaaaatatggtacatttatacaatggaaaactagggaactgtgaaaagaatgacgatggtgtctattaaaatgaaaataccttcaagatgtattgttaagtgaataagagatgggttaaaaataagagtatgtaaaattaagactataaattgctaagaaaatttaaaaaataaacaaggccaggtgtcatggcttacacctgtaatcccagtaatttgggaggccaaaacagggggattgcttgaagccagaagtttgagaccagtctgggcaacaaagcaagaccctgtctctacaaaaaaaaaaaaaaaaaaaaatttagccggccatggcaacgtgcacctgtaatcccagcttctcaggaggttaagtccaggagtttgaggctgtagtgagctatgattgtgccactaccctctagcctggacaacagagtgagaccgtgtctctaaaaaaaacagaaataaaaaaccaaaaaggttaagaatataaaaactttctaaagacatataagaaactaataaaataatttatccagagtgagggtagaggaaggaatgatgcagactagagcagaagtaggagaaagcttttattatgtacctctttatattattttttgaaccatctgaatgcattttatgcaaaaattttaaggtaaaagtaaattattttaaaaatgatggcagcaaaaaggttaatagaaatagacatgtttgagcaagactgggaaatggcagaaaattccaagggaaagagatagacataaggtaacttcaagtttacaaaggatataatgccataggcaacaagcaccagacaaattactctagtgcaaagaaaagtaattaaactgtgcagcaacatttaaacagctgaagcataagtaaaatattagcacaggagaagaggcagtagaagaattagattttatgtttaacacattaaaatgaaaagattttaattaaagctgttatttaaagctacaaaaacattttaaatgaagaatatatattgtaaatcacatccattctttatatattctcgacctctacttcagtctttctataaaaccaacacatgtacattccatccatgtcaagaaaagtcattttttatcttagtgacttacatggtgcaacatatgtatgaaaacaactttagatctgggatttgactgtgttatgtaaatgaactaatattgttaaagtgacagtagaactcccataatcttgtctgaaggtaacagactgccatgtatcaaatattgtcattgtttttcttcaactctttttgttatataggtaagacatgttcactgtagcaaaaaaaaaaaaaatgggttttgtgccattactcataccttttgctttagttagttaaacattttcagtggatactactaggcatctctgtggctgtatccactcattagtccattttaaaacaatttaataagtgcccattctaccacaagctatgtagcgaatgggtatctgaagagtaagcaagtagtgatagtttatgagtttttgactgttggtatgcttccaaaagaaggcaccaaaagacatttgtgatgcccacattacttagaaatgtagggaaatcttagtatttgaaactcttatgtcctagaatcttaagaaacctctggattgagatggtgatgttaggcagctcttgcagttgacttcaatgctagctaggctactttctccaagcagtgagaaagtcctaaagagtcttgcttcattttattccaacttctggagtttttaaaccagcattgtttgtgttcttccatatgtagaaactatctctaaacctatcctctcattttccagtttagaaggtgctttcagatatttaggatcttattagttactttcaaattagtattccaatcaaaacgagttgaaataaaaacctgtctgtcctttaacactttgattatagtttatgtacttctatttacatgggtaaaatgtatagtcactaggaataacatgtcaacacatcttgattgaaatcgccactttgaatttttctatcatgtttctagtatgaaaaaaaacttcatttagcttcatagtagcttcatagcagttggaatagttgtatattatgtgttttctgtatacataaactgaactataatttgaaaaagttcttcaaggtcaccttgtcacttgcagagtgacaaattatcctgatttgctgattctcatcttagtgttcctgatactgctgcactgggagaaaatttacatactttcctaaagcttactttctcagacttcttgttcttctggccttgagtaattcccagatccagttttcctgtcaaacctccaaagaagtactgaagggtttctttctcataggtcagattcaggatttgaacccaaagcttctttctttaaatacactgttttttctttatcatacctctcaaacatagtagagcagccttgaagattttgttttaaaatctacatggctgtggaattttgttttaaatatgattatgtttcctacaatcatcttcattttctaatcatcttcatctcttctctgactcccatttttaccaagtcatgaaaatacaagcatctgctttccatgaatagatcagagatctcacaagcctagattcccatggaaaccaatcaaaaactaaaaggaaaagaaagagtatatattgaatttcgatgaaacctacagcttgtttttcattagactcatgctggtttcttttaaactctgggcacagggccagcaaatatttttatggctggtaaaaagggacttcaaatccatttactttcatttaaccgtttaaaaattaattttgtatataacatcaattctaaagaaaatttgagcattaattttctaattaccttatgtcatagggccattatttgtttatgtaatttcctcttcttgttttttctcctacccatagtttatgactcataaaaggatgagagggaatcaggatgattattattcctatagtgtgaatattgtcaacacttgggcacgacatttttcctatgaccaatcataggaccaataaaggaggtctctttgtacctcctttagctgttaagctttcacaaggtgcaaatgatcatttacaaatgtgacaacagatgataactaaaatgccaaagtgagggggattaagagaaccagagaggggatggctggggaggacaggttgtaattttaaattaagcaatcaaaatagtattcagtgagacaggttgtaattttaaattaagcaatcaaaatagtattcagtgagatggtgacatgtgaagcaagacttaaaggaggtgagaactttagccatgtgaacacctgagggaagagcattcattccaggcagaagaaacagtcagaacaaaggccttcagatgggagcatgcctagaatttttgcaaaataacaagaaaattagtataaattagtcttcatgcctttaatcccagcactttgggagaccaaggcgggagggtcacttgagcccaagagtttgagaccagcctggtcaacatagggagactccatctctacaaaaaaatttttaaaaattcgccaggcatggtggtgcatgcctgtggtcctagccactcaggaggctgagatgggagtatcacttgagtccaggaggttgaggctgcagtaagccataatcacaccactgcattccagcctggacaacagagtgagaccctgtctaaaaaaataataataaatatatatataccttataatgaatgagcaaaaggaaagcgctaagagatgaagaaagagaaagaatggtggcctgatcctgtagggccttataggccattgtcaagaatatgttttcactctgaatgagatgaggagggtttgaggaaagacgtgacatggtctgacttatgtatttataaaagaatcattctggccaagtgaagacattttcctccagttttagtactatctattccttcacccattcctcatataatatgctttcaagtttccttctcatcctgatcattttcaccagatatgcacatatttgtctaaattcccttgaaaatgtgatacctacaacagaatacaatgccagtctgatgagctcagagtgttacatgactataactgttgacattttagcaacaaaatacagctgattcatatttaagatttttcaaataaaaactctaaatctgctttatacttacaactgcctaaactacgtcctatattaatatggccgtggttgttggacccaaaggcagcatcttattgtatccatattttgaactttcccagacatacttaggtaaaattgaccattgtatcctttgttcctccagtaccttgtgtactcaaccactgttataccaccttttacactgaaatatatttatttgtttacatgttttatttctccacagatgatgaacatcttaatatgtaagagtgtcttagtcatcttatttccaatatctagtagtacttaacgacactcaatcaatgcttgctgaattgaattgggttcatcatgtaacctacccaggtcctcttgattcttgagtcggccattcagtatagttgtcatctctcccacttatgagtcaccaagattctcatcctaatctttgatattaaaatagatactgcttatagaaaaccttaatcattgaaacactagtactaaaataaacttcactaatttaaaaagttgttttattcatttattatacttgtctaaattatgtcgtcagtattaactcagcctcttgaaaaattttgtataatctatcagaatccacttgctcaccattccaattctgatgggtatgtcattcatttattcattcattcatttgttcaacagataaatttttagtatttaatatgtatcaggcattacactatatctcaaagtattttaaattcaacctttgtctaaatatgtggtctttcagattttataatagtaaaattaacatttcaccaatataactactcattttcaggcaatttattagacatatactcatagtttatcttaaacaattacagatttcagaagatatggtttgggtccttttattcaagtctttcctgtcactttgtcagtcatctcttttcaagccattttcttttaaggaatttgggctgaaatattagactgtactttgaagtaatgactgtaaacttcatgtatgtaactttggttatttcagtgttgtacagattgttaactaattgtgtgtgtgtgtgtgtgtgtgtgtgtacaggtgcacacaggtgcatgctttaaattgttatttaattggattataatgcttacacatattgtaaaatgttaaacataccaagaaggtttgcagtgaagaatctcggtgtaaggaaaactttctatctgcaagtcaaaatatagaagtgataggaaaaagactaataaatatggctacatagtgataagaaagactttttccttccagaaaatgtggcaagcaaagttaaaaaaaaaaaaagacaaattggaaacaatatttgcaaattatatcattatcaaaggtttaatactcctcatatataaggtggagaagaaaaagaccaatgatcctataaaaatgagtaagagtatatctagatagttcacagaaaaggaaatggcccttcaatatatgaaaatatgctcaatattgttcgtcataaaagaaatacaaattaaaatcacaaagagataacatgcttcatgtctcagattggcaaaactccaaaagtttgacaacatgttctgatggcaaaactgtagggaaatgagcattcacatatccctgaaggaaatggaaatggtttccttagcctgttttgtgttgcaataacagaataccacagactgggtaatttataaggaaggaaatttatttctcccaattctggagactgggaagtccaatatcaagttatcagcatctgctgagggacttcaagctgtgtcattccacagtggaaagcagaaggacaaaagagggcaagaacaagtgagggaaaagggggaccaaactcacttatatcaggaacctactcccatgaaaacagcagtaatccattcataagggcagagccccaatggcctaatcacctgttagggatcccacctcgatactgtcataacgatgattaaatttcaacatgaattttggagggacattcaaaccatagcattggtataacgcttatggagggaaacataacaatatccagcaaaattaaccagaatatgcatttacctttgatctgtcacttctgggaatctattctatacatatgtggtaaaaacaagaaatgtatacacagggttatttaattgcagcattatttgtagtagagaaagcttgaaagcaaatgcactttttttgttgtttttgtttttgagacaggatctcactctgttacccagactggagtgcagtggcacaatcatggctcactgcaatctcgacatttttgggcttagtgaatcatcccaccttaggctcctgagtagctgggattataggtgtgtgccaccacaaccgactaattttttttttttttttttttttttttttgtagagatgggttttcaccaagttgcccacactagtctcaaacttgggctcaagccatctgccctcttcagcctcccaaagtgctgggattacaggtgtgtccaccgtgccctgcctgcaaatgtacttttagagagctggctacataaaaagagtatattcacacaatggaatgctatgcatctgtaagaagtaatgagaaatgtttttatataacattataaaatgatctggaatgaaaaaagcaagcgcagaatattgtgtatgatattctctattttatatataactatgaagtgacctccaggtttattgttaagagaaaaaagtaaggtgctaaagagcatgtgtaaccttttttccaggaaagaggagaaaaatattttcttatatttttaaaagatagaagagtaaatgaaaaatgaatgaagactcttacctaaagggagaaggagataatgtagaggacacagggatcgaagctagtcttatctgagtatatcttgttctatagttttgattttggaacttcgtaaattatttccataattataaagtttaagtgtctacagcctggatgcagtggctcacgcctgtaatcccagcactttgggaggtcaaggtgggcggatcacttgaggtcaggagttcaagaccagcctggccaacatggtgaaaccccatctctactaaaaatacaaaaattagcagccaggcctggtggcacagtaatcctagctactcgggaggctgaggcacaagaattgcttgaacccgggaggcagaggttgcagagagccgagatagtgccattgcactccagcctgggcaacagagtgagactccatctcaaaaaaaaaaaaaagaaaatgagcagtccttaaagattgatagacaaataaaacaaagacacctgtgtattaagttggtagcttaactgcagagagaattattcaagtgaatttattattttttatttttattttttatattttgagatggagtctcgctctttcacccagggtggagtgtagtggtacaatcttggctcactgcatcctccacctcccaggatcaagtgattctcctgcctgcacctccctagtagctgggattacaggcacgcaccaccatgcccagctaattttttgtatttttagtagagatggggttttaccatgttggccaggctggtctcaaactcctgacctcaagtgatccacccaccttggcctcccaaagtgctgggattataggcgtcagccactgggcccagcccaagtgactttaaaacatagtaaatttgactctgcagtcctggtaggaaacatcctaaggacaaagacagctacaaagaaatcctaaaatgtgttcagtaaacatactgttagtaataatactgttactgttatcttgacacaacacaaataagtggatcactatataaaggtaagatgaagcaagtgaatatgtcaatttcattagtaaccaagattttcaataagaagtatacaaatataaactattgatatatgtgtctgctaaaaatttatatttctgaatttcatagcactagctactgaaaaagcctagaagtaatgactaaccccatgaaggatcacctccatcacccagattgtgtctctcaataccactaaaaggaatcagaactccttagagaagtggctgcttagaaattgggacaagtaatatatgaaatgagcctggctcatctggtcatgctggatggcaagatatctaacaaagcctactggagtcatgtcaaagggccacagaagccgtgttaaaggagcttccaaagatggacaatttgagtagcaaaaatacagttgcttcaatggaaacaaacatgttaaaactccatgagttaggaatactttttttttttttttttttttgagacagggtctcactctgtctctcagtctggagtgcagtggtgcggtctcggctcactgctacctctgtctcctgggttcaagcaattctccagcctaagcctcccaagtagctgggtttaaaagcatgagtcactgcacctggctattttttttgtatttttggtagagatggggttttgccatgttgcccaaagtggtctctaattcctgacctcaaatgatctgcctgcctcagcctcccaaggtgctagtgtatttaaaatacagttgtttttatgtgtttcagtttaacttcccctccttcccatccttattgatttaactttttcaaaagttgaaactacatgaaaagataggtttacaagtttcagtcacttccatgtcctgtctgtctcattttccctgtcttttgaggacaatcaactatattgatttctggtttacccttcatatgtttcatatatgtatgtttccttgttgcctctttttcttctaatatatgctcttgtgcttcagatagtattaagatttttaaaccagataaaaaaggaagaaaaaagcagtaaaagtttacatgttccttgactctagattctgtgactagaaatggaccttataaaccactcaaactaatatatatgtatatatacatatatatatatacacacacacacatatatatatagggatattcattcatcattgtttataatggcaaaatacaggtaaattattcattgttaaatataatctatttttcatacagtggaatactttttagccactttaaaaaattaatctatatgtactatcatggaaagatctccagggtatactgttaactgaaaaaaaagctagctgcagaagaatatgtatagtagaaacctgtttttataaataaataatttttaaaataaccacagttatacatatgtatcatatagattgcaaaaatttaaagaaatagtaaaaatttcttttttttctttttttttttttttgaggcagagtctcacactgttgcccaggctggagtgcagtggcacaatctcggctcactgcaagctccgcctcctgggttcacgccattctcctgcctcagcctcccaagtagctgggactacaggcgcctgccaccacgcctggctaattttttttgtatttttagtagagacggggtttcaccgtgttagccaggatggtctcgatctcctggcctcgtgatccgcccgcctcggcctcccaaagtgctgggattacagcgtgagccaccgtgcccggccaagaaatagcagaaatgtcttatagtggtattatgagaaaactcatagtttaaattataggaaaacattttcacaagaggcatgcattattttagtctgaaaaaagttcaaaaacagactttttaaaaattctaaattttattttgagccagactttcctgccacccttcaatggtgacaattccttgcaattcctgcagttccttacatgttttattttctttgaaatttaactgagtttcagatctttggcttcaaagaggagactaaatcctgttttccttcatttcccaaatcatttttcattatctcctacaacaaaatgctaccttttctgacacttttatggtctccttttaaatgtttctaatgcagaagaagcttacttgttctcaccacccatttgttaaatttattttcatatctcttagtatttcttaatgtggtgtatatcacagaacatttgtcactcaataagggcatagcatatccaatttttcattccagtttttattattctgccatctgtattgcttttatttgggaagtttcctatttgtaaagaatgatagtttttctttcctcttagtagatctatcttgtttatattctcatgtttagtgaagacctcataggatatattttagctgatcaggggaattctattatctcttttctgtagcataaatattacattccattcttaaaatattgatttgattggtaatgcaaaaagctttagcactccagaaaaaaatatattttcatttataactttcaatgacagagttcttattacacttcaattctctaagtatattgaataaagagtagagaattgttcttggagttggacctatattgattctagtccctgctcatttatttattagctctgtgacatttatctctttaattctgagtttcctcatctgaaaatgagaataataatgatacctatattaccacattcctatgagaatgaaatgaactggtgcccacaaacttcttacttagctcagttcctggcaccaaaatagtgcccagtgaatattaactattataattatcatctagtccatgctctggactaaatactttggggaatacaaaggtgagcaaagttaactctgatggagtagatgagctgtatttatgctatagtttgaatatttgtcccctccaaatcccgcgttgaaatttgatccccagtggttggaagaggggcctaatgggaggtgtttgggtcatgggagcagatctctcatgaatggcttggtgccagaggtaatgagtgaattctcgctctattagttcatgtgatagctggttgtttagaagagcctggcatccttccccgttctctctctccctctctctctcttgcctgctgtctaccatgtgacatagctgctgctccttcaccatcccccatgattagaagcttcctgaggtccttattagaagcagatactggcaccatgcatttagtagagcctgcagaaccataagccaaataaacctgttttttaaataaattgcccagcctccggtattcctttataaaaatacaaatggactaagacaatctacaaagaattcaagtataaggtagaatgcatatgtgctagagaagaatacaaacaaaatggtatggaaagatagaggaagggaatattcaatgagaagttttagggaaggtttcatgaaggagagagaatttgaactagatattgaaaaatcagaattaattttcaaaggcttggagataaatagtatattctgcagagataaccaagtaaatgacatacagatagtcaatggctctgagtggctctactagctacatctttttatgttaataggttttttacttttttcagagaaaattatatccagcatttttaatctttagactaataacaccaggtagacacaaagctattcctggaacattgctttattatagataggaattccataaccaattacctcctatttgctagaacacactaacacaaatacataaaaaatacagactaaactataatagaaggcagttttctctggtgtttgtagcacctctcttctactaatttaaaatatcttcatcactgaggatgcctcctattaaaatgttatatctgagttatactaataactatgaaattaccaggtgtctctgcttgagtagttggaattaatttttttgcctcataactctggagacttctcagaaagtgtagctaaaggtttattcatcaaaatccccttctaatgaatcgactctgatgattctgctgttgtcagaatggatgttctaggaagttgtcatcacacttgaccgtaatgaaaatgctgccctggaccatctccccaaactatgtgtcctcagtattgtgggaagaacccacttcatgatttctaaccagggtagcctctggaagtacaaatgattgctgtaaaattatgaacagagcagcatcaggctttgctctgatgtatcttatgaagcctttctacttccaaatgaagactatgaagagaaccttgaaacaatgcccttctgggagctcattcagcaagcatattctgagggcatattctgttccactctctacgcatggaggattcttgtggtgaggaagacattcttcattggttttaaagagctcaccatttagcacagtcagccgctgagacaggactgctagataactacagaggttatgcattgcaccatttgtacacctcgtacaaccctatgaggtagccctcagggttcaaatggaatgcatctatattttgaatacagagtgatatataataacaagaaatcctggatgtctaattgactgtcttcccaaacagcatagcagattacctttttagtctcatcatttatgtgcagattatgaaacacatttattagtcaatagagtcccttcctgcatttatacattctcctcataactcagttgttctacttcacttccataaggctgacttgcaagtctgaatttatagttgtgttctctttcctaaatttagttcagttatctccctccataatttacatttaaatatcccactgtaacctaaaacatagcttcctttgttaatttccccgttgttacgaagaaaagtattattcctcagtaatttgggctcaaaatattaccctaatctttgactccttctgtcttcctcagtcccaagacacatcaaaggctgatcaaagttagccgggcatggtggtgggcacctgtaaccccagctactcaggaggctgaggcaggagactcacttgaacccgggaggcggaggttgcagtgagctgagatcacaccactacactccagcctgggtgacagagtgagactctgtctcaaaaaaaaaaaaaaaaaaaaaagctctgttgatcttgtttgtcaatcatcccacatttattgttttcttcccattccctttactaccatttagtctaggcagttgtcttcttatgacaaaaatttcataaattggctgggcatggtgtaatcccagcacgcctgtaatcccagcactttgggaggccgagttggggggatcacctgcaataaggagtttcagaccagtctggccaacatggtgaaactctatctgtaccaaaaatacaaaaattagctgggtgtggtggtgggcacctgtaatcccagctattcgggagactgaggcaagataatcgcttaaactcaggagacgagatcgcaccactgcactccagcccagcctggacgacagagcaagacttccatctcaaaaaaaaaaaaaaaaaaaaaaaaaaaacctcataaattgagtgttgtgctccaaaagaatttgaatatgatctactttaattttgtcagtctgccagaagtgggccttataattcgttccttaggagaactcacgaaaggtaggaaattgaggaaatttgggtgttaggaaggttttgaagttagtttacaaagaacataattggagccccagtgactaagaccataatgctgttgagtggctggccagatggatggatggatggatggatggatggatgggtgggtggatgaacatcaattttctagaccttggggcagaaggttaggattggattgcaggagcaagacagaaaactgaattacattatctggtcaggcttcgcttaggttgatttaactcttgctaatctcactaatgagttagacttaaatcttgccttgattagagtcaaggtaagccccaaaactgaaggaaggagagcataccctacagatagagaacttcaactgggaaaattggaaggtcacaaggaccccagaagataattatcaatcccattcattgtttgtcaactaaaaaaacttcaaactaaaacctccagagtaataaacagttagacttcctgcaaggagcatctcacacagaagatagagcctggaagaaaaggctgggaactgacatgaagcaccatgtaggccacaaaaaggagccggaaataatagactaaatggtataataataagtaacgggctggtagcacaatcaactagagttcagaaatgcagtctatgctctaactgatttcctttcctgaaatatttcatatttgcttgggtggctctatagtcatttgggtccatcatggaaatttgtatcattaatacacattttctgttaatacgaataacataaaagtggcttagatgacaagcacatctattattttacacatcaagcagtcttacataacaagaggtaatatccagggttgattaactcagtggctcaatgatattagcaaggacctgggtttttaaatctttattctccgctgtaatcaggatgttggcttatactcttaagctagctttccttggagttaatttcaaggtggctgcctaaatttcaggcattgcatatagaccacaatatctagaagcagaaaaatcaaatacccgtatcttgtttatcttttcaacatggaaaatcttctcagaagccctgtggcagatgctctttccattcctttgattcccaggcctaatcctatcccttggcaaggaaaatgaaaacttcctgattgctatgtcattcaaagtcaccttggcgggcaccagtaatcccagctactcaggaggctgaggcagagaattgcttgaacctgggaggcggaggttgcagtgagccgagatcatgccactgcactccagcctgggtgacagagcaagactccatctcaaaaaaaaaaaaagtcaccttctgagtttggcaaggacccagccttctctgaaggacatatctacttaaaaggagaccaaccaatatcagggttctgttggcctaaaagcctagaagaggatgggcatatatattagccaggcaatccatggtgtcagccacaatgtctgttggacacttacagagccttgtgaacctaactactttcaaaagcaatggccataggctgtaggtcaccttcatggaattccatctagtggcattgccctttagctctaggctacaagaaaaccagctctacagactctttcttgccactggggtgaccctaacttttaccctaacttgatgttctttctatttttttttttttttttttagcaaatgtgcatatttcctcccaaatgctcccaaatgaggaaacagtcaaatcacttagctgttccagtaacaaacgcgggcaccacctcacatgttgttaccccacaaacttaactgagaagtgtagtgataaaaagcaatcatctagtctctgaattcagaatttaaaaagcaatgatctgaaaattgaaagaattcatttaataacaagatatttattgagcacctactaatcataaggtactgctctatatatgtgggatatagcagtgaacaaaacaaaacaaaaatccctgacttcaaagatcttacattttgttggtgggaaacaaaccaataaacaagcgaatacatttttaaagtatatattatatcagatggggatacatgctatggaaaaaaaataagacaggtgagggtgatagggagtgtagggatttgcaaatataaatagggtgatcagggtagacctcacttaagaaagtaatatttaagcaaatacttaaagattatgaaggaacaaacctttctgggagagaatatgccaagtgcaaggtccagaaatgggcacgtgctttgtatttacaagaaacagttagcaaggaggccactgtggctctagtcaagtaaggatgagttcagagatcacagaaggcctgtatgctatttaatgattctacttttacgctgcacaagagggtatggttattgaagtgtttgagcacagaaaatatgatctagcttatattttgaaaggttcattctaactgctgtgttgaggatggactgtcaaaggatgaaagcagaagagagactaattaggaagctgagagttgatgttggcttggaccagaatggtagtggcagaggtggttagaagtccaattttatttttttctaatttgtttattttaattgacaaaaattgtatatatttatgtgtacaacatgatgttttgaaatgtgtatacattctggattgactaaattaattatgaggtagtacatatgttaattatatataactacctcatatttatacatggtgtcaacacttaaaatctactctcttagcaattttcaagcacataatacattgttattaactctagtcaccgtgttgtagccaatattaaatatatcttgaattttctgcaaattatagatgtgaaaggaagagtcaatgactttgacactaagttttttttttaagcctcattttttaaaatgttttcttaaggagaacttcaaacatattcaaaaatagaatagtaaaatgaccctccatgtatcatcactcagcttcagtaattaccaggtcatgctaatcttatttcctgtattccttcattaacttctcctcttcccatgttaaagcaaatctcagatattgcagggatatcattatatcaatatgtatttctaagaggaaatgaccttttaaaatgtaatcatgatagtacttttcaaaaaatgtaacaagaatcacttaatatcatagtatcataaaatggccaattgatgttccaattaccattgtctcataaatgtcataaatgtttttgtttatttacacatgtttgaattggattccaaataagagctatatattgtgattggctgatatgtcaagtcttttttaatctatagtttcaccctccatctctctttgtttcttttggctttttctttttttttttttttttacaactttttggctattgtggcttaacccctgccctaacttgatgtcttagtctagactgattgcctcagtaagatgattctcccttcaggtgtgataaacctattcctcagtcctatgtatttcctgtaaattagctgttggatctaaagacttgatctgattattgttcaattttttttttcttttttaaatttctcatttttatgggtatttagtaggtatatgtatttatggggtacatgtaatgttttgatacaggcatacaatgtgtcatagtcatatcagggtaagtggggtatttatcacctcaagcatttatcattttttgttagaattactgttcaatttttggcaaactgttttattattatggtacattcattcttaggagggacataatgtttcactgtgtctgtttttatgatgttaacaattagtggtgctcagtgcctagagcccattgttcattaggagttgcaaaatgctgatactttaattctaccatctatcctacagttattagctggaataattcattaaagagaaacttccccatatctactattagattactcaatggtacagttcatataggaaaggaaggatgaatgcttgattctccctctttatttaccaatttttaaaataatgaattggtttcctggcatcctcctaggataatcaattaattttttttcatttttaatatcattatgaacaaggcctagaattttttagtatcattttaacatatttactatatcaatccattgaagttattatccttaattagtattcaaattactctgtttttggcctgtgggaggcctgtcaagtagacttcttgatccatttgacatgagcctagtatttgatagcttacttgctatctgctatgtccaaatattccagattcatttctatattttttgttttagacctggaatcagctatttctccaatagctttacttttagtaggaaaaagtatttggagaacacaatctaggatctagggtgctcactgctaccaggttggtgattgtttctaggcttttatagtggacagagcttgcggatttttttaagcaataaaaatatttcatcacttcctattctaattctgggctaaaaggttttaaacttaacctcttcttacatctctactccttttgctcacccagtcaagaatgatagaatatcacattgtctagatgaaaaacctgagatgcaagagcttgagtaatttatcattaaatggcagaaccagggttcaaatatgtatctgtttgactctaaagtctgtgcttaaagtcatctttagaaaatttgtgtttagccagagctcctttgggaagcctaggcaggatgaggggttgagcccaggagttcaagaccagccctggcaacataggaagaccccatctctacaaacaacaacaacaaaacaaaacaaaaactagccaggcatggtggtacatgcctgttgtcccagctactcaagaagctgaggtggaaggaccacttgagcctgggaggtcagggctgctgggagccgtgctcccaccactgtactctagcctgggcaagagaatgagaccttgtttaagaaaaaaaagaagccacagatcccttgctgcaaggcgtagcatttttagcagaactgccaggtagagaattcaattcaactaacacacactgagcacctattaatatttttatacaaagtcctgttcacctgtatgatactggtgtctattaacaaatttgatttgttgatttatctacaaacctagatttatccagaatgcaaccacttttctcaacattccctttaccaccactttggtcctagccaccatcatgttgggttagattattgtagtaaccttgcttggataattataatagtgtcctaactggtctcctggtttctgctcttgccccctgcagtctatgcccaacatatcaaccagaatgatcctttaaaacttaagtcaaagcatgtcagtcctctgctccagaccctttaaaggattttccagttgagcgcagtggcttacaccagcactttgggaaaccaaggcaggcagatcacttgaggttaggagttcaagaccagcctggccaacatggcgaaaccccatctctactaaaaatacaaaatttacccagatacggtggtgtgtgcctgtagtcccagctacaccagaggctggggtacaagaatcacttgaacctgggagttggagtttgcagtgagccaagatcactgcactccagcctgggtggcagagggagactctatctcaaaaaaaaaaaaagattttccatctcagagtaaaagactaagtatttcctgtgatctatcaagccttttatttcatgttctgaattctgttgtttgtatgaccttatttctaatcttccacatatttcctccacatacaccactctgacctcagtgctgttcctctagtaggtgagtcaagctctcaccacaggtttttgcatttgttcttccctctcctaggaatgctgttccagtaggaatctctgtgttgaactcccttgctttcattagtttcttattcaagtcactgtctcagtgaacccttttctggcaatcctatctaatacccacctcacctcacacattgtattctccctactctgctttatgtcttttcttagcacttaacactatctaaaatactatatattttacttatttatcttgcttattgtcttttgccccactataatataaactccctgaagttggggttttatttttggtctgtttattcactaatttatccccattgcctagaactagtagttggtgctcaaaaaatatttgttgaatgaatgagtgtacttctaaagttatagctttaataattctcccaggtgatccacgatttcttacatgatgcatatattgtgggcaaaaaacatactatgagattccagttgtctaatattagaatatttttaaaggaagaataatcctgttttgctatctttctttttcttatacaatccttcctccccaccccagcgactcctgcttgtacttcatagaatatttcctctcttggaactagatatttctttctcttttctttctttttttttcttctggttaaatagccacagactgtccatttgagctgactcttgctggaaagtgagtcagtgcagcctagtggagagcagaggctggagcatttgcatctccagaatgtttgtattgacaaatggcagtcagttattgacatttttatcccttggtgatacttcaattggcttatctttgctggtcaaatgccttaattgttctggcctttaattcagtcaaagttggagctagagcagaggggaaagagaaggagccagactaacagaacatcaagcttgagctgggaggctgctggcaacgatcagcctgtcataatgttatgatttgttcatttttataccatttattagcctttacttgttgtgccatttggcctccagggcagataaagtgctgtctaatttggtaggtttgcttctgtcagagcagcctcgacagggaaggtgttagctgcagtgacaaataatcaatagctgtcgttgtcatgaggaacgtgagcagttgggcctttcatctggaggattagaggtctaattggattgagaatagggagggtgggctgttgggtaaccctgtcagccttgtgaagctgtcaaatatcggccttattcatggtgaagggaataaggaaccttgtgctttcagaactgaggagaaaggcatgtgaaagccctttatacaaaggaatagctcctgaagttgattcagctaacatatgcttccttttaaacttaattaaatatccctttagataataaatctatggaactttaaatgacatttttaaggttggatgtgtaatatacacacacattcacatataacgctatacaaatccaggttggttcttttgtctttgctgatgccagaagataaaccacttgaatggaggtgaaaaatgaaactttatgagagaaattgcataagttgtcatctcattgtcagaattaacaagtgataagcatttttaatactattaatagaaaaaataagtgagacattaaactgatagattagttaataatgaagtatggatatgtgacagttatttttctcccctggtcatttagaaatgtggtttcctataaaacaaatctttcatttattccaacctgaactaatccaaaaaatgaagaattatgcattggctaaattacttcttcaaaggaatgcctaattttttcttccttagcaagtgacaggattgcatttaagtgatatcaatggtatcatgtccaactcagtcccaaaatgtttttgtatatccctacatacttacgctgtactcctttacatttatggtataatgccatcatttggagtatgaatggagaaggtatttgagaaaaatgagttagctcgttctctaatctatggagctcttaatactacctctgcaaggccaagtaaatgactttaaattccactaaatttcatagaaattgagcaaatttaataatgataaatgttaaacacaattttataaaaaaagtataaacttctttatgagtccattctctatgtacaaattaaattcagtgcattgctgttgtccaaaagcaggtataattttaaaaaatgtttttacaatgtggtaggtactaagagcatttgtaagcatcctctatacagtatatctttatgaaagccctgaataaaggtgagttgacagtaatgccaagagtatgtgaataggcatttctaacttatggattatatacttagtccatttctataaacccatggtcccttttctatagtcattcaaagcccagctaaccaatttgaaataacttcaaaaaatactccaaaagaactaaatgtgtgtacaaaagacactagatggatgaacctggttatctcattgggcccttcaaaccctgaggtccatactatttattaccattacaaatgtttcattaagttcttcctgatcagtgctggtttgaaaattctatgattttactcacttgtgtaatccacagtgaaggtcagcaaaattctcaatactactgactaagaatttagaattatggttatctaaagaacttgctttgcttgatctaaactagaaatatttaaaatttcaaacaattatttgtgattacagaaatttctcagatttcatgcagttcttctagagctctatctgtggaagtatagttgtgagtacatttatacttaagcagaattactcataggaaatggtaaggtcagccaaacacaatggctcacatctataatcccagcactctgggagaccaaggccagaggatcagttgagcccaggagtttgagaccagcctcagcaacatagtgagaccctgtctgtacaaaaaaaaaaaaaaaaaatttaaattagcagtcatgttggttcacagctgtggtcccagctacttgggaggctgagagggaggattgcttgagcctaggaggttgaggctgcagcaagctgtaatcacaccactgccctccagcttgggtgacagagcaagattctgtctcaaaaaaaaaataaaataaaaaaggaaatggtaagatcagatttgatatccttgcaaaagaagttcaaagtttaaataggtttaaataggtttgtgtttggggttttgatcagaacatactttctatgacctataaacaaaattgttgctcttgaggttagatgagaatattttgttgctttgtaactccttataatccttattattcactcaacaaatatttgtgcaaaagccactgtgctaagttatggaaatacaaccatgacagggactatcctgccctcagagaagttcatagtttaatggggacaacagacaagctaaatgggtaatgaaaatgtagtattcctgtgttaaatgctaggaaaggagtaagcctaggtatatcataggaaaatgtaagagaggcatctaagccatcctggggtgttgtggtgaagaatggcttccttcaatagatagcaactatgctaagtggagaggagaaaagagagaggaagcccattcccaaggagtattccctccattcccttggagtattctcaaggagggaaagaatatgtacagtcacatgccacataatgacattttgtttaacttcagaccacatatacaatggtggtcccatgagccgtcacacccagcctgttttttatctttcatagaatatttttactgtattttttctatgtttagatacgtttagacacatgaatacttaccattgtgttatatttacctagagtattcaatatagtaatatactgtacaggtttgtagtctaggagcatcaggttataccatatagcctaggtgtgtaataagttataacatctaggtttgtgtatactatgatgttcacactatgacaaaatcacctaatgatacattttgcagaacatattcccattgttaagcaacatatgactatagctcaatatgtatgtattattgactatgaggtagaaaacgtggagagatgatattggataagtaaagtgggatcagaccatgaagtgtctgtcctacatggaggacaataaataaatttgaatatttactgaagagttagatttaaaacttgaatattatttaaattggactaaatgaaagggatttgcaactaactcaccactgcccttctgatcaccaaattcatatacctttcctacttcctcatacctcttgacaaaattggtacattttaccttctttatgattttctccatgcatctctttcttttctctgatgtatatcaagtatatcattggcaaaagcattggactgatataaatcagaagacctagattcatgacttaggctctgcttctttctaacggtgattttaggcaagttttaagtttaaatactctggacttctgtttcctattttttaaatttgtggcaatacttaggttcttacaggagttaaataaattaatatatttgaaaggactctgtaaaacctttgattatgttaagggacacatagtctaaagagtcctgacttagatcacaaaatgataaggcccttgagcatgtaaaaaaaaaaatgtattcaagcagattgaagttaaaattaagaaatgtcaaccaaaacacttaggtaacagttctaagaataacattggacccttacttatgaatcttagcccttattatcccataattattcatgaacaaatttacccctgttattctatgagcttctagaatacagaatcctatcaaatttatctttatatcttcctacaatgccttgcacaaaataggtgctaaataaataccttcaaggaatgaaacaatgaattcttgtagagtcagaattcgttctggatacagtttaatatctaacatacttggatcattttgttttctatttttcagttttgtgaagatgtttaaaaatactactacttctctaaaatcttttatttttccaactttggaatctattaatgagatatagcatttaactcagcaagaaaggacagaagcttggtactggtctcatctacttggacaaggaaagctctaagagaagctggttacagaggttcagcaggaggggacattgagctgcacaaagattatagtttacctgtaatcaagggcagctattgttagcacaagatttaaaaacaagtagatagagagtcagataatacttgtgagtccactacaggtaggcagtggtcaacttgaaattctgtccaagagtaggagggttccaatcaccagcaagaatagagcttaagattgagtggctattcgacccagtgagtcagattattagttcaatagagtgaattggctgcatgggggaaaatatgaaagcccagtgataatcactagatttgaaatcactagataccaagtcccaggttataatagttggatggatggctcaaggtgtgtgctttcttagtggtcagtgcagggctaccattgtcttagaataacttagttagaaggatgaagatgattgagatggcctaagtacttctcacatcatcaagattgatacagcagtactcaaccatctagaaagccttttaaagtagcaatggcttttgaaaatggtgtagtagctcctattggatcagccctccagtagataacatttataaactctgaacaaaatataaaaacaactatctggaggaattgaagagtgaccaagtaggcagaaattgcattgtaatcagcccttggaagaccgtaagaagaggatagcactgggtgagtttccacttttataacagggcctactcagttcttcaaagaggatgaaaactgagtagaaatctgcattcttactttttgaagaatcaaaggacagcatttggggcaatggctgtaagtcagaagagatgtttcaggctgggtgcagtggctcacacctgtaatcccagcactttgggaggccaaggcaggtggatcacttgaggtagggagttcgagactagcctggccaacatggtgaaaccccgtctctactaaaaatacaaaaaattagctgggcatggtggtgcatgcctataatcccagctactcaggaggctgagacaggagaatcgcttgaacccgggaggcagaggttgcggtgagccaagatcatgtccttgcactccagcctgggagacagagtgagacttcatctcaaaaaagaagaaaaatgaaaaacagaagagattttccagaacagagaaattcatataagggaaggcctaacctctacatataaactgccaaaatctctgactaacccctaacctaaacatagatggggaaaaattcaggcagccaagctaaggctaaaataactcatcagcgatttagctgctgcctgcctatgcaggaaaaacataatttagagtttgggttcagccaaggtatctgcctgctaaaacaaaaaatgaatagtcttcagcataacataacagaatccagaatctttacaacacatcattttcagtgtctaagatattctcaaatattgctagacatgaggacaaacagtaaactgtgttccatactcatgagaaaaagtaacaatggagaacaactatctttgttgttccagattttaatgagcagacaaggaatttaaagcaggtcttttaactctgcttaaggatgcaaagaaaaatatgttcgtaatgaataaacagataggatgtcttgcagaaaaatagaaactctataaaaagaactaatggaaattctagaactgaaaactacaatatctaaagattcactagaagggcttatcagcagattggagatgaagagtcagtgaacttaaagatagatcaatagaaattaaccaatctttaaaaaaaaaaagaagcgaatatactaagaaaaaagtgagtctcagtgatttgtaggacaatattgaaagaccaaactgtttgtaattacaaagataggagagagagaatggggcagaaaaataattaagaaaatgatggccaaaaattgcccaaacttggtgaaagacatacatttaaatattcaagaaacgtaatgaactccaataagataaatacaaagaaaatcttggccaggcatggtagctcatgcctgtaatcctgcactttgggaggctgaggcaggcagaccacctgaggtcaggagttggagatcagcctggctaacatggtgaaaccccatctctactaaaaatacaaaattagctgggcatggtggtgcgtgcctgtaatcccagctactcgggaggctgaggcaggagaatcacttgaacccaggaggaggaggttgcagtgagccagaatcatgccactgcactccagcctgggcgacagagtgagatgctgtctccgaaaaaaagaaaatctcacctgaaaataccataatcaaattgctgaaaaccaaagatgaagagaaactcttaaaagcagccaaagggctgaactgagctggttgccttctgttactgtgggagaactcacttcatcccaacttcttcatactttcacttctggagctcatattcctctgacatcttccagaaaaacagtcttaaagccttagccttttttacagtccagctcttaaattttttcctcccctttttcaataataacatgagtgtgcatccagcttgtccccaaaacctgccttgctctgaagcatccaactgtaaagactctttgccaatgtctgtgatttgtgggcccaaaacaaactatccatccttgcatatatcttctgctgagatgcctcacacagagtctggacagctctaattctttcacgagtcccaaaggcagacaactcacttctgcagagaagagcaccgcaaaaaaggaagacaaagtcctggtcaagaaacagatgaccagaactgtgttctcttccacccagctgtgtgtactcagtgatagatttcagagacagaaatacctcagcctccagcagatgcaagaactttacagcatcctgaatcttagctacaaacaggttaagacttggttccagaaccagagaataaaatataagaggtggcagaaaaacagctgcccaaagaatagcaatggtgtgactccaaaggcctgagcacctacctaccccagcctctattcttcctgcctccaaggatgcttggcgaacatgtctgggaacctttcaatgcagagcaaccagacctgtagcagttcggcctggggcaaccagacctggaacatccagtcctagaacagccattcctgaacactcagacctggtgcacccaatcctggaacaatcaggcctggaacaatcccttctatagctgtggagaggaatctctgcaagtcctgcatgcggttccagcaaattcttctctcagtgacttggaggctgccttggaaactgctgaagaaagctacaatggaatacagcagaccactaggtattttagtactccacaaaccatagatttattcctaaactattccaagaacatgcagcctgaagatatgtaaagatgagtgaaactgatattactcaatttcagtctgggcactggctgaatccttcctctcccctcctgcctccctcataggattttacttgtttggaagctacatgttctgccttcatatctttgtttcctttatgcctatcaagtcgattttgtggagggtggggtatgattggagccaaatcagagagttttctttttttcctatgggatctttctggagaaaaaaggttttaataaccttggctgctaaggacaacatgatagaagctgtctctggctatagataagtagatataatactagtttgaatatctttaggatttagaacctagcgtcaagaataggaagtaaaagtacaaattgatgtggtgaaggtatagtcccattttctgggattgggggtctttgcttatttttatttttatttatttatttagagacggagtctcgcactgctgcctgggctagagtgcagtggtgcgatctcagctcactgcagcctccaccttccgggttgatgtgattctcctgcctcagcctcccaagtagctaggattacaggcacataccaccacacccagctattttgttgtatttttaatagacactgggtttcactatgttggccagactggtcttgaactcctgaccttgtgatccgcccgcctcagcctcccaaagtgctaggattacaccatgagccaccgtgcctggccttacttactgttaaaaacccaattattaaggtgaaggattaagctgtaacatacttcactgatttcatcagcccctttggctctgtgttttactatagcccctaattggttggttatgctaatatttatagacagcggtcttgtatttgctacatcacaatgacatcagtactagtttgcctggtttaagtacaaatgaataaaacaaccatatcacctttaaaaaaaaaaaaaagcagccaaagaaaaagacatgatgatgccctaaccaagggaaaccgtgaggcactgtgccatgagcaacggtgcattccggtccagatactacgcttttcccacaatctttgcaacccacagatcaggagattcccttgggtgcctacaccaccagggccctgggtttcaagcaaaaaaccgggcggccatttgggcagacaccaagctacctgtgggagtttttcttcataccccagtggtgcctgggaatgtcagcgagagagcaccattctctcccctggaaagggggctgaagtcagggagccaagtggtctagctcagcagatcccactcccacggagcccagcaagctaagatccactgactcgaaattcttgctgccatcacagcagtctgaagtcgacctgggacactctagcttggtggggggaggggcgtcccccattactgaggcttcagtaggcagttttcccctcacagtgtaaacaaagccaccaggaagctcaaactgggtggagctcaccacaattcagcaaagctactgcagccagactgcctctctagattcctcctctcttggcagggcatctctgaaagaaaggcagaagccccagtcaggggcttatagataaaactcccatctgcctgggacagagcacctgagggaaggggcagctgtggatgcatcttcagcagacttaaatgttcctgcctgctggctctgaagagagcagcagatctcccaacacagcgctcgagctctgctaagggaaagactgcctcttcaagtgggtccctgattccggtgcctcctgactgggagacacctcccagcaggggccgacagacacctcatacaggacagctctggcttgcatctggcaggtgcccctctggaacgaagcttccagaggaaggaacaggcagcaatctttgctgttctgcagtctttgctgcagatacctaggcaaacagggtctggagtggactttcatcaaactccagcaaacctgtagaataggggcctgactattagaaggaaaactaacaaaaataaaagaataacatcaacatcaacaaaaaggatgtgcacactgaaaccccatccaaaggtcaccaacatagaagaccaaaggtagataaatccatgaagatgaggaaaaaccaatgcaaaaagcctgaaaattccaaaaaccagaacacctcttcttctgcaaaggatcacaactcctcaccagcaagggaacaaaactggacagagaatgagtttgatgaattgacagaagtaggcttcagaaggtgggcaataataaactcctctgagctttttctgtaaaggagcatgttctaacccaatgcaagaaagctaagaaccttgaaaaaaggttagaggaattgctaactagaataaccagtttagagaagaacataaataacctgatggagctaaaaaaacacagcaggagaactttgtgaagcacacgcaagtatcaatagctgaatcaatcaaatcgaagaaagaatatcagagactgaagatcaacttaatgaaataaagtgtgaagacaagattagagaaaaaaagaatgaaaaggaatgcacaaagactccaagaaatataggactatgtgaaaagaccaaatctatgtttgattggtgtacctgaaagtgacggggagaatggaaccaaattggaaaacactcttcaggatattatccgggagaactttccccacctagcaagagaccaacattcaaattcaggaaatactgagaacaccactaggatactcctcaagaagaggaactccaagaaacataatcgtcagattcaccaagagtgaaatgaagggaaaaatgttaagggcagccagagagaaaggtcaggttacccacaagggaagcccatcagactaacggtggatctctctacagaaaccctacaagccagaagagagtgagggtcaatattcaacattcttgaagaaaagaattttcaacacagaatttcatatccagccaaactaagcttcataagcgaaggagaaataaaatcctttacagagaagcaaatgcagagagattttgtcaccaccaggcctggcttacaagagttcctgaaggaggcactaactatggaaaggaaaaactggttgcagccactgcaaaaacataccaaattgtaaagaccatcgacactgtgaagaaactgcatcaacgaataggcaaaataaccaggtagcatcacaatgacaggatcaaattcacagataacgatattaaccttaaatgtaaatggtctaaatgccccaattaaaagacacagactggcaaattggataaagagtcaagacccattggtgtgctgtaattcaggagacccatctcacgtgcaaagacacacacaggctgaaaataaagggatagaggaatatttaccaagcaaatggaaagcaaaaaaaaaaagcaggggttgcaatcctagtctctgataaaacagactttaaaccaacaaagatcaaaaaagacaaacaagggcattacataatggtaaaggaatcaatgcaacaagaagagctaaatatcctaaatatatatgcacccaatacagaaccacccagattcataaagcaagttctcagagacctacaaagagacttaggctcccacacaataataataggagacttgaacaccccactgtcaatattagaaagatcaatgcaacagaaaattaacaagaatattcaggacttgaactcagctctggaccaaggagacctaataaacatctacagaactctccaccccatatcaacagaatatacattcttctcagtaccacattgcacttattctaaaattgaccacataattggaagtaaaacactcctcagcaaatgcaaaagaatggaaatcgtaacagtctctcagaccacagtgcaatcaaattggaactcaggattaagaaactcactcagaaccacacaactacatggaaactgaacaacctgctcctgaatgactactgggtaaataatgaaattaaggtagaaataaataagttccttgaaaccaataagagcaaagacacaacgtgctagaatctctgggacacagctaaagcagtgtttagagggaaatttatagcactaaatgcccacaggagaaagtgggaaagatctaaaatcgacaccctaacatcacaattaaaagaactagagaagcaagagcaaacaaattcagaagacaagaaataactaagatcagagcagaactaaaggagatagagacacgaaaaacccttcaaaaaatcaagaatccaggagctggtttttttttaaaagattaacaacaggtagaccaccacccagactaataaagaagaaaagagaaaagaataaaatagacacaataaaaaatgataaaggggatataaccactgatcccacagaaatacagactaccatcagagaataccagaaacacctctacgcaaataaactagaaaatctagaagaaattggtaaattcctggacacatacaccctcctaagactaaaccaggaagaagtcgaatccctgaatagaccaataacaagttctgaaattgaggcagtaattaatagcctagcaacctccaaaaacccaggaccagacagattcacagttgaattctaccagaggtacagaaaggagctggtaccattccttctgaaaccattccaatcaatagaaaaagagggactcctccctacctcattttatgaggccagcatcatcctgacaccaaaacctggcagagacacaacaaaaaaagaaaatttcaggccaatatccctgatgaacattgatgtgaaaatcctcaataaaatactggctaactgaatccagcagcacatcaaaaagcttatccaccatgatcaagtcagcttcacccctgggatgcaaggctggttcaacatacacaaatcaataaacataatccatcacataaacagaaccaatgacaaaaccacatgattatctcaatagatgcagaaaaggccttcaataaaattcaacaccccttcatgctaaaaactctcaaaaaactaggtaatgatggaatgtatctcaaaataataagacctacttatgacaaacccacagccaatgtcatactgaatgggcaaaaactggaagcattccctttgaaaactggcacatgacaaggatgccctctctcaccactcctgtattggaagttctggccagggcaatcaggcaaaagaaagaaataaagggtattcaaataggaagagaggaagccaaattgtttctgtttgcagatgacatgattgtatatttagaaaatcccatcatctcaacccaaaatctccttaagctgataagcaacttcagcaaagtctcgggatacaaaatcaatgtgcaaaactcccaagcattcctatacaccaataatagacaaacagctaaatcatgagtgaactcctattcacaattgctacaaagagaataaaatacctaggaatacaactatcaagtgatgtgaaagacctcttcaaggagagctataaaccactgctcaaagaaataagagatgacacaaacaaatagaaaaacattccatactcatagataggaagaatcaatatgatgaaaatggccatactgcccaaagcaatttatagattcagtgctatccccatcaagctaccattgactttcttcacagaattagaaaaaactactttaaatttcgtatggaaccaaaaaagagcccatatagccaagacaatcctaagcaaaaagaacaaagctggagacatcatgctacctgacttcgaactacactacaagcctacagtaaccaaaacagcatgattctggtaccaaaacagagatatagaccaatggaacagaatagaggcctcagaaataacccaacacatctacaaccatctaatctttgacaaacctgacaaaaacaagcaatggggaaaggattccctatttaataaatggtgttgggaaaatggctagccatatgcagaaaactgaaactggaccccttccttacaccttatacaaaaattaactcaagatggattaaagacttaaacgtaagacctaaaaccataaaaacgctagaagaaaacctagacaataccattcaggacagaggcatgggcaaagatttcatgactaaaacaccaaaagcaatggcaacaaaagccaaaattgacaagtgggatctaattaaactaaagagctttggcacagcaaaagacactatcagcagagtgaacaggcaacctataaaatgggaggaaatgtttgcaatctatccatctgacaaagggctaatatccagaatgtacaaggaacttaaacttacaagaaaaaaacaaccccatcaaaaagtgggcgaagtatataaacagacacgtctcaaaaaacagacactgtcttcaaaagacgacattattgcggccaacaaacacatgaaaaaaagctcatcatcactagtcattagagaaatgcaaattaaaaccacaacgagataccaccatctcatgccagttagaatggcgatcattaaaaagtcaggaaacaacaggtgctggagaggatgtggagaaataggaatgcttttacactattggtggagtgtaaattagttcaacctttgtgaagacagtgtggcgattcctcaaggatctagaaccagaaatactatttaacccagtaatcccattactggatatatgcccaaaggattataaatcattctacgataaagacacatgcacacatatgtttattgcagcactattcacaataagacttggaaccaacccaaatgcccatcagtgatagactggataaagaaaatgtggcacatatacaccatggaatactatgcagccataaaaaggatgagttcatgtcctttccagggacatggattaaactggaaaccatcattctcagcaaactaacacaggaacagaaaaccaaacaccgcatgttctcactcataaatgggagttgaacaatgagaacacatggatacagggaggggaacatcacatactggggcctgccgggggatgaggggtaagaggaggcatagcattaggagaaatacctaatgtagatgacaggttgatgggtgcaacaaaccaccatggcacgtgtatacctatgtaaccaacctgcacgttctgcacatgtatctcaaaatttaaagtataattaaaaaaagaaaagacatgatccaatatagtaaagcatgaatacaggtgacaacatactcttcagtatcaataggcacatgcagacagtaaaataatcgctttaaaatgctgaaaggaaaaactgtcaatctagaattctgtatctggtaaaactatctttccagaataaaactgaaataaggacaaacaaaactaagataatttatcccaaacaaacctatattaaaagaaataatggtcgggcacagtggcttacgcctgtaatcccagcactttgggagactgaggagggcagatcacctgagctcagcatttcaagactgccctgggcaacatggtgaaacctcgtctctactaaaatacaaaacattagctgggtgtggtgatgcgcctgtagtcccagctactcgggaggctgaggcatgagaattgcttgagtccaggaggcagaggttgcagtgagccgagatcgcgccactgtactccagcctgggcaacagagtgaaactctgtttcagggaaaaaaaaaaaaaaaaaaaaaagcaccagaaaagataaataggtagctaaagataaacaattattttttcttaatttctttaaaattaatattgctatttaaagcaaaaattataaaactattatggaatttatagtaaatataggtataatacatatatatgatatctacagcataaagtatggggtggggataatgcaactatacaattgcaagggtcttgcattttgtataaagtgatacaacattaactctaaatagactttgtaaagttatggatatgaactataatacttggaggaaatactaaaataataatgcaatgaagtatcgctttttttaattcaagagaaaaaattttaaaggaattcttaaaaattgcttgagtttcacttcccaagattctaattcaattggtctgaggtagaaaccagacagtaatgctttttaaaagctcctcacctgattctaatatgtttaaaatgccagtgttgggaatgtttctagcagtgctaaatcaaagttattggatgtagttgtataagagagaagtatatgttgcatgtaacagagagtatatgttgctggaaaaccatgcagatcaccagagcactgttttacctcactgaaaagcattagttcctgtgaatccatagaccacttgcttcgtgttgatgacaaagtcctcaccattttgtaaaaaaatgaagaaaagatcattgtagtatttaacatatataggtttgtgtagtatttaacatataggtttgtgcatgtctgtgcacctatagtctgtatgtaataagtctgtcttcctgttactacagttcttgaaaatagttgggtggccttttgctacattgggaagacatatttagaataatatgacttcgtatataggctacatggtatacaaaaaaatgcatgtgggggaaagtaaggggagcactcaaagagatctttcagagcatctcaagcagagattcaataagaggcctatttaagaggtcattggaagggagatgccataattcttaaagacattgcatgcaggaaaaaacagtgattttgaatatttgccacaaatggaaaatgacaggagtagatactcaagttacaattaatttgtgatcctttgctataaagctatttcttacctgggcaattctgtgtaatgcatgccatagatttattgattgtcagttattaatgattttcctcaggcacgaaagatgtaaatagatgttggtgaaaagctaccagctgtcctttcaggaaggacagtcctttatttcctttttgagggcttacacttttttatgaaataatgttgataatagatttactttttaaaatgaacttagattgcaaaaatgtaaactttatactgtcatctttatatttgttccaataatattttttaatgattattattattgagttaaaatgtgcatacaagaatgtacagaaaaatatacaattagatatgtgtaataaatgtacctactcacatcaccaccaccacagtcaggacataaaacatttaggcaacaccagaaagttccttttttccccactttcaaccagtcaccacctccatggttaacaccattatgatttttaacacaaaagattagttttacctgttcttgaagtttttataaatagaattttttttttgctgtctacaagagaaacacttcattttgtatatgcatagaaatatatatatatatatatatatatatatatatatatatatattcattttagtagcttttatagtgcaagtggtttttggttacatggatgaattgtgtagtggtgaagtctaagattttagtgcacccatcacctgaatagtgtatgttgtacccaatatgtagctttttattcctctgcccactctcacccttcccctttctgagtccccaaagtacattatatcactctgtatgcctttgcataaccatagcttagcttccacttataagtgagaacatacagtatttgatgttccattcctgagttgcttcacttagaataatggcctcctccatccaagttgctacaaggacattatttcttcctttttatggctgagtagtatgccattgtatatatgttccacattttcttcatctgctcatcagttgatgggcacttaggttgattccatatctttgcaactgtgaattgtgctgcaatatacatatgcatgcagatgtctttttaatgacttactttcctcggggtaaatacccagtagtagaattgctggatcaaatgggtcaaatggtagatctacttttagttccttgagaaatcttcacgttgttttccatacaggttgtactaattttttttttctttgagatggagtttcactccgtcacccaggctggagtgcagtagcgcaatctcagctcactgcatccttcacctcccgggttttaaacaattctctgcctcagccccctcagtagctgggattacaggcacccaccaccacgcctggctaattttttttgtatttttagtagagacggggtttcaccatcttggccaggctgattttgaactcctgacatcatgatccacccacctcagcctcccaaagtgctgggattacaggcatgaatgaccaaccgagcccagccaggttgtactaatttacattcctgccagcagcatataaagtgttcccctttcaccccattcatgccaacatctcttgttttttgactgtttaataatggctgttctggctgggctatggtgatattatctcattgtggttttaatttgcatttcctgatgattagtgatgtttagcattttttccagatgttggccatttgtatatcttttttgagatgtctattcatgtcatttgcttactttttaatgggattatttgggttttttccttgctgatttgagtttcttgtggattctggttattagttctttgtcagatgcatagcttagaaatatgttcttccattttgtgggttgtctgtttactctgaaaattatttttttcactgagcagaagctttttatttttattaggtctcatttatttttgtttttgttaaatttgctttggggggtcttagtcataaatttttgcctagactattgtctggaagagttttccctaggttttcttcaagaatttttatggtttcaggtcttagatttcagtcattcatccatcttgagttgatttttgtatatggtgagagatagggatccagtttcttttttctacatgtgcgtatccagttttcccagcatcttttattgaatagggtgttttttccccaatttatgtttttgtatgctttgtcaaagatcagttgtaagtatttgactttatttctgggttctctattctgttccattggtctgtacatctattttcataccagtaccatgttgttttaattactatagccttgtaatataatttgaaggcaggtaattgtgatgcctccagatttgttctttttgctgaggattgctttggctgtccagactcttttttggttctatatgaattttaggattgttacttattctgtgaaaaatgatgttggtatttttatcagaattacattgaatctgtagattgctttgggcagtatggtcatttttacaatactgatgcttccagtcaatgagcgtgggatgtgtttccatttgtttgtatcatctatgatttctttttttttttttttttttgagacaaagtctcactctgtcacccaggctggagggcagtggcgtgatctcagctcaccacaacctccgcctcccaggttcaagcgattctcctgcctcagcctcctgagtagctgggattacagatgtgtgccaccacacccagctaatttttgtatttttagtacggatgaggtttcaccatgttggccaggctggtctcaaactcctaagctcaggtgatgcacagcctcccaaagtgctgggattataggcgtgagccactgcatccagcctcatctatgatttctttcagcagtgttttatagttcatcttgtagagatctttcatctttctggttaagtatattcccagttttttgttttgttttggtggtggtgttgttttgcagctatttcaaaagggatttagttcatgatttgatgctctgcatggtcactgttggtgtatagcagtgctactaatttgtgtacattgattttgtaacctgagatataattggattcatttatcaaatctaggattcttttggaggagtctttagggttttgtaggtgtacaatcatatcattggcaaagagagatagtttgaccttctcatttccaatttggatgtcctttctttctttctcgtgctgattgctctggttaggacttccagtactatgctgaatagaaatgatgaaagtgggcatccttgtcttgttccggttcttccagggaatgctttctaattttccccattcattaagatattggttgtgggtttgtcatatgtggcttccttctatacttagacggaacatacctcaaaataataatgtgttgagggtttttttataaagaaatgctagattttattgaatgctttttctgtgtctattgagatgattgtatgttttttatttttaattccatttatgtgatgaatcgtacttattgacttgcaaatgttaaagcatccctgcagccctggatgaaacccagggtgaattatctttttgatatgctgttggattcagtttgctggtattttgctgagggtttttgcatccatgttcatcagggctattggtctgtagtttctttcttttttttttttttttgtccgttagatcctttcctggtcttggtatcagggtgatactggctttgtagaatgagatagggaggattacctctttctcaatcttttggaatagtttcagtaatattgataccaatttttctttgaatatctggtagaatttggctgtgaatccatctgaccttgggcgttttttgttgttgttgttggcaatttttaaaattactgagtcaatctcattgcttgttattggtttgttcaggatttctgtttcttcctaattgaagatggggggctgtgtatttccaggaatttatccatttcctctagatttcctactttgtgtgcatagaggtgttcacagtagtctcaaatgatcttttgtatatctgtgatgtctttttgtatttctgtgttacagatattgctgtagtgtctccacgttcatttctaatggaacttatttgcatcttctttttttttttttttttttttggttaatatagctaatggtctatcaatcttgtttaccttgtcaaaaacacaggtttttgtttcattggttcttttatattgtttatgtttgtttgtttcaatttcatttgattctgctctgatctttgttatttcttttcttttgctagtttgggtttttgtttgttcttgtttctttacttccttgaagtgtgacaataggttgtcaatttgtgatctttcagactttttgatttaggcatttagtgctaaaaactttcctcttactactgcttttgctgtatctcggaggctttaataactgtgtcactattattcatttcaaagaattttttaatttccatcttgatttcattgttaactcagaaataattcaggagaaaattgtttaattttcattacttgtataattctgagaggtccttttggagttgatttctagtttttctccactatggtctgaaaagatacttgtttaccttattgatacttgattatctttgatatgattttgaattttaaaaatttagtgagacttattttgttgcctatcatgtgttctatcttggagaatgttccatttgctgataagaagtatgtgtattcttttttcttttatttatttatttgtttgtttttttttaatagacgggggtcttgccatgtcggccaggttggtcttgaactcctggtttcaagcaatctgcctgcctcaccctcccaaagtgctaggattacaggcgtgagccactgtgcccagcaaagtatggggtagaattttctgtattggttaggtccatttgttgtagagtgcagtttaagtcctgtgtttctttgttgactttctgcctggatgatctgtctagtgctgtcagtggagtgttgaagtcccccactattattgtgtttctgtccaactctgggagctccagagttaggtgcatatatatttaggattgtaatatcttcttgttggattgatccttttatcactatataatgactttctttgtctttttttcttttaaccattgttgctttaaagtctgttttgttaacatcagaatagctactcttgcctgcttttggtttccatttgcttggaatatctgtttccaccctttaccttgagtctgtaagaatctttacatgttaagtgagtctcttgaatacagcagatatttggtttgtaatttttcaaccattctgtcagtggaggatatagaccatttacatttaacgttaatattgagatgtgaagtactatttcagtcatcattgttgactgttaacctactttgttttcttcatgtgttattgttttataggctctgagttttatgctttcaagatgttctattctggtgcatattgaccttttgtttcaagatttagagctccttttagtatttcttgtagagctggtctagtagtgacaaattctctcagtatttgctcatccgaaaaaaaactttttttctccttcatttatgaaacttagttttgctggatacaaaattcttggctgacaattattctgttgaaggaggctaaagataggaccctaatcctttctggcttgtaaagtttctgctgagaaggctgttgttggtctaataagttttcctttataggttacctgatgcttttgtcttactgctcttagaattctttccttcatgttgattttagataccctgataattatatgccttggtgatgtcctttttgttttcttttttttttcttctgagacagagtctcactctgttacccaggctggaatgcagtggcatgatcatggctcactgcagccttgacctcctgggctcaagcaatcctcccaccttagcctcctgagtagctgggactataggcatatgccaccacatcaggctaattttttaattttttatagagatgggttctctctatgttgcccaagctggtctcaaactcctggtctcaagtagtcctcccacctcggcctcccgaagtggtattacaggcattagctactgggtccagctggtgatatcctttttgtaatgaatctcccaggagttctttcagtttctcgtgtttggttatctaaatctctagcaaggtcagggaagttctccttaattattccctcagataagttttccaaattttttgtttgtcttctccctcaggaacactagtgattctttggtttggcaattttacataatcccatatgttttggagactttattcatttcttttaattatattttctttactcttgtctgattgggttaattcaaaagctttgtctccaagctctgaaatttttcttctactagttctagtctattgttaaaactttcctgtgcattttttaattctctaaatgtgtctttcattttcaaaagttctgattggtttttctttaaaatatccatctctagaaaatttatcactcatatcctgaattatttttttaacttcactatgttggttttcacctttctcttgcatctccttgagtagcttaacaatcaaccttttgggttctttatctggtatttcaaagatttcatcttggtttggatccattgctggagagttagtgtgatcttttgtgggtactgtagaaccctgttttgtcatattgtcagaattatttttctggttccttctcacttgggtagactatttcttctagtatttttgaatttatttttcattcaactgtgttttttaatttttttattcccccttaaggatgtaactttaatgtttacagtttattatagcccaatttggctcttgatgatttccggtgtgaagactctgagttccttggttatagagaatctttgtctgatggctttctcagatgctgtttgtagtagcaaggtgcttggtgtgtgagcaggttcactgtcttaagttttccatctggctcacagggtagaccgcagcccaccatttctttcagagggtctgtgatttctgtcagttttcctgttaagttcctgtgttgcttcttgaacaaaagttcacagtatgactctctacacactcttttgtctttccaagtaggggaggcatgctaacaatgctttcagtccaccatcttggggaaaaaagagtgtgtgtgtgtgtgtgtgtgtgtgtgtgtgtgtgtaaatggaataatgcagtatgtattcttctgtgtctaggatctttcactcaatatttttgagatttatccatattgttgcacatatcatagcttattctttctctgttgctgaattatattctgttgcacaaatatatcataatttgtttatacattcatgggatgatggacatttgggttggttacagtctttagctattatgagagaatcttatgaataaactgaaaaaattaacactcttgtacaagtctttttgtggacatttgtactcatcaaataaatacctaaaagtgcaatgatctttaatagtgcctgcatattttttgctttagtagatactgcctaatggttttccaaaatgttgctaccactttacactctgaccaacaacacagtatgtgagagtttcagatgccatatatcttgggcaatatttcgttttgtcagtccttttactttgagcatttctagtgtgtttctcatttttgttttaatttgcatttacctaatgactgatgaagttgagtaattttcatatgcttaataataatttatatattttcttttgtgaagttgtgtgctcaagtcctttacccatttttttctgtattatttttagatgctactacaataagacactaaccaaagtttttaaataagatttcagattagattacctatgataccaatgtcttttttttttttttttctgatacaggattttactctgtcacccacactgaagtgcagtggtagaagcatagctcactgcagccttgaactcctgagttaagcattcctcccacctcagcctcctgagtagctggtactacaggcatgtgccaccatacccagctaatttttaaaatttttttgtagagatggggtgtcgctatgttgcccaggctggtcttatactgctggccatgaacaattctcccaccttggctgcccaaagtgctgggattacatgcatcagtcattgcgcccagtcagcaatatattttgattgattttttaaatctcttttgcacagattctttataaaaattttgcaaaaatatacataacatgaaatttgccattttaaccatttttgagtatactattcagtggcattaagcacattcacagcattgtgccaccatccccactattccttctgcgtatttagtattttcttgaatgtaattgatatgtaacaaattacatatatctcagatgtgtaatttgataagttgtaccatatttacacatcttcaaaagtttcctcatgaccatttgttatcctttcttcaaaccactctctgcctccaccctccctccccaagcaaccagtgatctgttttctgtcacaacagattgatttgcattttcaagaattttatgtaagtgaaatcatataaaactattctttttgcctagcttctttcactcagtataattattttgaaattcattcatgttattattgcatataccaatgatttatatattatcattgttcagtattattctattgtatggatatattacaaattgttctcaagctcctggtctcaagtgatcctcctgactcagcctcctaaagtgctgggattgcaggcatgaacaaggtaaaagtttcaagtttacaggcgtaagcaacagcacctagccttggatacactacagattgtttaaccatttgcctgttggtgaacatttgggttgttttctgttttgggctattactaatgaagatggtaagaacattcatctgtaagcatatgctttcatttctcttgggtaaatcattataaatgtaatggctgggtcatatagcaggtgtacgtttaacttttaagaaaatggtgaacagttttccaaagtgcttgtactattttactttcccactgatagtgaatgaaagttctatttcctccataccctcactttcttatgaggatactttgtatagtcagtctttttcatttgagccattctaaataaagccatttattccatttaggtttgtagtggtattaatttgcatttctctaatgacaaatgatgctgagatcttttcgtgtgcttgtcatttgtaggtctttgatctttttgcattgatcttgtttctgcaaacttgctaaagttcttcattcattctattagtcgtttcatagattttttagtctcctacataaacaatcgtcttatatataaattaaaatgagggttttttttttcaaatctttatgcccttctttcctcccttctttcctttcttccttcttttctttttttcagccttatttaactggctaacacctccattacaaatttaaatagaagtgattagagtagacatccttgccttatttctgatcttaggaagaaagcatgtagtatttcaccactaaacatgaaattaacttcaatttttaaaagatgtccttgagctaaagaatacaggaataacaaatgtagggggaagctactacctctgaggcttagggagagtatccaagggaggagcaaacttggaagctgagattcaggcctggtaggaatgagtgtggctgtgcccctggttggtgaagttcactggaatgccaagggccagagctagagagctggggctgatgagcagaaagttgcccactggggtagtggtgaaacttactggaatgtgagacccactgagtctcctatagacctccgacatctgcatcataggagcaaaaagagcacattggaaccagtgtgaagagccccttcctctgctattatttgtagtgtccctgctgcgcctgctacagataaagtcaaatattgtggcaactgcaaaggagaaattttcacagggtctagtctcacaaaacatggtaaagaagctgatttggagctgagaggcaaaaaactgataaatgatacactgattgaggaaactttcttttgattctagttcgctgagaatttaaaccaagagttggtgttgaatattgtcaaatgccttttctacatctattggaattatcatatagttgttgttctttatttattttgctcattatatcaattgtttaaaaaaatatatagagatggagtctcactgtgttgcccaggctacacttgaactcctaggctcaagcaatactcccacctcagcctctcgagtagctgggactacaggcacacaccccaccacacgcaacacatcaattgatttttttttttgagacgggagtctcgctttgttgctcaagctggagtgcagtgatgtgatctcggctcactgcagcctccaccttccaggttcaagcaattctcctggctcagcctcctgagtagttgggactacagctccgcaccaccacacctggctaatttttgtatttttagtagatacagcattccaccatgttggccaggctagtctcgaactcctaacctcaagtgatctgccctccttggcctcccaaaatgctgggattacaggcgtgagccaccacacctggccacatcaattgattttaaaatgtgaaaccaaccttgcacttctgggattaagtcctactttttatgtattgctcaatttaatttgctaatacattaaggatttttgcaacagtgttaaaaggaatattggtctatagtttagttgttttttttcttcttataatgtctttgtcaggttttcctatcaggatttgcagacttcataaaataagctgggaaactgtcttatcttcttctattatttataaagttgagtaagactggtaagattggaattatttatttcttaacttttttgtagaatttaccagtgaaaccatctagtcttgctggagttttttcttttcgatttggtaggaaggtgttttggcaacaaacctactttcttttatagatttagacttttcagattttatttcttcttacctccattttagtatgctgtctttttcaatgatttctccaaggcccctcaggaagaaatttagaacaaaaagtgatggtcagaattcagtcctcaattctcctttgtctgaggcctgtgtgatagctgttggcatttttcgtctggtgggagtttctgataaacaactcaagaacatatgttaagatgttatcttttagtttccatgggacatcagaataccttgtgactctggcttgcttcggaaactgtttttactaccttcttgcttatcaggttgctcatttacttttcaaggctagctgggtgcctggactttcccttgaagggactcaaaatggttcctttatttccatgctgaggggggcccagcaggtccctgaaaggggtcgctgttctatctcaatctttttctagcttcttatgctggaatcttaggtcaatgattttatataatcattattatgataaaattattataaaatattatatataatatataaatatattatttataattacctaattgtatacatagttttcttaaatacatataattatttaagcctgtgaaattttcctaaccactgctttagctgcaactcacaagttttgctatgttgcattttcttcaagtttgaaattctgaggggagaaaacacacttcacctgtttgggtttttttctgctctctcactcgacacaaaatcaacacagaagacttcagtgaccaaatatatggagacctctccaccagcaagcaagcagtcagttctgtagcagacacccagctggatatcccctaattcaattctaacactatctacccagagatggtatcagataccacagattgaagtctcagtgtccagactgcctcatgcttcagacaccagttacaagtcaaggccccctgaacttctgaccaaaccagcttcaagttggggttcctacaactccctgtctagtttcaattactttgctagagtggctcacataactcagggaaacatgtttactagtttattacaaaggatatattaaaagatacaaataaacagctggttgaagagatacatggtctgggtaccatagctcatgcctacaatcccagcactttgggaggttgaggcgagaggatcccttgatcccaggagttcaagaccagcctgggcaacattgcaaaacactgactctatcaaaataaataaataaaatagaaaaaagaaaagataagctgcataatgcaaggtatagaagggtcccaagcacaggagcttctgtctctgtggagtggggtgcaccaccctcccagcatatggatgaatttcttgttcaccttcctataagcctccacatattcagctatcctgtaccccatccttttgggccttttatggagacttcattggataggcatgattaacaaccatgtagaaatgtgattgggccaaaaaggtgtgatctaattgtaatagattgagggggaaacccattaaggcctgtctgttcagattcatcttggcctctctgcagcattccttcctccagggtatggggcaaagctcttttgaaacagaggtcttgtaacctacagtcagacaaggtaggtcagagaatttctttatggccagaggcagaggaagagtagagtatatttttagtttctaagggcctgccttggggagaaaaaggatcaggtgaaaggaaagcagaaggtcagagagagagattgttttctgaggcctgtttctgaggcctaaagcacccaacattttaacaaaagactgtaactaggtctgtgggagttaagagccagaaaccgtggacaaaaatctatgtctatatctatatcactgtcaaaatcagataattaaaatttatacaacattatcctcagaccctattattatcccaataatatccttaggtattaagttcagaatcacacattgcctttgtcaaacctatttagtgtccttcaatctagaaaagtttcttaatctttcctcaactttaatggtgttgacacatttgaagattgagggctagaatttttttttttttttttttttttttttttttttttttttttttttttttttggagacagtttcactcttcttgtgcaggctggagtgcaacggtgcgatcttggctcaccgcaacctctgtctcccgagttcaagcgattctcctgcctccaaagtagctgggattacaggcatgcaccaccaggtcccgctaattttgtatttgtaatagagacggggtttctccatgttggtcaggctggtctcgaactcctgacttcaggtgatccgccctcctcagcctcccaaagtactgggattacagacatgaagatgtgagccaccgtcgcctggcatttttttttttggagacagactcttgctctgtcgccaggctggagtgcagtggcatgatctcggctcactgcaacctccatctctggggttcaagcaattcttctgcctcagcctcccgtgtagctgggactacgggcatgcaccaccacgcctagctaatttttgtatttttaatagagacagggtttcaccatgttggccaggatggtctcaatctcctgaactcatgatccgcctgcctcagcctcccaaagtgctgggattacaggtgtgagccaccatgcctggccctggctacatattttatataatgtccctcaatttgggtttgttaggtatcttctcatgattagatttgtgttgtccacattcgcagagacgtcataggagtaatgctgtgttcttcctattgaatcctattatgtgtcacaaaattttgatgtttttcatcactaattacattcacttgctcacttaattaaggtacttgtaggctttttatctttataatcagtaaatattttgagggacagtactttgaaactatgtaaatgtcttattgtttactttatctgctactaatgtagccactccaactttcttatcactcatttcaggcaaatgtttttctattattactttcaacctatctgtgtctttatatttaaagtgtatctcttgtagacaacataagcatctcttatagactttcttttttatctagtctgacaatatctgcattttaattgaaacattagtccatttacatttaatgaattcttgatatggttgattttaagtttttcatcttattatttttattttgagccatctgttattgctcctttcaatctgttttctttttctcttttgcattaatcaaatttttaatttttcattttagttcttcaattggctctttacctatacctatgtattatttttaagaggttgctttagggtttacagtatgcatctttcacttaccgcattggaatattatactatgcctcagaaaacttaactatatcattttattgttttctggtagccatcggttccgatgagaagtacaccatcatccctgttgttcctatgtgtataatggtggtggttgtttttctgacttctttcagtgttttcttttttagctttggttttcaatagtttccctatcatgtgcatagaggtagttttctttatattaaccatgctttggattcactgagtttcttggatataaaagttgatatttttaccaaatttaaatcatttctcaaatactgttatctgttccattctctcttcttctgtgacaccaattacacataacattagacttttctatattgtcctacaggtcattgaggttctattgatttttgaaacattttttccttgtcttcaaatttaattatttctgttgatctaaactgaaatttattggcttgttcttctattttttagtctactattaagtccatgctatgatttttacatttcagatatagtactttccaattctggaacttccaattgtttctttttatgtaatttttctctgctgagattccctcatttgtttggtaattatgaccatctttttctgttaagtctttgaccatatttataaagctattgtaaattccttgtgtgctaattccaacatctgggttatcttaagatatctttattttggtttttttctcttgaaattgagtcctgtttttctgtttgtttgcatatggagtaattttttatagcatactcagaattgtggatgataccttgtagggactcttgattctgttatcttcctctaaagaatgttgactttttgttttgtaaaagttaaagctgactaattacactgaacttgttgagtgtctcggtttttcccttagtctagttgaatctattagaccaggtccacagtcctggtacatagtctatacttttaaggcatggcccttctgagatttcagtgggaagtctgaaatatgtactaagacctctaactaagtggaactcaaactccaaattctacccctatgccttgggtagtagctgaaatctctgatcagcttttcaactttccttttgtgggtttctgcagacatcttggagtctcccatacattgtcaattcagggatcagccaaggattttaagggagtctatatgcatatatggggcttcccctttttggctcttttacccatctcttttattccatcattttaatcttatttaccacatctaatgtctaaccaactgaagtagcctaccaatcttcctgattcaagtctttcccctctttaaaccattcttcacactgcggccagatttcattcactcatttactcatgtaacaaatagtcaatgagcactttcctaaaagacaatactgtcaagcagtcaagctactgcagctgctaggctggcttgccacatagattcagctgttaaaaagaccataagtccaaattgatttagacagtttattgcttatggcacagcaggtagcatgagcttcatgtctgcattggttctccttgcccccaagtcccataagggtggtatggaggcaggtccacgtagatgctgcaaaggcagagggtcagtgtcacacctgaggaaacttgaactttaaaaacctccaatcttacatcaaggctgtgagcaaacctgcctatcctttgccaccaaatgaaacattatctttattatcctggttagcaaacaaatctgtcctctaacctgaagggaggtaccatttttagcttccaaagcaactagttatgcagacgtctttgaaaagatagtccaaattaccagatatgcagaaacatgatggacaattgcttccaaacaagtacaaggagaaagcaaaccacttaggtcaagttttgagaatgatttcagagatatcagaaatgtgtccatctgctccccaaccccagttatcattctcctttccatctgcaaagataaaagaatctcaaccacttgctaattatagacataaatttccacaaaaggttttaaatatttcatcccacaacaagatataagactggaagccagaattaccttggaagtgttgggctagcactcctttacactaaactggaaaggtatagtctgcaaaagcaggcattacctgtttataattagcaatttatgtatactttaaacagctatccaaaggaattgagttaggtttaatcagaagagtaagagactagagacatgcactatggttctagctgcaagggccttacacccaagataaggagaatgggcgcatatacttaaagagggcataatcttacaagccagtgttagtatgctgagtgtcccatacaagcaagtctggccatagtgcttctcatattcagaggcgggtacagtcattagggggtgcttttatagaacatttcagtttccattattcttctgactgggtgttgaaaagcagttattacaatagtttttttttttttattttgacttcctgatgcatctgcagatgtgcactgaacttaatactgtagtcacaatggtgactttacatcattcagggagtcattccttaagcctagctagagtccttccacttactttataagtacataattccctgtattaaaatctttcctgcctaaaatacctaaatggcttctgtttcctgtactgaacctgcctaatacatggaggaattgaaatttcaggtggatcttaaagatatggtcaacttttgacatagaatgagaacccagagagaacttcaggcagagggaatagagtgagcaaagattaaaaggcagaaatggccatggcattttttagaaacattgaggaaactgattacagaagagaatgatagagtttcctgttatacaaatttctttatttcctatcaaatcctaaatgttttcatctctttttcttttccacttccttttcttctttctctcttccctctcctttctttccgcatatcacttgtctatcgctttaaccttccatgtcacacagtagcattcatagacattgcttacttattttgggggccttcagaattaaagaagttgctgcacctccaaagttttgttctttccactgaatattccactattaggtcagcaggctcattcttgaacttggctctattactaagcagtctcattcataaatttagtctccttagactaactagatttattgtgggctatcagaaatcctccccagatgtgcatgactgcacttggaagctttgagctttacagccctgtttactgccacctgattctaaccagagcaatatctcttatccattggcagaaaagagttaaggatgtgatagggaatttgagttagtggtaggcatgaaagtaatgtgatgggcttgtagaggatgagtgcaaggcatgttggaggcaataacatagatatttcaccatagctctcagcaaattatatctcctaaggtacaaagcataaagtccaacatacatttgatgtttagcatctatagtatttggtgagccattgtgaagcacataccagttacttttgataaagtagcttgaaagaactcttgatttttttttaaatgcttgcttcaaacataccctgtaattttgttttcctgccccatttactgttactcattctcaatcttttatattgcctattactcagtagctcgacttcttgttgttaataactgtagtctcgggtaactttttctttgtctttgtgaacatttttttctcaagtttattttatccaggctaggtatttaacagctctgtgtttcttataaaaagaaatacaaattataaaagctaaaatgaaccttgaaaaacatttactgcagcatttcccaaagcttcctttttttttttttttttttgaaacagagtctcactctatcatctaggctggagtgcagtggcatgatctaggctcactgtaaactctgcctccccagttcaagcgattctcctgcctcagccttccaagtagctgggattacaggcatgcgccaccatgcgtggctaatttttgtatttttagtagagacaggtttttaccatgttggccagattggtctcgaactcctgacctcaggtgatccgcccgcctcagcctcccaaagtgctgggcacgcccagccccaaatcttctttcttaaagtaatattcacatgtaatgttgtgtaaaaaaatgggtcccatggtcagataagtgtaggaactactgcatgtttctccttgaaaatttagcatgtataagcattctagaagctctgagaagttgcacagtgaagaaacccattaattttttaagtccaaaatttctcataatcatttgatcccaatgctttttttttccagcataaactaacagcatttaaggaaacagtgatctgtaaaacactttggtaaataaaatactagtttataacttaaatgaatttcctcatttcacaattgaggaaactgaggcccagaaagttgttttattcatcacaattaaaaacaatgccttacacaaagaaggtactaaataattgtttggtaaattgaatgatatatttatgtttagataactagttagagccaggactaaaacccagctgtcctgacaagttagacctatagcatttaataaggataatgcagttcacttctattcactgctatttaagctgatgataaaaacattttataattgctattaaaaaagcatcatatgctggtttaaaaggcaaactaaagaagttgaatagttggctgatgttttaaatcgacttagaccacaggtatctatctctttagtttttaacagtgtcaaatattggtctcttgatattgttcagagcactctgggttttgaaaaaacagttcaagtatgtgcaaaggcatctgaaaggggaattttctgaagctttttctactcccatgattctcacaaaattcttcaattcattctagtctagaaagtaatggatcttccataaagatgtgctaatcccaaggtgatcacaaaaaaaaagattttcccacctctgaacaggtttcttttgttgttgttgttgttttgctacttttttttaagtatgcttagcatgttataccaaaaataatgtttcttttttatataaaatattgtactatatatataagaaatacctcagaatttctgtttttaaggactccattttggcatgatattttttggtcattacctacttagctatgtcatattttaatatcaccaaagaaaatatcttaaaatgaaattcttgaattgcgcttgacctttccggttgacagtcagcttaaattatatagtatctcccattatctcacaacagatgtcatctcttaggaatgcttcctttcattgaagacactgtgacaataggaaagggatgtggggtgaaaaaaaagtcacgtatcttttgtttatctgcaaaagtctgtgcatagtttttattgctgaaaataaacatgtatcatgattggtgtatgggggttcacattagtatcagaagtttttatggccactctgctggtgacctagtatattgtgctgttttctcaactgcctttgtaaacacagtagccttaatagatcattttgaaagaagctgccatcctgctgcatctgttggtagcctttctcaggtttctgacatatccttaatctgatgctcagccttgtcatttggatcaatagtaaactagataagatgtcttctacttgcaaggctatggctataaaatgtatttgaaaaataaattcactttttatgtccatgccacaaacctggggagtactaatttgtcattctctctccatctgtctgtaaacagtcagttaaattggttattgatgagaagaaggtgaattatacttgaaacaagagtaatatagaaataaacttcatagtaaatgtcttagattcctacaaaaaggtgacatattttagctgttgtcttaactttaatctctagaataatgagcaatttgttttatattttctattccaaatcatcaataataattataattaattataattataaattatactttacaaaccactcacatatagtattcaatcttgataatctctataactatccattttacaatttgtaaagcatttatttattcaaaaaatgtttatgtagtgcctactataaatgaggcactgtgctaggcactacaaattctctatacaaaacaaaattgtgatgatagaacatgttagaattgtagcattttaatgttagaaggaatcctagaaatcatctactactaacttctcattttacaggaaactagatcttagacagtttgtgaatcatgctcaaccagctatttagtgactttttttctattataggatataaacagataatcttttaaaagtaaacccatagtttaatctttttgaatgtatatttcctcatctaagtagtgagaatacttctggttttcacaacaagaatactgtgaatattaagtaaggcatgagtagggagcattttgaaatttaaatataatctgaggataagaaacaactccttgtagacaagaggaaaagagtatgtaaaaatgtaaactgcgattacctcaggtttaagaggtgcaggctgatcactgttttcttctttatactttatttttgacattcctttaatggacatgttattacttttataacaaaaattttaagttttttttctttttttctaactttatgttttgatataatctcaaatttacagaaaagtttcaagaacagtacaaataattttcatatactctcaaattcctcaaatgtgcacattttgacacgtgtgctttatccttctctctactttgccttgatatatgggaatgtgtagatattgccttctgaatcatttggagtaagttgcaggtgtgatactcctttgcccctaaatttcagtgcatagtttctaaaaacaaggacattctcttacatagccacagctcaattatcacaatcaggcagttaacataaataatattatctcatccaaaaatcttacttagattttgcccattgtcccaacaatgtcatctatttaaaaaaaaaaaaatccaggatcaggcactccattcaatcatttatgtctttttagtcttcattaatctgcaacagtttttcagtcttttgtgtatgtatgtgtgtacttcatgatattcacatgttgtaagtatacaggccagttaaattgtacagtagccttcctttttaatttgtctgatatttccttataattagattcagattatgcacttttggtaagaataccacaggagtgatgttgtattcctctcagtgcctcatatcaggaagcatgtgtcatcaatttgtcccagtaatggtgttaattttggattattcacttgaataaaggagctcctgccaggttcctctgctgtgacgtcactattttttccattgtaactataaataataagtatcttgtgggagctaatttgaaactatataaatatcctggaaccgtccaacccactctattgttagcatcgtttgaccactcacacctgagttggttgttatgatgatggctgccacatgaaagagttatttatttattcattcattttttattttttgtttatttatttatttttcaggcagagtctcactctgtcacccaggctggaatgcagtggcactatcttggctcactgcaactgctgcctcctggattcaagcgattctcatgactcagcctcccaagtagctgggaatacaggcgtgcaccaccatgcctgctaatttttgtttttttagtagagatggggtttcgtcgtgttggccaggctaatctcaaactcctgacctcaggtgattcacctgcctcattctcccaaagtgctgggattataggtgtgacccactgtgcacagctgcacaagttatttttaaaaccactgcttatttaagatatacagttagatgtatacttagatgaaaactatgcaaatcctctctctttttaaacaaaaaaactaaaaaggattagaagagttttcacagaaatgctagcagagcttgtgttaggcttagggtaataaaattgttggtaaccttttttcttactttgttttcccaatttttaatagtttttcaaaattttcaatatatgtaaagcataaaatttctaatttttgaatgtgtttctaaaatttatgtttgtttatttccatttggtccacaaagggcttgagggagatactaaaatattgatttcagaattgtagtgtgcttgcacttgaaagaatagttagattacagttaaaacatagctataacaaacaggacatctaccctggcataaactacagattgacacaactaaaatagtctttaatctgcaaatctttattcctcacttcagccaccaagctgtagcattatgctttctcaactcggttgcttctcttagtttcaaataaaaaggtctaaaatggtggcagacagatgaagagcagtatagagttcagggattgacttgcagatggaggtatgttttgatataattttttaaagatggctaaatttgaaactagaagatacaattttgaattcaagcactcactgtgaggatttaggctaccattttgaaaatggataatagttactaagtcagattactagttatggtcagcatttgattaaaccctttaatgcatggtctgaatgaggttcattaaaggttttttagtataatcgaatttacttacacatttgtctgtatatttgtcttttcccaccatctaagaaatcccatccatagtgtggaactgaagtagagaaggcaaaagatggattcaatcagttgtttgaaacaggtcccccaaaggcacacatcttcgcagagtaggtgaattgatttttctaaactgcatgctaggatcaataaaactaaggtacattgttggaaaactaaagatggagcctacaagacttggggtgcttcaaaggaaccaggagttaaacaaaatttgttgcatttagcttctgagtttaatattaaaatatgatgttttaataactttgcttgcagtgtcactgagaaggctggtcagggtcagtaagaagaacaggctacacagattatcatggacatcaaacaatgagaacattaggagcaaatgaaagctgttttgtttacagatactacttttatgatgagaggagagcaatgatggtatctgagaaagaaaccaatatttgttgagtactcgctgtgcactggtcacttttttttcttttttaccaatgggaaatctgaggctttgagaagtaacttgctcacagttattaataatatagccaatgaagtgcccagatctgactggttccaaaatccattctcattttattacaccgtactgcctccccatggagtagcatttttggatcccctaaagcgaacatcaatatgctaggaaaatgaattacttgtgcagtattgggaaaaaggaaatggatgtaaaaactgttaccctgtggttaaggaaaataaaaattattagaaattaagtcattgttgagtcagttagaataaaaaacatttagttttgaagtagctatagggagcaggtcttctgccttttagaattagaatcatagagtcaaaggacattaagctgggtgggctttagatcagaatccaccctccttatttttcatgtgggaggaaacagaggctaggaaaaattcagtgatttgcctttgggtgtgggagtgttctggctgagacctctctcatgtccctcccttacttaaatccttcagtactggccgggtgcagtggctcatgcctgtaatcccagcactttgggaggccaaggcgggaggatcacaaggtcaggagatcgagaccatcctggctaacacagtgaaaccctgtctctactaaaaatacaaaaaattagccgggcgtggtggtgggcgcctgtagtcccagctactcaggaggctgaggcagaagaatggcatgaacctggaaggcagagcttgcagtgagccgagatcgcgccactgcactccagcctgggcaacagaacgagactccgtctcaaaaaaaaaaaaaaaaaaaaaaaaaatccttcagtactgcttcagaagactgaaaggaaaagcccaaactccttgaccctgcacttttcgtcatcgagttcttgcttatcttttgggcttcagtgtcctgtgtctccagttctactctatcctcagacatactgtgtttttaaagctttcattctagtcacctctttttcatcctccacacacaatgccgtcgcacattcagcttccttcctactttaagctggcttaattgcatatactttcaacatgcagctcaggcactgttttctccaataagcttctactgacccctcaaggctgggttaggtgcccctctacagagttcttactaccgtgtgtccttacctctatcatagaactgatctcattgtatgacagcagtgaatagcattgcatatggtttcactttctattacggtcaaagggagggatagtgtgggggttattggagcatgtaataagtggatccaagagacatgatatacacaacttactaatgttggcttcagaatatgcatataggaggagcttatggggacaaattgattggaaggagtgggagtaagatttgaagctgtctttatatagcactttacataaaattcagaaaatacttattgccctccatatcaaagaaattgggagcaggaacaagatggagacattgaggagtgtcaaagtgttagtaatcctaagttaagatcctgttcaactgccatctctttcatgaagtcattctgttctaaccccttcccctcttcacaaggacatcttggggaagtcacaaggaatgacttttaagtacatcatctatcctgtctttgtgttctgtttttgtatcctttttgtgcatttacccttccttgcttataattttgcattgcatacaagcgtacatctgtataaagcttccccaactcttagcatggagtctgatacagagtaattacatcaaaaataaccattgaatgttgaatgaatggtttaattaggtcagtgcttctcaatcccggttgcatttttgaatcacctaccgaaaatttaagaaatattaattccaaagtcccagaaattctgattttgttgatctaggatgggaacagactttttttttaagctcctaaggattgagaactcctagattaggttctttgtttcaacagtggttctcaaagtttaggattctagaccagcagcagcagcacttcccagaaacttgctacaaaatgcagattcttggcccctacaccagtgaatgacaaactctgcgggagggcctatgtgttttcaagccctccagacgatcttgatgcatgctagagtttgagaacttcttttgctagagtttaagacaaaaaaaaaatgttgtccttaaataaaataccaactgtgagaaaccaaatatactttataatcatcctaaaaggttgtaccaatttaaagcaccactctaaataaatcagagtacctcacaagcacaacagaattatccttgtggaaataagcatcccagcattttataacttttttcaatatttatttttggttagtttcctatatataaaaggctctccaatgaaggcattaattttcataataatctaaataaaataggctatattagtcaggaagagcacctgaaaaatctggcattggataaggaagcctcagagtcaagaatacctttccataatttcctctcatagagaaaagcctttttttgacagtaacattttctccttctctcatttgtgctgtttgactccgtgccacttgatagctctgtctattcctatggaaaccaagttagtggatggagccaaggcttggagaaggcattggggggaaatattagaagagttcagccttagagcaactaaagatgttgcctttccctcagtcaaatcctctttgagagccagaactatttcaagccagagagatgttcttggctgatgtattgtctagctgctctgccagatggatgaacatcttaaacttggaaaatagcaaataaagctcctattctgtctttggagcacattcttagcctttgcttacagaattgtcaaataactaaaaaatatatttttaaagatttgcttaagatggcaggttagtgatgtggttctcatcatatttgttaagtacttagaaattttagcaataaaacacagaattaagccttgacaatcagaagtttaagtaaagaggaagaatgtcggtcagtggaaaaagcaatgcagatttcattttatttctgtagctcagtgaatttatgtctttcatgagttgattgctgtaactgtttgcttccctataaaatcactttaaagactaagcaaccagagtacaaacagacatctaaatcaactgaaataagaaaattatctaagcatacaagaaggcattctcctttctaatccatttctgctctacattttatatggcactggtagctaactcatgattgcattgtactgagccatttatgtggatatttatattatgtttatatttcaagaagggtgtagagattcatatttccaatttatattctttgatttatgtcagaaaattaatgtcttctgagaaaacagttgagacaactattaatatagatgcctcataaatctatatcttgaatctagccatctcttctaatgttcaggtctatatgtatctgcccctccccaacaaccttttctttttgctagacctctctgcatagattcccttcaggtgcctcaaactccactttagaaaaaaaaaacagaactcaaaaatttttatccctaaccctatttttttctcccatctcttcagttgttggtaacaccctctatctggtagccattcaggaatcttcttatgtatttcactgatctcttcccttatttccatttagctctcaacatttctattgtgggttgctgtaataacccccttactgctctgcttgcctaaagattttttcccctcaaatcagtgcttcacataacctccagtgtcttttctaaaaacacaaatccagtcatgtcatttccttcttaaatcttctctttttcctgtcttagtttgcttggccttctataacaaaaatactttagactggatggctggaacaacagacatttatttctcacagttctggaggctggagagtccaagatcaaggcaccagcagattctgtgtctggtgagggcctgcttcctggttcatagatggctgtcttcttgctgtatcctcacatgacagaagggagtgaaagagctctctgaggtctctttttaggggtactaatcccatttatgagctccaccctcgtgatgtaatcatcttccaaatgtcccatatcctaataccaagacattggcgttagaatttcaacacatgaattgggggggtttgggggttggggggacatatattcagtctgtagcactcctttttaccaatatgatcaactttaggctccttatcataacatattagactatccattttataacccctgctcacctctctgatcttacttttcacttcctcttacagtgcatttcttttcttttttctttttttttaattagagaaagggtctcactatgtggctcaggctggtttctaactcctgggctcgagtgatctgcccaccttggcctcccaaagtgctgggatacaggcatgagccaccattcctggcccttacaatgcatttcatattacaatgatattgaattatttgcggagtttgagatgagattttaccctaaatataagctaagaagttagtctgttactgtttcatggatgctaacaatagatacgagactccgcagtcagagacaaagtagtttactactcacaacacagcaaaaagaatgagcaccacgtctatgcttcccttgcccccagagaacatgtggaagttgcagaggctgcacacagtgggttttcatcacaactgaggaacaccgaacttcaggaatctaccacttttatagtaagcacttagtaagcccagaggaagacattacctcatctctccagttgcttgttgcaaacacaaccctgaaaaattacctaagtaaagagtggccaagactttgcattcttggcatacccagtaagaacgtttaggaatgcttcaggcccatggtagattgactcttccaacaacccatccctcagcccagcattgtcttgacatgagtatgccactacatcagctacttttatttatcttaccaagagagactaggaccatcgctttaatttgtctcatacagcacttacttaacaagactccaagtagcaggataaaaacatcctgtaatattggtatcaactatgtccctcagtatcttggactaaatcaactgtgaataagccccagaggagaaagtagatcttactttatacagctaggatgtaatctaagtctggtctgttatctattttgacccatgcaagggagtttagactgacatgctaatctttggcctcgttgcagatagttacaggaggcgctagattacaggggccaaaaagcaacccccaagctcaaaggtggaatacaccatggcctactctttcctacatacaaacatgtagcctaaagaggctgaaataaagagtcactttatttcaggatttgtcattaaacttggatcaaccattacattgatttgtctaagccacatgggcagtatcactaagtagttgttacttcagttgccatgcatggcataatccaaagctgctcacatgtcagaagaagcatatggatttgtgtacatcagattaaaataaggttgtgccagtccctttgcttccatgtatacaacggggtccacattcaggagctgtcattgatggtatcaagcacagcaaaagaattaagaaccaccaatgcccatgtgaatttttctgtttcatagcaagcacatggtcagagataaaacagacgcaggtcagatggctggcctcagctgctgtttgattcaggtagctcactatatatttgttttgccaggatgcacttgcggatccagaggacaaagaaagtattaattgtcctccccatccctgtacttcctgaggtctcatgtgtttccttcctaggggctgaagttgttgctttccttctttggccacatagttaatgtgtcccattccagtagatataacttcgccttttctccaatcatcccctacttgtgcctgtagcttatagaagggtaagtacatatgggacaaatttagaaacctattatgtcttccattttggcctatatggaccactatagaatgactcagtgagcagggcactcaatcagatggtcattatggatatttatgatctgggaccttatcagttgaacaaaatgaatccaggtgggtaaacccaaattaagcttgaatctctaagcccccttttggctggctgccacccaagggatatatgaaacaaaccatcctgagattgcttttgggaaaaagaaagaagcaagataaccagggttgggccaggcagaatcccaaattttcaaaacagatgtatataatcccccactccttttgtcctgattatttcccaggaggctacaaggatgaaatgaaccctttctgaaggtggccacagttagtaagcaaactgcttcatacaggagtgtggaccaggaggaggtaagagaggtggagccagaaacatttttgagttgattttcaagaaggcctttccaagctctcaacaattccagatacctgaggatggtaggaagcatggaatgtccattaagtacctaactattggctcattgttaggcatatcatggtcagactatagaaggtctaggaaccccaaaacatggtcctcagtgctatagcttgaataggctaatcagattggagcagcaactccatatggtggagcagcaacaccataacctgaaaaatgtctatggtggaaaggcacgaggtgagcccaagaggaggtgacagaggtccctgctgggaaggggcaagggcaatcctccatgtaatgtggactccttcaccacaagaaaaggaggccaactgggcaagatacataagtctggtatgcagtggtatcttctgcatgaaaaacataccttttactttgtatccattctattgtggtgggttcattgccttatctagtgcagtgatggatcctagtggcaaatcccagtgaccaggcaatacagacttgttcagcgacttgatttcagtcggtcttatcagagagcaggcccttactgttactgtgggtatctatgtgagtgacccaaagtgtctgattggcagccacaatttgtttgtagtttgtggccccaaacaggaatatctttaatttaccaactgtagtcttccaagtggcagaccaggtgactacagtactgttagcagaccaagaatcagtaaaaatacggctagtctttgggagtattgcctaaggtaagggtgatggcttttcatttcagcccattgggctaactggtcattaccactcagtctcctggagctgtcattgaggttggacagctactgccccctactggacaccatcgggttttaacttagccaaagcatcagcaaaccaggccaaggcatttaagggaccattaagccagcagctttgcttcagacagtggccacctgtatacccagtgctttgtcctcaatgtcaaataagtcaggctaaagcaggaatcagatacatagaacagttgactctgtcctattaggcaaggttttgcattcacattcacttttgagcacctgctcactcatgtctcaaccaaatgaacttctaatgttttcaatccacctaaagatccatgtcaaatagcaaaatcttcattgttctctccatttatttctgttttggagatttcttggccctgcagccgcaaccacatggtctttcagcttgctgcccccgtggtcatgtaccattccttcttttgcctgcccagaggaaggtgagcaaaaacaaaggcactatttgggtggcttgctttaatcccacctctcaccattcagactcattaacagagagaatactggggtcactcgccccttaaccttgcccaccacctgggcatgatctcagggggtcttctcacccttgaacctaaggatacctgagaatgggcctctagggttcttgtccttactcttcaagaaaactatgtctctccagctgggtgcagtggctcatgcctgtaatcccagaacgttgagaggccgaggtgagtagatcacttgaggtcaggagtttgtgaccagcctggccaacatggtgaaaccccgtctctaccaaaaatataaaaattagccaggcatgggggcacacacctataatcccagctacttgggaggctgaggcacaagaattgcttgaacccgggaggcagaggttgcagtgagccaagatcgcgccactgcactccagcctgggcgacagagtgagactctgtctcaaaaaaataaaaggaagaaagaaaggaaaactatgtctctgtcagtatcctatcatcttttactgtcttgtcagttctggcatttaattaaccctatttacaaggtaataagttagctgcagatgctggcagaagacacaagactcccatcagagacgaaaagcgtcattactaatggcatagctaggagctaggagtacttatctgtttgcatgagtttccctcccctccaaggattatgggggcaatatggaggactcagatgggcccagcacacagtgggtttgcatgacatctgaagagtgctagattttgggaatctccagcttttagtaaatagagtagtaagcaagcctgcttgttctttgccctggtgggtgacattacctcgtcactcaagattgctcactgcaaaccccactctggaaaatggtcccagtaaagtggagtcaagcttttgcattcttggcatacccagtaagtacattcagggacattcaaggcccagggcagattgcctctcccaacactattgtggtatttccaaaactcatttgtgtctgcaaccactacagaaaagtttgatataatgaaattactgatatttgcgacctatatacttcctagggatagtaattctttttacaaattaatacagtaaatgccttgagagtttataaatacataattatatagctataattataattaataaatcatgtttctatttttccatttcaattttaagtaatgtattttgggtatataatatatttaggatttaaaatgaactatgacagagtacctactttacatttgtgtgtgctattataaatatagttatctttctaggccaaaattttataccaatttgtaaatgaacaaaaaaatatagtgaacatttatatatatatagtgagcaattgtttttctctccaagtacagtgacagaaaatataagcactggggacacagaacaagaatgcaaagaaattaattggaaaacatgtaggtcccaaagtattggttttgggaaaacatctggcctcttcagtactccagtggggagaagggccaccgtaggcagttttagtcaagtcttgggcattgaagtctgttaaagtaatcgtctcagctgaagaggaagcaaatagcaaaggccccagggagacagatatagaaaatatggtagccattttggggaaaaaatgtagaggtaggatccagaatattttgaggatcagctgccaattatctataagttaatcataaaggcacttactgggaacaaacagcagtcctgtagaatatgatttcagaatagggttcaggaagatgcctccttccttttcactgattgaaaggtggtcatatttgtgcaaaaggcaagaaaattcttagaattttggaatattctttgcctcactatgaggctacagctttataggaagctgtttatctagagaaatggcagaagcaggacaccatccaagcctcaggtcaggaagctactcactagctcactgttaataattgtgacatccctaatatcactgaagacagggctccaggagatctgtgtaggagcagattgttataatggactaggagctgggtggaagatgctctatgggtcaacaaggagaaaaaaggaaaacaaagcaaacaaatgaaaaacaaaaatgaacctgcagacagaaatttcaaaatatttgaagaaatctaatgctaacaaagcaaacaatattattcagattacgaattcattcctagtgggagagcataaataaagcaaaaaaataagccacacagagaagatatttgcaaaaccaaccaagaattagtatccagaatacataaagaactcctatagatcagtaagaaaaaaaaacaaatagccaagttcagaaatgagttacaacacaagaaggctatttacaaaagaaacaaatatccagcaaacatataaaaacattccacctcaattcgggaaatgcacattaaaacacagctgtaggccaggcacagtggtgcacgcctgtagccccaactacttgagaggctgaggtggtaggatcacttgagcccaggagttgagtccagcctgggcaagctatagcaagaccccttctattaaaaaacaaaacaaaaaactgtaaccgtcagattggcaaaaattagcaagtcagacaaaacccagtgtggtgaggatgtggagaaacaggaactcatacattactgttatgaatgttaacttggagtagctattttagagagcaatctcaaaccagaagtttcagaaattcttatgtacttaccaggagatatgtatgagaatattcattacaatattgggtaatcttgaaaaatgagaaacatgctaaatatccctctagagaagaataaatatattattttcatatgacagcatacttattccagtgaaaatgtatgaacccaggcaacttgaataaatctgaaaaatactgctttgagtaaaaaatgacacgattcatgcaagaccatttgtacaaagattgaaaacatgtaaaacaatactatgtcgtttatggatatatatatatatatatgtttgtatgaaatagaagcataaaaacattcattggaatgataaacacccaattcaggatagtagtctccaaagagggagagaaggtaatggaattggggacacaaaggaagtattaactttatctgttaggttttattacttaaaaaatgaaaaatccaaagcaaaatatcaaagtatttttctcaaaatctccatatcattgttattaccattaaatagctatgtgctttttttttaaaaaaaggagttcatcttaagagaactggacagacacaaatataaagttaaaaatcacattttgacctaatttgtttcccagattcctttcaagtgctgttctctgggtcagagaacttttaattctctttcacccttttcatacatttggagaaaatctaagtgtcataatctttatgtgacagatgaaagaagctcttggtgttaattacaggaagatttagaggaaaattatgaccacctaatgaaaaacgaaaaaaaatttattcactgtttcagagatattgggaaatgttttcacatttcagaagcatgatggacctgatcatagcagagtaatgtccttttaaatgactaaatcaagaccttcctgtaacttcagctcccttacttctgcttacctaccatcagagttttcttaagtatatatcctcttttgatctattatctccttcgctcttatactatttcctacccactccaaaattataaaagcagaccctaaaacaaaccgtcctccaaacaggatcagtttctgtatagctctaacaggttatactaaatgattaacttccaggccaggcacagtggctcacgcctgtaatcccagcactttgggaggctgaggcaggcggatcacctgaggtcaggagtttgagaccagcctggccaacatggtgaaacctgatttaccaggcttggtggcaggcacctgtaatctcagctattcaggaagctagggcaggagaattgcttgaaccctgaaggcagaggttgcagtgagctgagattgtgctactgcactctagctgggcaacagagcaagactctgtcccaaaaaaaaaaaaaatagattaacttccaaatcctccaaaaagtatttgcattataagaatattctcaaaaacataagaactcctcagttcaagaaataccgaggaagtatttagactttctgtaatgagaaggttttacaggaagcaaagtagcctataacatgggtccaaagggtcacacaaccttcagagggttgtcaaattagcttactgcctcaaactagtatcttcctctgttccattgatactagaaatattctcctgattttagcacttaaagttctctgtcccttctgctcattcccaaagattgaatttgcatacaggacaattttttttttttttttgagacagggtcttctctgatacccaggccggggtgcaggggcacaatcatggcttactgcagttttgacctcctgggctgaagtgatcttcccactccggcctcccagagtgctaggattacaggtgtgagccactgtgcccagccagttgcttgtttaggagaacaaacaggttggccttggtccaagtaaattatattgtttctagtccagccttcatagataatatctgatgggtctctgtcatttgaaataggagatgctggcctcctccccaaggtacctgctaaattcctattgtctatgcctttgttggtcctatatcatcattatctgtaggcagaatatagacatctttctcagtgaaaaaaaaaaatcagacaaaccactactgtaattccccattatccacggttttgctttctgtgatttcatttactgtggtcaaccatgatctaaaaatactaaggtattttgagagagagagaccacattcacataacttttcatacactatattattataattgttctattttattattagttattgttaatcttttactgtgcctaatttataaattaaactttaccatagatatgtgtgtatatgaaaaaaatagtatatatagagggtttggtgctatctgcagtttcagatattcactggggatcttggaatgtatccccaggagataaagggggactactctatttataacattctaactatttttacttttaccttttcctaatcttggttcttaatcactagctgaactgtgtatattacaatcagatctttctgtctgcatgccctttatcttgggccattcttggttctatctgaccatctatgttttgttgaatactacacactggaaaactatttataataataaaaacatctactgagcatttgctttgttcactgttctaagaacttttacaaatatcatttgtctcatttcatatgcataataacttcaggtaccattattacccctgttttatatatgagaaaatagaggcacaggaggataatttatttaatctgtgaaaatgtttgatgatacttctgtgagaaacaaagatgaaattatgtcaaagagctttgtaatacgtaaaacaaagtacgagcattgtactgttatctgcttcataacaaggctcaatgaatatttgttgaatgaatgaatgagtaaatatcattactgagttgcactgtgtcttgtgagggtagagtcctcagaataatgtaaagtgtaaatatgccaagcactgtgtctatagctcagtagttacccccaccaacatatactagtttccttcttctccttcccttttcctctaatttccaatcgaaatgactgtctgattgaatatctttaaaggtcatgatgaattactctgtaatatttgaagtgttatgttcagaaaggtcaaactttatttttcggtatgaagtgtcacacagatttgtttttcctgggcaaactttttttttttttttttccccaaagaaaagatggcaagaaatttagagcagggtgccctcttgaggaaattttagcatcttccttctcaagaactgacatcaaatgaaatgacaagtccagataaatgatgtacactattaatgaagctcagaaaaatgaaacattaaaaagtaagaataaccaaataccaggtatttgagaattaagattcttaactgttatgatctaatatagcaactgtaaataagaatttttatcatttatttatttatttatttttaatttttttttttgagacagagtctcactgtgtcacccaggctggagtgcagtggtgcaatctcagcttactggagcctccgcttcctgggttcaaggattttcatgcctcaccctcccgagtagctggaaccacagcttgcaccaccatgcccggctgattttttttgtatttttagtagacacaaagtttcactatattggccagcctggtctcgaactcctgacctcaagtgatctgcccatctcggccacccaaagtgctagaattacaggcatgagccaccactcccaggcttgtaaataagaatttttaaatgaaaacaaaaacctctagaagatatttcatttcttcttatttactcatttcttcaagtaatatttattaggcacctattctgtgccaggaactatgctgagcacagggatcaataaaacatggtctctgctttcatggagcttacagtttgtgagggagctcacactgaagagaaacaaacaaatatatatgtaattgcaaactgagaaaagtactatgagagaaatgaataggtactagaataaagaataacaagtaagttctatttagggtcatcaagggaaacctctctgagaggaaatatccagcagagtccgttggcttttccacctattccaagtcttcccatctaatatagacagtctacagatcctctttcctagccatggtctttcttatcttctcttatctctgcccctgtggtggactgagtcaatcctatctctgcccctgtgggcaagcagttagttctcattcgtccttctgcacctcactgtcactctagtaaccttgccttacagcagggatgtccaatcttttggcttccctgggccacactggaagaagaagaattgtcttcggccatacataaaatagcactaacaataactgatgagcaaaaaaaacaaaacaaaaaaaaacacgcaaaaaaatctcataatgttttaagaaagtttaagaattttgttgggccacattcaaagccatcctgggccacgtgcaagccaggtgccgcggtgtggacaagcttgctgtagagctgcacattcttcacagtaggtggtctgcttgattaaaaaatgtattccttactaatattgatagtccctcataggagaacatcaatgcattatcatgctaaaagggcccacttctaacaaggttaaggatgacaaatggacaaataatcctgcctgccattatcctctgaatagggagagataaataggcacgaagtaggctgagaacctgatcaggcaatactgtttggtcacactgaccttgaaatatctgaggtaccaagcacatagaaacctccaactggaagtaaaaatgaggaaatagatctgagaaaagagcccagaagaacaatttttagagtcttattttgttcaaagctgccatgttacacagacttactatgtaatggttggcctggctcattaacactcttgctgtggcccttgtaactaagcttctttctctttttttttttgaaatggagtccggctctgtcacccaggttagagtgcagtggtgcgatctctgctcactgcaacctctgcctcccgggttcaagcaagtctctgcctcagcctcccgagtaactgggattacaggcgcctgccaccacgcctggctaatttttgtatttttagtagagacggggtttcaccatgttggccaggctggtctagaactcctgacctcgtgatccccccacctcagcctcccaaagtgctgggattacaggcatgagccaccgcacccggcctgcttctttcttgaggtgggttgattctaccagactggaggatttaactgacttggagagtactgcctgcaagtgggtgggcctaccatgacttctgagttggcatttaggtgaccgtttgagtctgggatccaaacttggtttttttgtttttttttttttgagacggagtctcactctgtcgcccagcctggagtgcagtggcacgatctcggctcactgcaagctccgcctcccaggttcacgccattctgctgcctcagcctcccgagtaaatgggactacaggcgcccaccaccacgcccggctaatttttcgtagagatggggtttcaccgtgctggccaggatggtctcaatctcctgacctcgtgatccacccgcctcggcctcccaaagtgctggggttgcagatgtgagccaccacgcccggccctgggatccaaactttgaataagctgcctctaccttagttgtacccataaatagctttctttaagaaaactaatcatccataccttattaaccagaggtcctgaacaaaacgtttaactactttgaatctcagtttcctcacctgtaaattgggatttaacatctctgcttatttcgcattattacactttgagtataaataataggtactatgttggtcaaaatgtgctgaaactaatacacctacacattgctgctgttagatagcaatttggaaaatacaccaaacactgtaaaatgtgcaaacgtctttgacccaacaatttggttcctgataatttattcttgtgaaaaaattaagaaaaaaaatgtgaaaaaagatgtacagtgaagcatttactacaaaaaaaatattagaaacattctagatatctaacaataatagactggttaaataaaacatgttgttttatttgcaataaaatattggccagccactatgtaaattatattcatgtagaaagttcttggaaggaaacatgaaaaaataaaacaattgatagtatagtggaattacaagcatttttccttattaatttctctggatgttattactctaggagaataattaacatacttaaaacattttaaaattaaaaaaaattttgaccccatagtacatttttttcttatcatctcttgttttttatttagggaaattatcgtttcatgaaactcttacttacacgcagagcaaactggatgcaaaaggatctggaagagatgactcctttgcacttgaccacccggcacaggagccctaagtgtttggcacttctgctgaagtttatggcaccaggagaagt

SEQ ID NO: 15640 - DNA, 126974 bp, Homo sapiens
aagcctcgggcggccttttgaggggctcggctagcttcagcgccgtggggtctgacctggctggatatagtgtaccggcccggcaggaggggcggcccggtccgggttgcgcctcctggagccgcccccgggacgtcagtcctggaggaggcgagggtgagtaggagggggcctggctggggaggctcagatcattcggtccgcaccgccttggcccctgctgcagactcacggccttcctggcctaggctgtggcctgagcctccatcattggcctcctcgcccgctgcctcttctttctgctctaattcctgcattataaagtcagagccaccactcggggcctcagttgaatgagtcaatgacttatccctgattgtctctgagggctcctgtaaggagtagatgtggtacgggatgggatagcacgtcgtaaactggaaaactgtgtgagtgattgctgctaaggcgtggatcgctcctccagtataattacgaaattccctagcaaagcagtcgaggatcctaacttggccccaggtagctctgcggcttcttctgcaaacactcagtgaggtccaggagcccacgcgatctctgcttagtacccaggaggcacactgtgcttttgtggttctccctgctcccgcctttgcttcagctttcctgctgcctggaatggccttacccgttctctctctggaatgctatcttaaatgtcaccatctctgagaacttcccgaacaaccaaccctttagtcctaatcagaattactcttcctatgagtgtgactgcagtacctctagttttgtacggttataattattagagcatttattacacgggcttgttgtataattaggcaaggatgatgacacctttgcattttatagcactttatcaaagtggttttgacttttttctataaaaaatgatttattttcttaaaggggcaaaaaatacattttttcttaagaaaaaaaaagagccctgcataatggctttctcagggtgacaaaattagacagtgatagagccaatactcttaccaaggcggcctaactcctagactagtgctcctatctcttgtccacgcccctgacagagcccaaagatagttgaaatgggaaattttaaaagagcagagacttgtaagtatgaactcattattcaagaaattaaactttgatcctgctcactttttggacttagcactcagcctgtgacctttcatccaacaaacatctactgagtactggctatatacctgttactgtgctaagtgctaagaattatgaagtaaaaagtatatatatataatatatataatatatgtacatataatatatataatatatgtatatataatatatatattatatatgtatatataatatatatattatatatgtacatataatatatatattatatatgtacatataatatatatattatatgtacatataatatatatattatatgtacatataatatatataatatatgtatatataatatatattatatatataatatatgtatatataatatatataatatatgtatatataatatatatataatatatgtatatataatatatatattatatatgtatatataatatatattatatatgtatatatattatatgtatatatataatatatataatatatatacatatatattatatatataatatatattatatatataatatatatgtatatataatatatatattatatgtatatatattatatatattatatatgtgtatatataatttatatatgtataatatatacacacacacacatatatataaaacagagatcacatttttagtgtatttttcaaagggtataaagaactttttttgtggttctgatgtgcctaaaactctgatcacttagaatgaaaaatgacaggtcttagagtttagaacagtgcctagcacatagttgtcactcagcttgttgaatgaacgaatgtgaacatggtctaaccttattattttttgcattttacagaaacctagaaagctgacatagcctgaggacacactgctgattataaatacaactgggcctagaacccaagtgcagttactcccctcccatgttttcacctccacctctattttgtagcttctctcaaataaccttaatataatcctggatatgacagtagttcttctgacatgactgttagactcagacatgactgaagtgtctcacaacaccctcttcctccatattttctgccagtccttaactcaaattgtcagcaaaataaagacgtaaggagctgtgctttaccataattaagaaagtattaatatgttctctcaagggcagaatttgaaccaataatccttgtcgatgacaagacaaataccagctcatccgttataaatttatcttagaaaactctcagatccccaggagtaacagcgattggcgtgacctgctttttggtgaaatcagaaaaggacttgcctaccctcatggcagcaattaactggagctgattaacagctgctccctttagataagtacatatgcttgagtttaccgtgattctgtgactccctacgtttctaacagttgttacctctctggtccttgtaggcattcagctttggaactttgataaagcagcttaagggtttaggaaggatgtttaagatcactgatgcaactattcatctttccttcccatcaggtgtttgaattgttgctgcatttctccagcctctgctttcttaaacactcttgtgatagggatctcactatcttcctatgcggctgatacttattttttattttattttattttttttgagacagggtctccctctgtgcccaggctggagtgcagtggcatgatcttggctcactgcaacctccatccacctcccaaattcaagcaattctcccacctcagcctcctgagtagctaggattacaggtgtgtgccaccacagcccagctaatttttgtgtttttagtagggacggggtttcaccatattggtcaggctggtctctcaaactcctgtcatatgtttttaaaaggttcttacaagctccatgagactaccggtcagaacaaaattgtccttattgaaatatggttcattttagtgatacgatgttccaagtaagatcttatggttaagacctctatctaggtatattttcctggtggaccaaggagagaacaaataaaaatttcactttttgtgagaatgacggcaagacctagataccttttaatttagtatttagccaggtgtgatggcacatgcctgaagtcccagctattcaggtggctgaggagggaggatcgcttaactcaggagtttcaggctgtagtgcgctatgccattcaggtgtccactttaagtttggcatcaatatggtgatctcccaggagtagaagaccaccaggctgcctaagaaggaatgaactggtccacgtcaaaactcctatgctgatcgtagtgggattgcacctatgaatagccactgccctccagcctaggtaacatagcaagatcccatctctttaaaaatagttttttaactaatttttttttcagatggagtcttactctgttgcccaggctggagtgcagtggtgcgatctcagctcactgcaacctccacctcccaggttcaagcaattctcctgcctcagcctcctgcatagttgggattatgggcacgcgccaccacgcccagctaatttttgtatttttagtagagacacagtttcgccatgttggccacgctggtctcgaactcctgacctcaggtgatctgcccgccttgccctcccaaagtgctgggattacaggcgtgagccatcacacccggccttaactaatttttttatttttttctgagtcagggtctcaacctgttgcccagtctggcatgcaatggtgtgatctcagctcactgcaaaccctgtttctcaggttcaagtgaaacttccacctcagcctcccgagtagctaggattacagtgcatgccaccatgctcagctaatttttaaaaacttttggtaggcagggcatggtggcttatgcctgtaatcccagcactttgggatgccaaggtgggcagatcacttgagatcaggagttcgagaccagcctggccaacatggtgaaaccccgtcgctactaaaaaatacaaaacttagccggtcgtgatggcaggtgcctataatcccagctactgaggaggctgaggcaggagacttgcttgagccctggaggcagaggctgcaatgagctgacatcgcaccactgcactctagcctgggtgacagagcaagaccctgtctcgaaaagacaagaagggaggaaagcagggggagaggaggggaggaaaggagaggcgaggggaggggaggggaggcgaggggaagggaggggaggggatgggatttgtagaaatgagctctcgctatattgcccaggctggtctcaaactcctgggctcaagaaattctcctgtcttggcctcacaaagtgctgggattacaggcatgagtcaccatgcccagccctaattaatttttttaagtttatttagtgcttaaatccagctaattctgacttcacaattgagtttatgttatactctttttgtggatcgggctcacttttatttgcaatatcaattctaatgtttaatattatgtggcatcatattacttgtattaacttagattatgtggcatcatattgcttgtgtcactgtaaccctgagccctgtgcctaatgttaaatattgtctttgttttttcctcagatagtccctaagaagagtcctagaagcacctaccctctcattttacagatgagcagatgagcaacttgtacaaaagtcacctaatttgccacctaatgccaattccaggactaggactatagctttttttcttttgagacaggtctcactaagatagacagcctcactatcttgcccaggctgctctcaaacttctggcctcaagcaatcctcctgcgttggccttccaaactgctagtattacagatatgtaccactgcacccagccaggactatagatttttctaatcctagtcaagtatttctagtaagccatatttataaaatacccacttggaactgatgagacaggtttcagaaatgtttgctgcatgcgctcattgtctgaatcattgtttcaggttgctccggttgctaagaagactatgaacaagtcagagaacctgctgtttgctggttcatcattagcatcacaagtccatgctgctgccgttaatggagataagggtgctctacagaggctcatcgtaggtaagcagtccccttaagtacagaaactttaaaagcaactgtttgtcctgaggaagtttgttaatgttagttttaatttgcaatgtactcatacattttaatggaaatatgttattatttatattttcttccaacacatgaacaagaaaggaattaagtcctaaaacttaaaaatatgggttaggattaggtgaaaagtacttgagaaatttctatgtatttagcactaagtctagatagatattctaaggtactaagggaatgaattcatctttatgttaacagatctcgaatgaaacagtggataatcttttaacatttaatatatacccaaagtattaaagtttacaaatgatttaatttttaatgatttaaaattgattcaatgttccccctgtgatttgcatatataagtgatatatagagaggtccaatgcaggagttctagaggagagaataaagagaacaaagaatagctaagaattttctagaaccttagcttcctgctaaagcagagcaaagatccatctttctatcacaaatccagatattcacaagttgcaaatcccaaagagaaaaaaataaaaatatattatttgtagtctttattcacaccagtgtctgatgacatcatgattgacaacttgggctacaaaataaagtccaaattacttgaactttcatacctgttccttccgactttgtttttaccctacatttgcagtttctccaggaacttctactggtgtaccgtaacctctggctaagctagaggttacttctatttcccaataagccatgaattttgtctcactttctccatatgttctgtttccccaccttttttctatctgctactctgttaaccttcttctgtgctaaacaaactcctacttatctttaaagacaaaactattgtatctcacactctgtgaagatttctcttcctctgcttatccttactttacctcagctatctacattcactggaacttgacattttccaccacctccaaatcactcaaacattctaccattcaactaaaactcttactttcagctcacttactgatgacaaacaatagttttccatgctcactgagacctccaatccactagcttctctagttttgaccatcagttttccttctgtcttttccttcctcactactcagccttgattctatgtctgttattaaaatccttctcttggaaaaattccctttttttttttttttttttttttttgccttctgttgcacttgactgttgcattctcaactctggatgtaccaaacctatcttgctaagcagttgaatccagctgaaagattgatagcaccccaaattcatgattacccacttcaaataggcactcagtacttactactcatcataccacattttttctgtaatgaatgtttcatacctctcactctactgaatcctgtgactgccagttccccctcctttcattctctttaatgcagtaggcttactagaggaaatgaagacattaagtaggaactccctcatctttcagtatggtatctacaaatctacctcgatctgtacccatcttctctcttcatcttcctgctaaaacagagcaaagatccatctttctgttaaaggccagttcttccacacatgctctgtgttccatcccctcctgtcttctcagggacattgcttctttttttccccctctgattactatatcttcaacctttcttctatgctaaattctttccatcaacacttaaacatgcttcattgtttccattatttaaaaatcccatctctgtttcttcatctccctttaggtattgccattttcaactttccctcacgactgcattagcgcacaggctaaactgctacaaccatgacttgaataagatagaagtatatttcattctcataatattgcaatcccaactctagatggaccaaacctatcttcctggcaactactaagcagttgaacccagctgtgtaatagtacacagttatgtgggcagtctaggttagatagatatctccatttcacaaaaccatttaggtatactgccaggccttggttcttccattctcaacatgatgcttctatttctgggtcaaaggcagatacgttcattatagtcatagcccagtcagcaggaaggaggaagagagagcacagggaaagcaatttgtcagtaaggaggtagactagacttagaccacaaagccacacctagaacaaaagaagctgaaaaaaaaagtcttgccctggatggtatcatgcccagctaaaactcacggtgctcaattgttgaaaagaagaatgaaagaatgaatggggggcaaatattgctgtctgtcaccaaaaccaagattcttgggccagctgtacccattgtccacacttatttaccttaattcactcttttattaaaacaaaatatactttcttattttgaagtatacatatagagaagtgcatacaacttatatgtacaatttaacaaataaacataaagcaaacatccacttaaaccacctaggttaaggagcagcacattgtcagtaaccccagaagcccctaatgcatccttctctccccactagaggaataggctatcttgacttttataataatcattacattgtggttttaccacctacatatacatccttaaacactttagttaattttgccatttttgactttttgctaaatgttccatgttcacttgaactaaaaaatgtatgtatattacatttttgtcattttcctgctcaaaattctttcattattcccattatacttggaataaaatttgacaggttacttgtatctctttacctgtccatcctcacgttttacctcacgtggtaaaacttgccttctttcagtgtctcacacctgccaagccctttttcatctcagggcttttgcctgaaacgctgttctccctattctctgtctgaataactcttagtcatccttgagatttcaattttaaggtcacttcttcaaagaggcctgctaaccatccagtctcaatgaaatctgttcattgtattccctcttggccctctgtagtttttcttcatagaacttgtttcagattatcactgtatatttatgtgtatgaatattttaacatctctctcctccataagctagtggccttcatgaaagtagtctgggtctgtttaattcatcactaaatccacaaaatccagcacagtacttggcacataagaaatatatttgttgaaggaatgaataaatattttaatcattctttaagtatcttttctcccaagtagtctataatcatcttgagggccaggactaaaaatgaattgagttgaattaaattgaattgaggagcagattgggactaaattccatgagaaaaaaaaattttaagtcaggacgtatgaagaaaaagtaccaagtaaaatgaattcattaatgctttaattaaaaatataaccttcaaagaaaaaagtgcagtatgttataaattaaaaacacttatatttttatggctcagtcatacagattaattaatgtgttattattaaaacctgaaaccttgaaaatccccaaagagaaaatccttaaaaaccaaaaagcaatcatgatgtgaagccagtaggtagctaataaacttatttataaattgtttttctgttttctatcatcttgtctgaggaacttcttattaattactgactgagggtgccactcctcatcttttaagaattgtgccattatgttttctgtgtacctttgctctagagtattttccagcatttgtatatttgtgcaaaaataataactgtttcatcttaaatttcaatgtaattttttttctatgcatatgaatgccaggtggtaatttcaatgtattttaaacatctttttatgtatcacatatttgatgatctctaaatatatgctatttctcttttctaaactagtgacatagtactacagatgaattttttttcttgaatccttgttcaccaactgctcagtgaattcattcactttagcattttctgttttcccctctctgtttccatggagaagtatgtcagtgatgtgtttgactccatggaaacagatgagtgtctctttctacatacacaacgaattaaatcgaacactttctgtgctgcccattgtcctggaggaggactggagaggccttctctgaatgaaacatcatttcagtagcaattcttagtgtttaacctaatacagtggattaatgttttaccataacttactgcttctagattcagatgtattagggcttacttctgagccttaaaatataaacatacatagtaaaatctgaatatgctatggttctcatttatagatatttagctttttctcttaacaccaaactcaaataatttgaatgaatactagaaatgtaattgagaacagaatttagtagattcattttaatactatacagtgtagtattggtagaaaaaagtatagattttagagtcagataaacctgagttttaagttctaactgttatttattagtagtaatatcttggctaagccatttaatttttaagcctcagtttcctcatccgtaaactatagattataatatttcacttgtgtgagagttaaatgaaataatgacagtaaaatatctagcatggtacttgacacatagtagacaataagttaatatcctattactgttattgttatgtcagcttagactaaaataatcaagtttttcatagcttcagatgtctcaatatgaaagagcactaaatgcaacaaagattaatattgtgggttttttgtgaaaactaaacaaaataatttgtaaatatgcatggtgtgtaatgatcaatgttgtcattactgccaataatatttgaggtcgcttgcagtggtatcgtgaccaggaagcaccattctgattctactacaacttttgtttcactgtccatgttctgagcagcataatctctctaaatcatttcctctacttgtttatttatttatttatttttgagatggagtttcactcttgttgcccaggctggagtgcaatggcgtgatctcggctcaccacaacctctgcctccctggttcaagtgattctcctgcctcagcctcccaagtaactgggattacaggcatgtgccaccatgcccggctaatttgttgtatttttagtagagacggggtttctccatgttggtcaggctggtctcgaactcccgacctcaagtgatccgcccgcctcggcctcccgaagtgctgggattacaagcctgagccactgcgcccggcctctacttgtttttaacatcttctgacacagtatttagatacggaagtgagcctcataaatgacagagtagaggtactatttcaggttacttcttcccttacctcaatccctaccttaaaagctagagtcattaaatgtttttaaaatgcttgcctacatgcaaatgtgtttataaatatacttaaatgtttatgcatccatcctaacaatagtaataaaattagctaacatttataaagttatgttttatgtgccagccactgtattgtttggcaactcattaacttaacagtgaaataatatgaagagtttggggtattagtattaccctcatttttaaataaggaaattgagatgcagagaggttaagtaacttgtctaagaagtatcagaactgagattaaagccaagaagtctgattccagagtccattcttttaactgctaaagtatgggacctcaatgtatgggtagatatttttgtacacacgtgcactttcatatgtataaataaataggaatgagaaagataagaaagaaagaaccgattaggtgtgaaccttgcatgatgaaatgaatgattatctagatgggatttttcttaacatttttgtgctatgggcccttctggcaatctggtaagcttctggactcctcagaacaaaaatatatgtatatttttaagagctgaaatgcaatatagaggattacaaaggaaaccagttatattgaaatatcaaatatttttaagttgagacataacaatattctgccataattttttatgaatgtattaaatagcaaggtgttggggcaagtcttacagctatgataattttgaaatagcagtgagtgaaaatgatattttaacatacctgcacaaattataagttatagaaatattttataaaatctcaagtcctctcaaaatacagtatgtctcatgttattattattctcattttgcatgttaggacactgagactcagaagttgagaaatttagttgcacagttaataactggcaaagttgagcctcaaaccaaattatctgatgatgaatcctatgttctttccattgttcccatgttgtcactctataacaataagcagagattttttaatgacagcaaaatgccttcccaagattgtaacagtataaaatatgtaaagtaagaagtgggtgaaatcagatgaaataaatacatcttggatgccatgcaaatataacattttagaacaagcaaataagatacaaatagagactactcttgttacttgtattgggcattgtgttgctgtagctattgtgcggactagcacaactataactgcaagtgacagtcatttcctctaactgctagagttggcgctctggtttctgcacataccagcccattaaccatatgtactcttatgcttccacaagccttaaaataactgaatgcggtagagcagtggctttccagtcatgcttccagctcagctttctggactgtgttgagacagagcacaggcagaatgccagccacgttgagcaagcaccaattggtcatggattagaggccatctccacagttgccagaataattagcacaacacagcacagtagccagctgctttctatattaactgttcctgacaggaatgcaaatttaaatgcactgccatccagtgaatattagtttacatcataagctctacgtttgtacaacatgttacaattaccaaatatttccaaacaatacattgttttattggatcatcaaacaagttgcggtgtagattggacaagtattagctgaatgttataagtgaggaaactaaggaagagagtagggtggatagataaaggcacagacctcgctcagttactggccaggaagcccagaacctaatggtaccctcattattcagaaactagccatgaagccactgtccccctagagctactcaagacaggacctaagtgaggttgaatgctgctttttctaatcatttaggggatatatactttctttctttctttctttctttttttgagacagagtctcactctgtcacccaggctggagtgcagtggtgcaatctctgccttccgggttcaagtgattctcctgcttcagcctcccgagtacctgggaccacaggtacatgccaccatgctcagctaatttttgtatttttagtagagacagggttttgctatgttggccagactggtctcgaactcctgacctcaggtgatccacccgcctcagcctcccaaagtgctgggattacaggcatgagccaccacgcccagccgggggatatatactttcaatttcctcaaatagacaaattttgccttataggcacaaaatattggattgtggtgacataacccaataacatcttctcttctgggaaatacatatatcggttacaaagaaacaatgtatgtcagggaacaaagagaaggcttgaagtttccctgtatcttatataagacttaggaagatgacaggattgacctaaagttctgtgtccttgaaggtgagttgcctattaaccccatgatgctgactctgctttgaccctgaggagcctaatcaattaggacaggggtgttcaagcttttggctttcctgggtattggaagaagaattgtcttgggctacacataaaatacactaacactaacaatagctgatgagctaaaaaaaaaaaaaatcgcaaaaaaaaaaatctcataatgttttaagaaaaattataaatttgtgttgggcagcattaaaagccttcctgggctacatgtggcccacaggccacaggttggataagctcgagttaggattatcccagaatgtgagatggcctctgtttctcagcacttactcttgtgaccatagttcctaatcctctcctttactaaagcttctaaggaggaatgtctctctaggcagaaagtgtaaatgaattactgttatcttgctaatactagctactactatctttgcttaacctaacaagatgccagtagagactgccctttaatcatgaaagacaactagagactagtctcattatggcatattctctataagtatcactgactccagaaggactcaaactgataaaaggaacatgctcttatactacattttagttctgttaatgagtttcagtttaaataaatctttatctataaatacagtgatagaatctttggaatcttctagattagatattgaaggctctagtacaaagaatatactgttgtactacacagagtcttgtgcataagggcttctgttattatatgtgttgaatccaatgcaaaatttgcctccatcttcaaaaaagttctgaaaaagaatatctgcctcctctaggagttacacacaacctgaatacatctgtaaggctctttcaaatttccagagcaatgacctttcttgctttttaccagcgaagtaaattgctgaaaagctaggaagtctttctgggttccagcgtatccaagattaaaatatatgtcgaagtattgcaaactaaaacagtagcttagtttcatgcccaaaacaacccaggcatttatctggtgtcttttttgtttgtttgtttgtttgtttgtttgtttgttttagttttaattgatacatactaattgtatgtgtttatgggggtggagtgtgatgttataatacatgtatagattgtgtaatgatcaaatgatgatatttagcatatgcattaactcaaacatttatcatttctctgtggtgagagcattcaaaattctagctattttgaaatatgcaatacagtattgttaactatagtcaccctactgtgcaatagaacaccaaaacttattccttatatctaactgtacccattgacatttctagcattctattttccaaagaaaacactttcattttgtctattcacttcctccattagcacagttcaggccaagataccttggaagtaactggcttccctcttgttcaacccagatgtaattaccctcagctagtaagagatgaatacttgatgattatctgtaacaaaagtggcaacatttttttcacttacaatacatagctggagccatggcatcttttgtagttattgtttttaactaaaatttattgaggtatataatacagtaaatttcacccttgttcgtatacagttatttaattttgagaaatatataatcatgtgatcaccatgaccatcaagataaagaacaattctatcatgccccaaaatgttagaactgtgtccttttatagccagtttctccccacattccacatattccagtccctggtaaccactggtctgttttctgtctctatagttttaacttttccacaatcctatgccaatgtgtcacatgatatatatgccctttgaggcagatttctttcttttttttttttttttttttttttttttgagacagagtctcactttgtctcccaggctgaagagcagtggtacaatcatgactcactgcagcctcaacctcctaggctcaagcgatcctcccacctcagcctcctgagtagctgggactacaggcatgttccaccatgcccagctaagtgtgtgtgtgtgttttgtagagatggggttttgccatgttgcccaggctggtctcaaactccaggcttcaagggatcttccccccatcagcctcccaaagtgctgggattatgggcgtgagccactgtgcctggtgaagtggatttctttcacttgacataaggcatttgagaattttccatgttgttgagtggatcagtagttcattcctttttattagtgagctatattccattttatggatgtactgcagattattttctcattttgcagtttaaggacaattgggatgtttccagtgtttagcaattatgaataatgctgccgtaaatattcacatacaagtttttatattaacttaaactttcatgcttttatttctcctgagtaaacacttaagtgaaaaattattaggccataattattaggctacagttttaatagtagctataccattttgcatttctaccaacaatggctgagaattctattaatagttctacaactaggttctacatccttaacagcatttggtattgtgaagtttgcttttgattgttttcattttagccattctaatagatgtgcagtggtatcgcattataggttaagtttacatttccctgtgtgttaatgatgttgagagtcttttcatatgcttatttagtgaaatgtctattaaaaccttttggccaccgtttaatttctctttttttattttatttttattttatatatatatatttttattatactttaagttctagggtacatgtgcacaacgtgcaggtttgttacatatgtatacatgtgccatcttggtgtgctgcacccattaactcgtcatttacattaggtatatctcctaatgctatgcctcccccgtcccccgaccccacaacaggccccagtgtgtgatgttccccttcctgtgtccaagtgttctcattgttcagttcccacctatgagtgagaacatgcagtatttggttttttgtctttgctgagaatgatggtttccagcttcatccatgtccctacaaaggacatgaactcatcattttttatggctgcatagtattccatggtgtatatgtgccacattttcttaatccagtctgtcattattggacatttgggttggttccaagtctttgctattgtgagtagtgccacagtaaacatacattgtgcatgtgtctttatagcagcatgatttataatcctttgggtatacacccagtaatgggatggctgggtcaaatggtatttctagttctagatccctcaggaatcgccacactgtcttccacaatggttgaactagtttacagtcccaccaacagtgtaaaagtgttcctatttctccacatcctctccagcacctgttgtttcctgactttttaatgatcgccattctaactggtgtgagatgatatctcattgtggttttgatttgcatttctctgatggccagtggtgatgagcattttttcatgtgtctgttggcttttaatttcttttctttcttttttttcttttttttttttttgagacagggtcatactctgtcacctaagctggagtgcagtggtgcaatctcggctccctgcaacctccgcctcccgggtttaagtgattctcatgcctcagcctcctaagtagctgggattacagacatgagtccagccactgcacctggctaatttttatatttttagtagagatggggttttgccatgttgcctaggctggtctcaaactcctagactcaagcaatctacctgcctctgcctcccaaagtgctgggattacaggtgtgagcactgcacccagcctaagtttcattatccatcttattattctattgtaaaagtttttatttattctggaataaaaggccttatcaaatatgtgttttgcaaatatttcctcccaatttgtggctttttaaaaatttttcttaattgtgttttcaaacacaatttctttatttggatgaaatctaatttattaatttttatggattattcttttgtatcatatctaagaaatctctgcctaacacaaaatcaggaagattttcaccttcaattgcttctaaaagttttatatagttataggttttatttattttttatttttttaacaggctttattcactttatttttcttgtataaaaccctatgttgtagccacagctggagcctgagtccgctgcacggagactctggtgtgggtcttgacgagttggtcagtgaattcctgacagggagacttggtaaatacaatcttccagaggtcgggggtcaggtagctgtaggtcttagagatggcatcaaaggtggccttggcgaagttgcccagggtggcattgcagccccgggctgaggtgtagcagtcatcgataccagccatcatgagcagcttcttgggcacaggcgccgagacaatgccagtgcccctgggtgcagggatgaggcacaccagcacagagccgcagcggcctgtcaccttgcaagggacggtgtggggcttgccgatcttgttcccccagtagcctctgtgcacggggacaatggagagcttggccaggatgatggccttacggatggtggtggccacttccttggagcacttaacacccagaccgacgtggccgttgtagtccccgatagcaacaaacgctttgaacctggtgctctggccagcacgggtctgcttctgcaccggcgtaaccttcaaaatctcgtccttgagagaggcccccaggaaaaagtcaatgatctcagattcattaatgggcagggagaagagacagatttcctccagggacttgatcttcatgtccttgaccaagcggcccagcttggtgacgggcatgcactccttatcctcggccttgccttctcgagctccacggcctcagcccgggccccgtccacggccgcaaccccggccccggatgccactgcggaaacctccgcggaagccaccgcggttccccatcccagggccaccagggcctccggccccccgccccccccgcccacctcccgctgcaccggcgttatcagccatttggtgttttctcggagaagaagcagttataggttttagatttaagtttatgatacgttttgaggtaatttttatatatggtgctattatggactgaatatttgtattcctccaaaattcatatgtttgaaaccctaaccctcaatgtgatgatattaggaggcggggtctttgggagataatttaagtcatgagggtttagccctcgtgaatggaattaacacccttataaaaggaaccccagaaagctctcaagccctctttttcatgtgaggatatcagaagtcagcagtctgcaactcagaagagaggcctcaccagaacctgatcatgctggcatcctgatctcagacttctagcctccagaactgctaggcacaggtgcataccaccaagacagattttttctttttttttctttttttttttttttagatatggggtcttgctatgttggccatgctggtcttgaacccctggcctcacgtgatcctcctgcctcaacctcccaaagtgctgggattacaggcaggagtcaccattcccagccaatttttgttgttgttgttgttgttgagacagagtcttactttgttgcccaggctggagtgcaatggcaatatctcagctcactgcaacctccacctcccgggttcaagcgattctcttgcctcaacctcctgagtagctgggattacagacgcccgccaccacaccttgctaatttttgtatttttagtagaaacggggtttcaccatgttggccagactggtctcggactcctggcctcaagtgatccgcccgcctcagcctctcaaagtgctgggattacaggcatgagccaccacacccagccccaatttttgttttttataagcctcccagtctatggtactttgttacagcagcttgaactgactaacatacaaaatataggttgaaagctttgggtttatttttgtttttgtatatgtttttgtttttgtatatgaatgccaaatttttccagcaccatttattattattattatattattcactcctgttgcccaggctggagtgcagtggcatgatctcggctcactgcaacctctgcctcccaggttcaagcgattctcctgcctcagtctcctgagtagctagaattacaggtgcccaccaccacacctggctaatttctgtacttttagtagagatggggtttcaccatgttgaccaggctggcctcgaactcctgacctcaggtgatccacccaccttggcttcccaaagtgctcggattacaggcatgagccaccatgcctggtctttccagcaccatttatttaaaagattatctattggtttgcctttgcatctttgtcagagtcagttaatcatgtctgtgtgtgtctatttacatactctcaaatctgttctattggtctataagtctatttctttgccactaccacattctcttcattactgtgggtttacaatatgccttgatatcatacaatgtgagttcttcaactttgttctttttttcaaaacctttttattcttctacttcttttgccttttcataacaattttaaaactgcacattcatttctacaaagattgctctgggaagtttttaacaaattattcttagtagtaccttatagtggggattaattatgaatttaatttaattttttaataaagtactatattaggtttttattgctgtgtaacaaattaacacaaacttagcttacaaacaacaaacatttattacttcacagtttctgtatgtcaggaatctagacactgctcaagctgaggcttttgctcgtggtgtcacaagactgcagtcaaggcgtcagccagggctaaggtctcatctgagatttaggattctctccccactgcacattggcagaattcttttttttgagacagagtctcactctgtcacccaggctcgagtgcagtggtgcaatctcagcttcactgcaagctctgcctcccgggttcacgccattctcctgccgcaggctcccgagtagctgggactacaggcgcccgccaccacacctggctgatttttttgtattttttagtagcgatggggtttcaccatgttagccaggatgtctcaatctcctgatctggtgatctgcccacctcggcctcccaaagtgttgggattacaggcgtgagccgctgcacctggtccagaattcacttttttaaaggtacttaatatgtcaaccttattgtttctctatatgcacatttatttgttactgaaaattgaaaaaatagcatgttggaattttcttttaatataattcaaatttttaaaaaccagaaaatctaattagttatgctctaatcaaacttctcaatgttttcttttcattctttccccacaagttaccgtgcttcaaattccagatgttgggattcatctcactgacttaggttctaaaacatatgggagccctgtgtggtggcttatgcctgtaatcccagcacatgataataattcagacttattggtgctgctttgggttcaaattaaaaagtagagctaaagtatattcgagttattcaaatacattcaaacttacacagattccttataaattactgctatcaaggtaagaaggaaaagatacaagaagaaaaagacatcactcatgataggttattattggtatacagtctatcctagcatagactgctgcataaatttgccagcaagaaagaaaagtacaagaataaagtttatgactaaatcacctcattgtcataatttcctattctagcattctcagaaggatcccatctatgatacatgtagaaactgcagccacatttgaatggttcaattcttgattcattctgaaccctcttaggcccaatatttgttagctttcgtttaagctgagaaaaatctgttgagtaacaggtatctcagttttaccatcctttctttccacaaataacgatgtcctttttcctctcctcctgtaaggcaaaccatctctgatgtcctggaaggtctttgcttttctatcttgttgttggggtgaaccttctggtggaggggaagggaatttggtacctgggtggagaatcaagttatcaaggttctttattaacgttttggagcagaagttgtgagaggcctctgaatcatcctgggaatctttctttggtgagcatttgtgaagactttgggatcaaggtgcacatttgtgatgagtcgatcaatggtctagtcatagctctaagctccttctggatctttagtcccagcagaatgtgttgctgaactctcaaattgctacaaggtaccctggaaagaactatgtagcccagaaagagcctgaaaacctaaactccaacaaatagtgatgaacaagttgactacagtttttttttaacaattttaaaattcattgcagtttgcttctccaaggccagcaggaaagtgtctctgctgcttcaaatctctacaatttctacctcggacctctagacactcttttgaaagactcacctgattaggtgaaagcaacccaaactaatctctcttgattaacttgaagttaaatgattaagagacttaattacatttgcaaaatcccttcatatttgccacataacaaaatctaatcatgggagtgacatcatagtcctgcccacactcaagaggaagggatcatacggggcatgtataccaggggctggaagtcttggatgccatgttagaattatcctaccacaagtactgttgagagtatctatatcttaagtggactttgaaggagtatatcttccaaggaatttatccatttcacttaaattgtgagtttatagcatatgacattctcttatttgccttttaatatctgcaggctttgtagtgatgtcattcttgatactgggaatttgtgtctgctctgtttttaatgatcaatctgattagagatttattaatttaattttccaagaaacaacttttagcttcattgattttctctatttttttctgattttaatgtaattgctctctgttcttatttttcttatgtacttccttctgcttgttttgggttaaatttgctcttctgttttagtgttctaaggtagaagcatagataattgatttgaaactattcttctattctaattaaaagcattcattactatatatttccttctaagcttccctcatgtgtggtgcaagaaccttacaacaacatgtttttattcatttaattatgctttttaatttcccttgagattttctctttaacccatggattatcttaaatattttgttatttcttgttattattctgttattgatttctagtttaattacactgtcatctgataatacactttgtatgacttcacttctttaaatctgttagtattcattcatgacccagtatattgtatattttggtcaaggtcccatgggtgttttgaaagattgaatttctggctgtcattagatgaagtgttaaataaataccagttggatcctgttgctttatttttgtgttcagttcttctgtgtccttgctgattttcattttagtggttccagcaattattgagagaagagtgttgaagttaccaattataattgtgttttcaagtgtttctttctattctatcagtttttgctgcctgtatcttgaagctctgtgatttagtatgtatacatttaggaattttatgtattcttggtgaattgacccttttattgttatataatatctctatttgtttctggtaattgtcttttctctaaagtttaccttattagatattaatatacttaactccagctttcatttcattagtatttattatagttttgctaattctttgacttttaacctcctatgttattgtattttaagtgagtttctttttttttttttttttttttttttgagacagagtctcgctctgttgcccaggctggagtgcagtggcacgatttcggcttactgcaagctccgtctcccgggttcacgccattctcctgcctcagcctccaaggtggctgggactacaggcacctgccaccacacccagctaattttttctgttttttagtagagagggggtttcaccatgttagccaggatggtctcgatctcctgacctcatgattcgcccgccttggcctccaaaagtgctgggattacaggcgtgagccactgcgcccagcctaatcaagtcttcttttatatctcagcctttttattgatgtatttacatcatttacatttaatgtaattatgaatgttaagatttaagatttccaatttattgtgtagaacactgcatgttccttctatttttcattcctgtcctcctttccgtttcttgaatatttttagtattccattttaatttatatatggtagagctttttgtaatgctttattaagatataattcacatactatacaattcaaaatttaaagtatacaattgagtgattttgtgtattcagtgttggacaaacgtcaccacaaatgatattagaacactttcattatcccacagagaaacccttcaccctttggctgttactcttcaaatttgtgcccaacccccagtcctaggcaactactcatctactttctgtctctatagatatgccagtgccagatatttcacataaatataattatataatatgtggtattttttgactggcttcttttgcttagcataatgttttcaaggttcatccatgttgagcatatactagaccttcattccttttgctgagtaatattccactgtagagctatacaacattttgtttaaccattcgtcagttgatgaatagcttatggatacttgcattatttccaccttttggctctcatgaataatactgcaatggatatttgtgtaccagtttttgtgtggacatatgtcttcgtttctcttgggtacatacttgggattggaattgctgggtcaaatggttacttaatgttttgaggaacttccagaatattttccaaagtgactctaccattttagattcccaccagtagtatatgaggattttgatttctccatattctcattaatacttgttattatgtatattttttattataaccatcctagtgtatgtgaagtggtatcttatattgtggtttttgttctgttacccaggctggagtgcagtggtgcaatctcagctcactgcaacctccacctcctgggtttaagtgattctcatgcctcagcctcccaagtagctggtattacaggcatgtgccaccaccacacccggctaatttttgtatttttagtagagacgggtttttgccatgttggccaggctggtcttgaactctaggcctcaagtgatccgcccacctcagcctcccaaaatgttgggattataggcgtgagccaccctgctgggtctatgttgtgtttttaaataaatctctttgtatagtttgttttcattggaggttttttatttgtttctgagtgtgtgtgtgtgtgtgtgtgtgtgtgtgtgtgtgtgtatgattgttctaggtattagaatatgtatacttattttatcacagtctgtattttccactttgagtacaacatagaagccttatcactaattaggtccctttacccttctttttgatatagttatcttaaaaatcacctctacataaactgagaaccacatcatacagcaaggttatctttgctttcaatcatcgaaacataactctaaaaattaaagaggataagccaggcatgcactgtagccccagctactcaggaggctgaggcagggaggattgctttagcccaggagttcaagaccagcctgggcaacacagtgagaccctcattaaaaaaaaaaaaaaaactaaagaggttaaaaacagtctattatgtttctcacatatttacattctgcttctcttttttcattcctgatgttctatttgtttcatgagtgttcatagttggttgttggagcacttttttgagagttgttttaaaattcttgtcatataattctaatatatctgtgtcatcacagtgtcagtgcctgttgattatcttttcttgtttaaattaatattttccaaacttttgagttgtttcataattttggattatatctttgacattttctgtattatgagactctggatcctatttaaatatcttactttagtaaacggacaatctgtcaaggtttagaatgaacattctctttcaattttgtggttcaaatttcaagttagttttcagagatcttgcagggctcttctggtttgccccacctctgggctgctcaggcccatttagaaccaaggcaatgatctaactatagttcaattctcagagcttttgctatcttgattctgaccagtttcacacatgggctgctcaaaagtgtcctgactttttgtaccaatttaaagaattacttcctccaactttgtcctctccatattcctatctcctactctctaattggaaaggggtaaaatactacctcattgctatcctttgcttaattcggggcattgatagtttgacagggctcctcccaacggtctctatagtgtccagtggggaaaagaggtgcagtttcttttattgtatgtgttttgagtagagcatagtcaaatggttcactcagcagagttacctgcctcccagtctttttactagagagagtagacttctcttgagaactttggcatctgtgcaccttggtgtttctggattataggctactgtagcccataatgggaggcaaaagcaaacaagcaaacagaaaacgcttcagggaacttaccaccaggttgtctctcaagttccaaagttcctagtccaagatgccttcccttctctgcctgtcatttattttgccttttgccctggggattttagttgtaattagcaggaggatgaggatgctatgtacttgctctatcttgtcatcttgtctagaaagggaaatcaactgtgatttttttttttttttttttttgagatggagttttactctcgttgtccaggctggagtgcaatggcacaatcttagttcactacaacctccgcctcctgggtttaagcaattctcctgcctcaacctcccgagtagctgggattacaggcgcccgccaccacgcctggctaatttttgtatttttagcagagactgggtttcaccatgttggtcaggccggtcttgaacttctgacctcaagtgatctgcccaccttggcctcccagagtgctgggattacaggcgtgagccaccgcacccagcctgtaattcatttttgtatcactcataaaacataccacaatgcctagtgtacaattggcattaattaaatatttgtttcaaaagacaagagtgagtgagggaggaacataagtagctctgtatctcaaaatgttagttcagcataatatgattgagtcatcagtttaaattctagccccacctactttcagtgtgaacatagactggttacttaacttatttgagcctcagtttcctataatatgacaatggtaatatctacttcttaggacaagtaaaaataagatgatatacttaagcatttagcacaatgtttgataataaacagcgaatatagttcctacttatattagtaataacaattatcaaatatcactatctgtttcttatccttataggaaactctgctcttaaagacaaagaagatcagtttgggagaacaccacttatgtattgcgtgttggctgacagattggattgtgcagatgctcttctgaaggcaggagcagatgtgaataaaactgaccatagccagagaacagccctccatcttgcagcccagaaggtgagaagtaaaatttccttgaagagtaaatgttttgtgtgatgtctgctagttgattagtggaactatgcaatggacagataataaagaagtctcaaatgcatgactcataggttttatatattttctctaaaagctgtctttaagctgcagagagtaaaagcacagataactatcagcggctgcatttcaggttcctcaaacagtagaatttattctgtgatctaaagtttattgggaaaaaagtgatcaaatttatatatacaatgtgatgaaacaatgttaccaatctatgtatagggaaaaaataaagaccaaaaagaaatactcaaagatattaatagtggttgggtttaaatttggggaatatatatggaatttttttacttttcactgtttaaaattttttccttaatgagtattacttttactataaaaagttgaaatcccagcctgggcaacatagtgagaccccatctctacaaaaaattaaaaaattagctgggcatggtggcgcacacttgcagtcccagctacttgtggggctcaggtgggaggatcacttgagcctgggaggttgaggctgcagtgaactgagttcacatcactgtactccatcctgagtgacagggcaagaccctgtctctaaattaattaattaattaatttaatttaatttaaaaggttgaaatgtcgcttgaaatatgtggcattaagaagcataaaataaatttattttctgaatgtattttcaactttttaaaatctaaaactatgttgccaatattaatgatttcacatttttaaatgtattattaagagctcagatttttaagattaaacccatcaaacagataaaataggaagcttctacatttagttaaagacttattcacctaaaaactatttttcttccataaaattttggtccataaaatagatttccagtgcctggtatttttctttttgttattttagatttctgtattttttgaataaaaagcaattaaaatgagttagatccagcgggaactattagagttattttctatttaaaaatgtgaaccagatatagctaattaattaaggggttagaaaaatacctttcattagttgaatgcataaaaaaaggctgacattaagttatactactgaatatgctagttatatgcgcttctcagttaggtctgtcaggttattttcaaagttacttctcttgaatttggtttttattatagtaatttttttaaaaatctccctcattttcaatctcagttttaactacttctcgggtatttataacctttcacttaggcttgtcagctaatgaaattattcactcgagaaaggtaactccatttaacttgttatcataaaaaagcaaatagttcagattgggaaaagccgcaaaattaagactttgataccctttagatttttcattatgattgatttaggtgtaaaactcagcttcaaaaatgtagagtgaaggaacctagcttaacatcaagtagattatgtggagcaagtgaggatttcagttgatgatccaacagtataacatcctgtagaagtattatatgacaaagatggttgaaagaaggggaatgtacaaccagacatgttagctgtaatcttttcatcagataccatgcattgttttctttagtttttttgtttctactttgattttttaattataagtttttcatagtatcgaagaataaatagaactatgatttatgtggtggtatttacatagttggttttataacagatttcatgttctttcaagtatctgataattatgcatttccttccttactctgtgttgctgtttgtttttacatgcttgccaaaagcagtaatggatccgaattcccagaaaaggatagtaataattctttagtattctcctgtgtccaattaaatctgggtactgtgttagttcatttgtgctttatacaaagcaccagcattcagagatgaaatatagtatgcaccagtcaggaataagatagtaaatgatctacaaataattttcaaataatagttggagataatatgtcccaggcctgtaatactccttgcccccaaagagacacaagcacaaattctctttagagaaaacatcttcaccttaaacttccaagattttcccatattaaataaaccaaacgtgaactgacaatgaaagatcaccaaactcataagggaacaatctactatgaatgagagtcagcagaaacaacaaacagatttagtctatgaaaaacatcagggattggcatcattagagaaacaatataaaataaccactgatggaatgcttaaagatatgaaagaagaaatcagccaagcacagtggctcacacctgtaattttagcactttagaaaggccaggcaagaggctctcttgaggccaggagtttgagaccagccagggcaacatagagagactctatttatttaaaacaaaaaaaaattagctgggtgtagtggcccacacctgtagtcctagctccttgggaggctgaggcggaaggattgcttgagccctggagtttcagaccagcctgaacaacaaagtgagaccctgtctcaaaaaatatatattttatttaatattataattaaaagaaggaatctggcagggtgcagtggctcacacctgtaatcttaggactttgggaggccaaggtgggtggatcacttgaggccaggagtttgagaccagcctgggcaacatgacgaaaccctgtctctactaaaaacacacacacatacacacacacaaattagttgggcatggtcgtgagcacgtgtactcccagctacttgggaggctgaggtggaagggtcgcttgagcctgggaagtctgcagtgaggagagatcataccactgtatttcagcctgggggactggagtgagaccctgcctcaaaaaaaaatgtaaatacataaaaaaattttttaaaaaaacaaggaatcagaaaaataagaaaccaacaagacactttcataactaggcatcaattctggccataatggcttattttaaactaatttgcctgtcaaaaaaatctgtaaaaactgaataaaatactatatacattgtttgaaggcattgagaacaatcagcacaggcaggatctaagagactacaatcattcaaagaagagaaacacgtaaagtgagtaccacattcatcctggccttttcctttatgacattttccaaactggaatgcaaaagaatacaaccctaacaggaagcagcagccttaccaggctgaagaaactgaggcagagtttggagataatagtggctggaacttgaaagtcaaaatcctggagaggagggaattgcagagaaagaatgcaagaatctggatacaaattcctcacaagtttttaacagattcctaaactgtgcttgtatagggtggtgctctaagaaacctagtattaaacaacagctgggagactagacagctgagtagagattattttaaattatcctatattttcttttatgtttaaatctcttaatatataacacattgatttttgtatggggatccattctcattttaaagcatatggataactaattttcccaacacaacctagttcattaatttttggccatttagtatctgctctctgtcagttccaggcttttgtactacgaactccctatgcatttctgtttttttaaatgagggatcctgaatactagggagcctttgggaaatttgaaaataaaagttacatgatcagtgtattttagggggactaatatggcaactaaagctactttggaagagaaagagtggagatacatagattgctattatagttcaggccaatagagaggaattgggtttaagagatacattatggaggcagaagtgttcattcaacaagcgtttgttaaatatctactatgtaatcatgattatacaactagagagaatatgaaaaaaatgaattacgtatgttagcttatagatggatgctctcagtacccatccctattaatcgtcatttccctttgtttagtgaaccttctgatatattggatatcaaatatcctttccaagtattgtctgtcccacttaattctggtatccatgaatgcagaagtgtgctatttatgtaatcatgaacactcatgtatatgtgtataccttcattcattcaacatgtgttaaaactattatgtaacaggcatcatgttaggccttggaacacaaaggtgaacaacatgattcctgctcttaagttgcttacaaagatcatggatgaagatattaaatgataattaaagctgattgatctaccttgtaatacataagtgttttataaaatatctatagccataatagtcattgttattattgacatgagaagaccaaacattctcatacattatttattatgtttctagtttttgtgtgtgtgtgatagtgaactgtattatgttatcttttcttgggttcattagtgggaaaagctcatattcccaaagcattttgctcacatctctattagagccccattaccttatattgtaattattgcttacttgtctcttttctactaggctggagctccaggcaagtagctctttttgtttgtttttgaatctctctgaatctagtaagttctgacatgtcttggttgaatgaattttattttacttttatagaaagtcattactaatacaaatacgagaccttttgtttattggaaacatttatctactttaaaaatatatatgtttgtggaaaaacttattgaactgtgctgcttggcttagttattttggcacatgttcacttctctggaaacaaattactgttagtccaagaaactgaagaaatggtacccatgagaataaaattaatctcaatatactgaacatctgcacctaatttgtttttcatttagaaccatcagtttaatccaagaaagcaattggtcataccttttctgggcttctcacaaaagatatctaattgttagaaatgttttgctccagggaggctactatttctctgacttctactgatacatttgttaataaggataaaaaagctttagaaatattagtatatgttaatagttatgcatgtttaatcttccaggaggttatttatttggcttcaagaagcttaagactacccactttgacaaattatatcacagtaaacacaaaaattaaagaaccttctggttgtggctgcattgtcctttttttaaattcataaataattctcagttcatctatgaaaattgaatgtttattttcagttttcaaggtacgctgtttccatgttactgatttacaaaaaggagaaagaatacctctgaaacttttcaggaacacttataccaggtaacactattaggttttcttattttgcagatgcacacacaaacacaacaaacaatccacgccccagtccccttcagctctgtattccccctcagtacatatatagctctaccataactcatcaccacagtttattggagattttgtttatctaggtctcacgcccagtaaagctatttgaaggcagtgaccatgtcttatttgatttcatagttacagtcctagcatagcttctgccacttaataaagacagtaatttatttaaggaatacatgaatgaatgaatgaatgaatgaatgaatgaatgaatcagtaaatgtgaatatcaaatagatttaatatgaagggcatggccttcaagactgttgaaatttaaatgaataattatatttattccttttcactatccactccctgcccttacaattttgcaatcaggattttttaagattttctgtgagcttaatttcttaataaacaatgctcttgtatgcctcaatttcttcatctataaaatggaataatacatcctatcttctatgtagggatgatgagtccttagatataaagcattctgtttgttggagaaatttattctcaaggactacattatcaatattattgctattagtcacactacaatgtaggtgcaaacatcaaattactgtttagagatcagcagatgtcagagatagaaaggctctttgggatcttcttgtccaatttgtccttggatgaggaaactgaactctactccttttacatctcttctctttaaaaattactgtactcacattctctttgcctttgcatatgcctggaattttttttttttaattatcttaagcatagagataagaaagaacagggcctggtgccatggctcacgcctgtaatctcagcaatttgggaggatgaggcaggaggatcacctgaggtcaggaatttgagaccagcctggccaacatggtgaaaccccatctctactaaaaatacaaaacttagctgggcgtgatggtgcgtgcctataatcccagctactcaggaggctgaggcaggagaatcgcttgaacctgggaggcggaagttgcagtgagcggatattgcaccactgcactccagcctgggcaacagagtgagactccatctcaaaaaaacaaaaacaaacaaaaaacaatggagaactgagaaaacattaggtacctaatacctcgaagagatcaaactcagtatttcttatttttgcttcagaatttttaaacaaaactatagattcacttgaagtcttccatttatcttccaaaacccttctttccctgtctcctcagtctgtcttgattttgttggtttcaattcccatgcatatgtttctacctttactttatgtgtgtgtgtgtgtgtgtgtgtgtacatgtgcacatacactattatgggtaaaccatattattttgcatctttaaattaatggtattatactgtgtgacatttaccaacttgctttttcaacttaatattatgtatttgaaacttcttcatgttgaaacatgtagccctatttcataaaagattatatccagatgcctaaaagacacatgagatggtacacaacatcattactaattagaagcaaattaaaactccaatgagatactactacatgaccagtggaatgtataaagtaaaaaagtctggcaatcaatattgattgatggtgaagatatggagcaactggagctccccaacatttttgttgagaatgtatattggtacattcactctcgcaaactatctgactatatctgccaaagctacacacacacacacacacacacacacacacacacacacacatacacacatccctcatctcaattcatgctcccagccccggtaatacctaagaaaaataagtgcctctttctactagaagacatgtatgagaattacatgatagttttatttagaaaagcaaacattcctttttttaacttctatttttccataagttattgggggtaaaagtggtatttggttacatgagtaagttctctagtggagatttgtgagaacctggtacacccatcgcccgagcagtatatgccgcaccatatttgttgtcttttatcccttgcccccattccactcttccccccaagtccccaaagtccactgtatcattcttaggcctttgcatcctcatagcttagctcccacatatcagtgagaacatatgatgtttggttttccattcctgagttactttacttagaataatagtctctaatctcatccaggtcattgcaaatgctgttaattcattcctttttaaggctgagtagtattccattgtgtatatctatacaccagagtttctttatccactcgttgattgatgggcatttgggttggttccacaattttgctattgtgaattgtgctgctataaacatgtgtgagcaagtatctttttcgtatgatgacttcttttcctctgggtagataccgagtaatgggattgctggatcaaattgtagttctacttttagttccttaaggaatctccacactgttttccatagcggctgtactagtttacattcccaccagcagtgtagaagtgttccctgaacgccccatccatgccaacatctactgtttttttattctttgattatggccattcttacaggagtaaggtggtattgtgttgtggttttgatttgcatttccctgatcattagtgatgttgagcattttttcatgttttttggtcatttgtgtaacttctttataaaagcaaatattcttaatagtgcagacaacccaaatacgtaccaacaggtgaatgagtagctaaattgtgatgtattcctacaatggaacactgcatgaatgaactgctgacacgttcaaccacataagttaatttcatagacattatgttgagtggaacaagtcagacacttataaaaaatttatttgctgttcatatcaacctcaggaacaagaaaaactaatctatggtgagtcaaatcagatttgtggttacctaaaagatgggtaatatactgagaagaatatgaataagctttcaggggtgctgaaaatgttctggatcggtgtgtgtgttggttacattaaaaggtaccagtctgtatgcttaagatttatgcactttactgtatatgttatattctcaatttttaaagtattatttaaaaaatgataaaatgttcagaacttggtagacattatttgtagggaaggtaagggaggacggaaccaagaatggttcctgacctagactgttaagcactcaggtcaaatttcccccatccttagcctcaggagctatatgaaagccctgtgtctatgctcttatccaggggttcttagatgaacatgcagcagaatcacttggagaacttgttaaaacatagacgtctgggccccaccaccagtgtttttaattcagcagggctggtgtggggccagagaatgtgcttatctaacaagctcccaggtgatggtgatgatgtaggcaacacactttgagaatcactactctattctgcttataccatttgtctttgctgcattttcaatgctattggctccataacctctagatacctatcctgttttactggggactcttttgactggtattcctagctcttgatgacatgactcatagaggtaggatatactagtccaggtacaattttgagaggaagttatcgagttcagttgtgaaaaatggaattttaggcttcggtgataatgactagtatgaattgtgatagtttgcatctccaaagtaaggtcttggctggagttattagtatacatatagaaaccatagaagtagttgaagggctcaggtatggtttatagatgggaagaggactagaaatagaaaacaccaatatttaaggtttatttacagaaaataaacttacaaaggagacagtacaagataggagaagaactagatcagagtggtgttatggagccagagggacaggtttcaagcagaagaggatccatttgtttcatcttttttactatgatgctaagatttgaatagttccttttccactaaatgactcaataaatggatggatataaatatgataagaattaaaaggcttccactggatttttcagttagaaagtgaccttagcaagagcaatggtatttagtggacacacaagctagatatatatcactgttgagtaaacaggaaatgaggatatggagacagtacgagtgattgattaatggggttattgatcaggaaaagtatggacggaagaaattgtggtgggaaaatttttaataaataataatctctcccagtataaccgtcacccactttcaataaatattaattcataaacttgtttctgtagacttcaaactgttttattatatattctattatttcatccataaatatttcagtatatttataattcatatatccccacgatatcattgtaccaaaaagaaattagtgataattctgtaatattattaaatacctaatcagtgttcaaattttcctgattatatctcaaacatttttttacagttgatttattcaaatcaggacctaaacaaggtctatacattgtatttggttgataagtcttttaagtctcttgtaatctaatagatgagagatatttgaacacgtttaaatgttaaggaaaaggagacatcaaaaatttaggagaaagaatggattattgatggatcaaagtcgctggggagatgggaacagaaaggacagtcgggtctgggcacagtagctcacgcgtgtaatcccagtgctttgggaggctgaggtgggcagatcacctgaagtcagaagttcaagaccagcctggccaacatggtgaaaccccatctctaataaaaatacaaaaattagccaggtgtagtgacacacgcctgtaatcccagctgtgcgggaggctgaggcaggagaatcacttgaactcaggaagcagtggttgcagtgagccgtgatcgcgccactgtactccagcctggtcagcagagggagactccttctcaaaaaaaaaggacagacagttggaaagtttagatacacagtaggaaagtttgttcaatgaatgagtatgctatgaacttagaatgtatctgaatattcttgacaatcaattataaaatatgaaaactggaagggccttggaaattattcttattttacacatgggaaaacaaggagttctaggttttcttttgattagagggagatgttttgtccctaaagcaggggagactggataggaaaggaaaccttaggaatataggggaccactgctgctcctctcacacctccccagaccctaacacccttggttccattaaactcctaaacttgggcttcaggaacagaggaagtgagaaagctagtgtttaatgataacttgttttttcactgcataacaaggaccttgttattttctggtgctctgcagagtaaatatagcataatgaaaaagaaatggtatctggtatcagaatttataagatctatattcgagtcataattcaaagacatttggtactctgtgaccttgagcaggtagtttaactctctaagcctctgtaaaatggagataatatttctaacatacttacatcataagattgtaagtatgaaaatacattgaaatactgattgatgtgtatgccaaagaccctgaaaggcagcaaagttatacatagtgtttacaaatatatatgagtatgaaacatctgaaaaccatataaataatctcttttgcaaatataggtactttttccaattgtatttaaaagttgatgtgattaattgatgtgattaagaaaatggcatttcatttaaaattgtagctgaattcaattctcatattttttcaatgaaccaacaaatactaaatttaaacattaaggttctactgaattttttgtaggatttttttgctgttttttaactttaaaaagagttaaactttaaaagactgagagtcaacgtaataatatatgtgtataaagtgctttatttataagtaactttaattgagaataacagcaagtaggtatagccatctagtgactttaactttctttttaaaatatatgtaactcctcagccaggcatggtggctcatgtctgtaatcccaatactttgggaggctgaggcaggtggatcacctgaggtgaggagttcgagaccagcctggccaatgtggtgaaaccccatctctactaaaaatacaaaaattagctgggcgtggtggcacgtgcctataatcccagctactcgggaggctgaggcaggagaatcgcttgaacccagtgggtagaagttgcagtgagccgagatcgtgccattgcactccagctagggtgacaagagcgaaattccgtctcaaaaaaaaattttatatatatatatatccttatacatttaaccctcagagcaacatctttttattctttaattggaaacattagatttgagttgaagaaacattatcatatacttcaaccattaatgtttctgtacccagcttctaccctttccggctctgtcatttgctcaaacaaatctgtcttatttaaatcaaaagagttgcatataggcacttttgataaagagtctttaaccttgaaattttattgatttcgacttttgtttttaaattatttttattgatggtttccttttttttttttttttttcctttcaagagagagtctcgctctgtcacccaggctggagtgcagcagcacgatctcggctcactgcaacgtctgcctcctgggttcaagcgattctcctgcctcagtctccgaagtaacagggattacaggggcctgccaccacgcctggataatttttgtatttttagtagagatgggtttcaccatgttggtcaggctggtcttgaactcctgacctcaagcaatccacctgcctcagcctcccaaagtgctgggattacaggcgtgagccaccgcgcccggccttattgatggttttccttgtcaaaacattatttaatcaaaacagatgaaagcatgtagggagagatttcttttacaaacatattttgtgcttctttgttttatattatagggtacagaaatgacttatttgttgttgttgttttcatgatgcacaatgtgacctaatttacctaggcttactcttttctcagttctcgtacttctgtgtttctctgattcattgatatattgaccacttgttcatttcagaattttctctggactttgatactgcagtaacttatttttctgctactcctttgatagttcattgttttctttattaactcctttcctttaactcccatttctgccccaagataaaagtctttctatatattctacctttcagaggtctcatctacttctataagtttcggctattttccctcaaatatttgtctctagccctagcctctccccttattccagacttatatttccagctatcttctagaaatctctacctggatatcttcccaaaatctcaatttcagcatatctgaaacaagaccttaccttttaacctgtaatcagtcccgtcatctgatttttaaaaacaatttattgaggtgaaatacacatagcataaaattaaccctttttttgtggggggagatagagtctcactttgtcacccaggctggagtgcagtggtgtgatcagggctcactgcagcttcaacctcctggattcaagtgatcctcctgcctcagcccccaagtagctgggactataggcacgtaccactacgcccagctaatttttgtattttttatagagacaggggtttcgccttattgcctgggctggtctcaaactcctgagctcaagctatcagcccgccttggcccaccaaaatgttaggattacaggcatgagccaccgcacccagacaaaataaccactttaaagtgagcaattcagagaaattttgtacattcgttatgttgtgcaaccactacctctatctagttccaaagcatttccatcactctcaagtaaaaccacttatccattaaacagtttgtctccattgccctctctccctagcccctggcaaccaccagtatgcattctgtttctatggatttatagatatttcatgtaaaaaggaatcatatatgacctttgtttcatgcacgtctgtgtaaagagaccaccaaacaggctttgtgtgagcaacaaggctatttatttcacctgggtgcaggcgggctgagtctgaaaagagtcagtgaaggaagatggggtggagctgttttataagatttgggtaggtaaaggaaaattacagtcaaaggggggttgttctctggcgggcaggagtgggggtcacaaggtgctcagtaggggagcttttgagccaggatgagccaggagaaggaatttcacaagataatgtcatcagttaaggcaagaataggccattttcatttcttttgtggtggaatgtcatcagttaaggcaggaaccggccatctggatgtgtacgtgtaggtcacaggagatatgatggcttagcttgggctcagaggcctgacattcctgtcttcttatattaataagaaaaataaaacaaaatagtggtgaagtgttgggacagcgaaaattttgggggatggtacggagagataatgggcgatgtttcttagggctgcttcgagcggaattaggggcggtgtgggaacctagaatgggagagattaagctgaaggaagattttgtggtaaggggtgatattgtgggactgttaggagaaacgttcgtcatttagaattactggtgatggcctagatacggttttgtatgaattgaaaaactaaatggaataagagaaggagaaaaacaggtattaaaggactaagaattgggaggacctaggacatttaattagagagtgcctaaggaggttcagcatagttctgccagcaaagattatttatttacttcaagagttaagagtggcagtttggggatagctccaggagatatcagctgtgatggcttggagaaacagtgtaaaccagcagtgtaaacaagagcagggcatgtgtgagtagttgagaacagtgaataggagtatgattagacagaagatagtagggatgacaagttttttggggcacagtccaagttggtcttggaatgatactggggcctaataaaaaggagcatctatacaggagcttaaatgagctgtaccttgtaacattctgaggacaggcctgaattctgagaagggaaagtggtaaaagtattgtctagtcctttttaagttggtggctgagcttggtgaggtgtgtttttaaaagaccgttagtccattctacctttcctgaagactgaggaccgtaagggaaataaaggtttcactgaataccaagagcctgaaaaaatgcttggctgatttgactaataaaggccggtctgctatcagactgtatagaggtgggaaggccaaaccgaggaattatgtctaacagaagggaaaaaatgaccgcggtggccttctcagaccctgtaggaaaggcctctacccatccagtgaaagcgtctacctagactaagaggtattttagttttctgactcggggcacgtgagtaaagtcaacttgccagtcctgggcaggggcaaatctccgagcttgatatgtaggaaagggaggaggcctgaacaatccctgaggggtagtagaatagcaaatggaacactgagaagtgatttctttgaggatagatttccaggatggaaaggaaatgagaggttctaagagacgggctagcggcttgtaacctacatggaagaggttatgaaatgacgacagaatagaatgggcctgtgaggctggaaggagatattttccttggtctaagaaccatttgccttctgtgggaagagattgataggtggaagtttcagtgggggagtaggtgggagtgactgacgtgaaggagaaaaactggctgtgagggacagaagttggaatgctagctgcttgtctagccacctaatcagcgtaagcgtcgcctagagcaatgggatctgatgccttttgatgccccttgcagtgaatgactctagcttcctttggaagttaagcggcgttgagaagcgtttttattaaagagggattaatgatagaggacccttgtttagtgaggaaacttcttgcatggtggtgcacgatatgaaaggcatatttagagtcagtataaatattgacgcatagtccttttgcaagagtgagggcttgggttaaggcaactagttcggcttgctgagaggtagtggaggggggcagagcggtagcctcaatgatagatgtggaagatactatagcatagcctgcctttgctggtgagtggcatttaggcctggtggaactgccatcaataaaccaaatgtgattagggtgaggaacaggaaagaaggaaatacggggaaatggggtgaatgtcaggtggatcagagagatacagtcatgagggtcaggtgtggtatccagaataatgtgggaggccgggttgaagtccgtgccaggaacaatggtaattgtgggagactcaacaaagagtgaatatagctgaaggagccagggagcagagagtatatgcatcaggtatgaggaagaaaatagattttggaagttatgagaactgtagagagtcagttgagcatactttgtgatttttagggcctttaaaagtattaaggcagcggcagccgctgcatgcagacatgagggttgggttaaaacagtaaggtccagttgtttggacagaaaggctataggacgtggtcccagctcttgtgtaagaattctgaccttactaaccatgcctaggaaggaaaggagttgttgttttgtagaagggattggggtttgggagattagccggagacgataatcagggagagcacgtgtgtttttatgagaattatgctgagataggtaacagatgaggaagaaatttgggcttgactgaagtaatgggggctgtctgtgaagccttgcagcagtacagcctaagtaatttgctgagcctgatgggtgtcagggtcagtacaagtgaaagcgaagagaggctgggatgaagggtgcaaaggaatagcaaacaaagcatgtttgagatctagaacagaataatgggttgtggagggaggtattgaggataggagagtatatgggtttggcaccacggggtagataggcaaaacaatttggttgataaggcgcagatcctgaactaacctgtaagccttgtctggttttaggacaggtaaaatgggggaattgtaaggggagtttataggctttaaaaggccatgctgtagcaggcgagtaatagcaggctttaatccttttgaagcgtgctgtgggatgggatattgacattgagcagggtaagggtgattaggttttaatgggatggtaaggggtgcaggatcggtcactaaggagggagtaggggtgtcttatacttgtgggttaagatggggagatacaaggggaggatgtgaaggaggctttgaactgggggaaaaggcagcgatgaggtgtggctgtagcccaggaatagtcagggaagcagataatttagttaaagtgtcggcctaataagggaactgggcaggtggggataactaaaaaggagtgcttaaaagagtattgtctaagttggcaccagagttggggagttttaagaggtttagaagcctggccgtcagtacctgcaacagttatggaggcaagggaaacaggcccttgaaaagaaggtaatgtggagtgggtagcttccatatcgattaagaaggggacggacttaccttccactgtgagagttacctgaagctcggcgtccgtgatggtttagggggcttccgaggcgatcgggcagtgtcagtcttcagctgctaagccgagaagatctgggaaggagtcactcagagagccttgggccagagttctaggggctctgggagtggctgccaggtgagttgaacagtctgattttcagtggggtcctacacagatgggacacggcttaggaggaatcctgggctgcgggcattccttgtcccggtggccagatgtccggcacttgtagcaagcttcttggggaggaggttctggaggaactcctggctgctgtggttcaggtgtttggaagttcttgtgtgctggtgatgtggctgggatatgtctcacagtggaggcaaggaattgcaacttttttctattattgtacaccttgaaggcgaggttaattaagtcctgttgtggggtttcagggccggaatttaatttttggagctttatttaaagtcaggagctgactgggtaatcaaatgtatattgagaataagatggccttttgaccttttagggtctagggctgtaaagcgtctcagggttgctgccaaacgagccatgaactgggctgggtttttcatatttgatgaaaaagagcctaaaggctaactgatttgggagaggtcggataaagaaaaaggagcattaaccttgactatgcctttagctccagccactttcctaagaggaaattgctgggcaggtaggggagggctagtcgcggaacaaaactgtaagccagactgggtgtgaggaggggagatgatagaaggattatagggtggaggagctgaggctgaggaagaattgggacttagctcggcctggcgacaagcagcctggggaggaggggaaaggtcagatgggtctgtagaaaaggaagactggaaagactcagcgacgcttggggttgggactgaggggacagccaggagggaaagaaggaggattggggaggaatcacattgggaacagagactagggagggaacaacgtgtagaagaatgcctggacgtcaggcacctcagaccatttgcctattttacaacaagaattatctagatcttgtaggatggaaaaatcgaaagtgccgttttctgtctatttggaaccactgttgagtttgtattggggtcaagcggcattgtagaagaaaataagttgtttaggttttaggtcaagtgtgagttgaagaggttttaagttcttgagaacacaggctaagggagaagaaggaggaatggagggtggaaggttgcccatagtgaaggaagcaagcccagagaacagagtagagacacggagggaaggggtttgggggttcttaccttccagaaaagcaggaaaggggtcggggcatggagatataaggggttggggtgcagagataagaggtcagggcacagaaataagggatcagggcgcagagataagaggttggggcgtggaaataagggatggggtgcagagataagaagtcagggcatggaaataagggattggggtgcaaagataagaggtcagggcatggaattaagggatcggggcacagagataagaggttggggcatggaaataagggatcagggggttcttgccccctagaaaagtggtacttgccactaagggtgaaggagaaggggttggggggttcttgcccccctgaaaaagcagagaaggggtagagacacagagagaaggagttgggaggttcttgccccccagaaaagcagtacttgctgctaagggtgaaggaccaaggcaggcgtccccgtgtggtcagacacctctgaaacgtgggtgagtaatcaggcagtcgtccccacgtgattaaacaccaagggaagactgtcttccctagtctgtgaccagcgccggagttttgggtccacggataaaacgcgtctcctgtctctaccagaaaaggaaaggaactgaacttaagagaagggagagattgaagggtggtaccaagattgaaaggagaaagtggttgagggatagtgagagaggttggagaagagattaagaagaggcggcttacctgatttaaaattggtgagatgttccttgggctggtgggtctgaggacccgaggtcgtaggtggatctttttcacggagcaaagagcaggaggacaggggattgatctcccaagggaggtccccccgatccgagtcacagcaccaaatttcatgcgcatctgtgtaaagagaccaacaagcaggctttgtgtgagcagcaaggctgtttatttcacctgggtgcaggcgggctgagtctgaaaagagagtcagtgaaggaagatggggtggggccgttttgtaagatttgggtaggtaaaggaaaattacagtcaaaggggggttgttctctggcaggagtgggggtcacaaggtgctcagtaggggagcttttgagccaggatgagccaggagaaggaatttcacaagataatgtcatcagttaaggcaagaacaggccattttcatttcttttgtggtggaatgtcatcagttaaggcaggaaccagccatctggatgtgtacgtgcaggtcacaggagatatgatggcttagcttgggctcagaggcctgacactttgtgtctggctttttttcacttaggataatgtttttgaggttcatccaagctgtcacatgtatcagtacttcattcatttttatggttgaataatattttcttttataaaaccagtgacactatatttaattattaaattttttaaatgagtctagagtttaaaagacagtttgttaggtgaaattaagtgatttagaaaggaaagagaaaataacagaggtagtatattagaataagcttctagttgacaatatatagctaacatatggatgaataatattttctgttgtgtgtatataccgcaatttatttattccttcatccaagtgctgtttccactattgtgaatagtgcttccgtcaacgtaggtgtacatatacttgtttgagtacctgttttcaattccttcatttgattgtccttcatcaacttatggtactgtattcttttagtcactggagtttaaaaactgcatggcatgtagtaggtgctaaatatatgttggttgaatggatttattaaattaatgtgttgaattgttatcattctcttctttcccctttacctcttctgtctaatcacatgttaattcaattatagacttaactctgccacaaactgtataacattgggcaaaacacaactatatgcttagttttatatgcttagtcttctgtagacctctataggccctctacatactcagtcttctgtaaaatgactttcttgaaccacaaacataaagtcaaagacaacctgggaaatacatcttcacttacaacagagggcaaatatgaattgctccttggaattggtaagcaacctagagaaaaatcagcagtcagtttacattaaaagaaattcaaatgaccctcaagcatatgaaaatatgttcaaatatacgtataaaagtcatgcagattaaaactgtgctaaaatattttttctcacctattgcctcattgtgttggtgaggctgtggataaataagttttttcatactctgctcctgggatagttatctaaattgcaaatgcatataccctttgaccaggcaattccatttctggtaatttatcctaaaaataagcctgcacaagtgaaaaatgatatatatagaaggttttttatggcagcaatatttacaaaaacaaggttggaagcaacccaaatgcccatcaaaaggaatctggtttaaaaaatatggtacatttatacaatggaaaactagggaactgtgaaaagaatgacgatggtgtctattaaaatgaaaataccttcaagatgtattgttaagtgaataagagatgggttaaaaataagagtatgtaaaattaagactataaattgctaagaaaatttaaaaaataaacaaggccaggtgtcatggcttacacctgtaatcccagtaatttgggaggccaaaacagggggattgcttgaagccagaagtttgagaccagtctgggcaacaaagcaagaccctgtctctacaaaaaaaaaaaaaaaaaaaaatttagccggccatggcaacgtgcacctgtaatcccagcttctcaggaggttaagtccaggagtttgaggctgtagtgagctatgattgtgccactaccctctagcctggacaacagagtgagaccgtgtctctaaaaaaaacagaaataaaaaaccaaaaaggttaagaatataaaaactttctaaagacatataagaaactaataaaataatttatccagagtgagggtagaggaaggaatgatgcagactagagcagaagtaggagaaagcttttattatgtacctctttatattattttttgaaccatctgaatgcattttatgcaaaaattttaaggtaaaagtaaattattttaaaaatgatggcagcaaaaaggttaatagaaatagacatgtttgagcaagactgggaaatggcagaaaattccaagggaaagagatagacataaggtaacttcaagtttacaaaggatataatgccataggcaacaagcaccagacaaattactctagtgcaaagaaaagtaattaaactgtgcagcaacatttaaacagctgaagcataagtaaaatattagcacaggagaagaggcagtagaagaattagattttatgtttaacacattaaaatgaaaagattttaattaaagctgttatttaaagctacaaaaacattttaaatgaagaatatatattgtaaatcacatccattctttatatattctcgacctctacttcagtctttctataaaaccaacacatgtacattccatccatgtcaagaaaagtcattttttatcttagtgacttacatggtgcaacatatgtatgaaaacaactttagatctgggatttgactgtgttatgtaaatgaactaatattgttaaagtgacagtagaactcccataatcttgtctgaaggtaacagactgccatgtatcaaatattgtcattgtttttcttcaactctttttgttatataggtaagacatgttcactgtagcaaaaaaaaaaaaaatgggttttgtgccattactcataccttttgctttagttagttaaacattttcagtggatactactaggcatctctgtggctgtatccactcattagtccattttaaaacaatttaataagtgcccattctaccacaagctatgtagcgaatgggtatctgaagagtaagcaagtagtgatagtttatgagtttttgactgttggtatgcttccaaaagaaggcaccaaaagacatttgtgatgcccacattacttagaaatgtagggaaatcttagtatttgaaactcttatgtcctagaatcttaagaaacctctggattgagatggtgatgttaggcagctcttgcagttgacttcaatgctagctaggctactttctccaagcagtgagaaagtcctaaagagtcttgcttcattttattccaacttctggagtttttaaaccagcattgtttgtgttcttccatatgtagaaactatctctaaacctatcctctcattttccagtttagaaggtgctttcagatatttaggatcttattagttactttcaaattagtattccaatcaaaacgagttgaaataaaaacctgtctgtcctttaacactttgattatagtttatgtacttctatttacatgggtaaaatgtatagtcactaggaataacatgtcaacacatcttgattgaaatcgccactttgaatttttctatcatgtttctagtatgaaaaaaaacttcatttagcttcatagtagcttcatagcagttggaatagttgtatattatgtgttttctgtatacataaactgaactataatttgaaaaagttcttcaaggtcaccttgtcacttgcagagtgacaaattatcctgatttgctgattctcatcttagtgttcctgatactgctgcactgggagaaaatttacatactttcctaaagcttactttctcagacttcttgttcttctggccttgagtaattcccagatccagttttcctgtcaaacctccaaagaagtactgaagggtttctttctcataggtcagattcaggatttgaacccaaagcttctttctttaaatacactgttttttctttatcatacctctcaaacatagtagagcagccttgaagattttgttttaaaatctacatggctgtggaattttgttttaaatatgattatgtttcctacaatcatcttcattttctaatcatcttcatctcttctctgactcccatttttaccaagtcatgaaaatacaagcatctgctttccatgaatagatcagagatctcacaagcctagattcccatggaaaccaatcaaaaactaaaaggaaaagaaagagtatatattgaatttcgatgaaacctacagcttgtttttcattagactcatgctggtttcttttaaactctgggcacagggccagcaaatatttttatggctggtaaaaagggacttcaaatccatttactttcatttaaccgtttaaaaattaattttgtatataacatcaattctaaagaaaatttgagcattaattttctaattaccttatgtcatagggccattatttgtttatgtaatttcctcttcttgttttttctcctacccatagtttatgactcataaaaggatgagagggaatcaggatgattattattcctatagtgtgaatattgtcaacacttgggcacgacatttttcctatgaccaatcataggaccaataaaggaggtctctttgtacctcctttagctgttaagctttcacaaggtgcaaatgatcatttacaaatgtgacaacagatgataactaaaatgccaaagtgagggggattaagagaaccagagaggggatggctggggaggacaggttgtaattttaaattaagcaatcaaaatagtattcagtgagacaggttgtaattttaaattaagcaatcaaaatagtattcagtgagatggtgacatgtgaagcaagacttaaaggaggtgagaactttagccatgtgaacacctgagggaagagcattcattccaggcagaagaaacagtcagaacaaaggccttcagatgggagcatgcctagaatttttgcaaaataacaagaaaattagtataaattagtcttcatgcctttaatcccagcactttgggagaccaaggcgggagggtcacttgagcccaagagtttgagaccagcctggtcaacatagggagactccatctctacaaaaaaatttttaaaaattcgccaggcatggtggtgcatgcctgtggtcctagccactcaggaggctgagatgggagtatcacttgagtccaggaggttgaggctgcagtaagccataatcacaccactgcattccagcctggacaacagagtgagaccctgtctaaaaaaataataataaatatatatataccttataatgaatgagcaaaaggaaagcgctaagagatgaagaaagagaaagaatggtggcctgatcctgtagggccttataggccattgtcaagaatatgttttcactctgaatgagatgaggagggtttgaggaaagacgtgacatggtctgacttatgtatttataaaagaatcattctggccaagtgaagacattttcctccagttttagtactatctattccttcacccattcctcatataatatgctttcaagtttccttctcatcctgatcattttcaccagatatgcacatatttgtctaaattcccttgaaaatgtgatacctacaacagaatacaatgccagtctgatgagctcagagtgttacatgactataactgttgacattttagcaacaaaatacagctgattcatatttaagatttttcaaataaaaactctaaatctgctttatacttacaactgcctaaactacgtcctatattaatatggccgtggttgttggacccaaaggcagcatcttattgtatccatattttgaactttcccagacatacttaggtaaaattgaccattgtatcctttgttcctccagtaccttgtgtactcaaccactgttataccaccttttacactgaaatatatttatttgtttacatgttttatttctccacagatgatgaacatcttaatatgtaagagtgtcttagtcatcttatttccaatatctagtagtacttaacgacactcaatcaatgcttgctgaattgaattgggttcatcatgtaacctacccaggtcctcttgattcttgagtcggccattcagtatagttgtcatctctcccacttatgagtcaccaagattctcatcctaatctttgatattaaaatagatactgcttatagaaaaccttaatcattgaaacactagtactaaaataaacttcactaatttaaaaagttgttttattcatttattatacttgtctaaattatgtcgtcagtattaactcagcctcttgaaaaattttgtataatctatcagaatccacttgctcaccattccaattctgatgggtatgtcattcatttattcattcattcatttgttcaacagataaatttttagtatttaatatgtatcaggcattacactatatctcaaagtattttaaattcaacctttgtctaaatatgtggtctttcagattttataatagtaaaattaacatttcaccaatataactactcattttcaggcaatttattagacatatactcatagtttatcttaaacaattacagatttcagaagatatggtttgggtccttttattcaagtctttcctgtcactttgtcagtcatctcttttcaagccattttcttttaaggaatttgggctgaaatattagactgtactttgaagtaatgactgtaaacttcatgtatgtaactttggttatttcagtgttgtacagattgttaactaattgtgtgtgtgtgtgtgtgtgtgtgtgtacaggtgcacacaggtgcatgctttaaattgttatttaattggattataatgcttacacatattgtaaaatgttaaacataccaagaaggtttgcagtgaagaatctcggtgtaaggaaaactttctatctgcaagtcaaaatatagaagtgataggaaaaagactaataaatatggctacatagtgataagaaagactttttccttccagaaaatgtggcaagcaaagttaaaaaaaaaaaaagacaaattggaaacaatatttgcaaattatatcattatcaaaggtttaatactcctcatatataaggtggagaagaaaaagaccaatgatcctataaaaatgagtaagagtatatctagatagttcacagaaaaggaaatggcccttcaatatatgaaaatatgctcaatattgttcgtcataaaagaaatacaaattaaaatcacaaagagataacatgcttcatgtctcagattggcaaaactccaaaagtttgacaacatgttctgatggcaaaactgtagggaaatgagcattcacatatccctgaaggaaatggaaatggtttccttagcctgttttgtgttgcaataacagaataccacagactgggtaatttataaggaaggaaatttatttctcccaattctggagactgggaagtccaatatcaagttatcagcatctgctgagggacttcaagctgtgtcattccacagtggaaagcagaaggacaaaagagggcaagaacaagtgagggaaaagggggaccaaactcacttatatcaggaacctactcccatgaaaacagcagtaatccattcataagggcagagccccaatggcctaatcacctgttagggatcccacctcgatactgtcataacgatgattaaatttcaacatgaattttggagggacattcaaaccatagcattggtataacgcttatggagggaaacataacaatatccagcaaaattaaccagaatatgcatttacctttgatctgtcacttctgggaatctattctatacatatgtggtaaaaacaagaaatgtatacacagggttatttaattgcagcattatttgtagtagagaaagcttgaaagcaaatgcactttttttgttgtttttgtttttgagacaggatctcactctgttacccagactggagtgcagtggcacaatcatggctcactgcaatctcgacatttttgggcttagtgaatcatcccaccttaggctcctgagtagctgggattataggtgtgtgccaccacaaccgactaattttttttttttttttttttttttttttgtagagatgggttttcaccaagttgcccacactagtctcaaacttgggctcaagccatctgccctcttcagcctcccaaagtgctgggattacaggtgtgtccaccgtgccctgcctgcaaatgtacttttagagagctggctacataaaaagagtatattcacacaatggaatgctatgcatctgtaagaagtaatgagaaatgtttttatataacattataaaatgatctggaatgaaaaaagcaagcgcagaatattgtgtatgatattctctattttatatataactatgaagtgacctccaggtttattgttaagagaaaaaagtaaggtgctaaagagcatgtgtaaccttttttccaggaaagaggagaaaaatattttcttatatttttaaaagatagaagagtaaatgaaaaatgaatgaagactcttacctaaagggagaaggagataatgtagaggacacagggatcgaagctagtcttatctgagtatatcttgttctatagttttgattttggaacttcgtaaattatttccataattataaagtttaagtgtctacagcctggatgcagtggctcacgcctgtaatcccagcactttgggaggtcaaggtgggcggatcacttgaggtcaggagttcaagaccagcctggccaacatggtgaaaccccatctctactaaaaatacaaaaattagcagccaggcctggtggcacagtaatcctagctactcgggaggctgaggcacaagaattgcttgaacccgggaggcagaggttgcagagagccgagatagtgccattgcactccagcctgggcaacagagtgagactccatctcaaaaaaaaaaaaaagaaaatgagcagtccttaaagattgatagacaaataaaacaaagacacctgtgtattaagttggtagcttaactgcagagagaattattcaagtgaatttattattttttatttttattttttatattttgagatggagtctcgctctttcacccagggtggagtgtagtggtacaatcttggctcactgcatcctccacctcccaggatcaagtgattctcctgcctgcacctccctagtagctgggattacaggcacgcaccaccatgcccagctaattttttgtatttttagtagagatggggttttaccatgttggccaggctggtctcaaactcctgacctcaagtgatccacccaccttggcctcccaaagtgctgggattataggcgtcagccactgggcccagcccaagtgactttaaaacatagtaaatttgactctgcagtcctggtaggaaacatcctaaggacaaagacagctacaaagaaatcctaaaatgtgttcagtaaacatactgttagtaataatactgttactgttatcttgacacaacacaaataagtggatcactatataaaggtaagatgaagcaagtgaatatgtcaatttcattagtaaccaagattttcaataagaagtatacaaatataaactattgatatatgtgtctgctaaaaatttatatttctgaatttcatagcactagctactgaaaaagcctagaagtaatgactaaccccatgaaggatcacctccatcacccagattgtgtctctcaataccactaaaaggaatcagaactccttagagaagtggctgcttagaaattgggacaagtaatatatgaaatgagcctggctcatctggtcatgctggatggcaagatatctaacaaagcctactggagtcatgtcaaagggccacagaagccgtgttaaaggagcttccaaagatggacaatttgagtagcaaaaatacagttgcttcaatggaaacaaacatgttaaaactccatgagttaggaatactttttttttttttttttttttgagacagggtctcactctgtctctcagtctggagtgcagtggtgcggtctcggctcactgctacctctgtctcctgggttcaagcaattctccagcctaagcctcccaagtagctgggtttaaaagcatgagtcactgcacctggctattttttttgtatttttggtagagatggggttttgccatgttgcccaaagtggtctctaattcctgacctcaaatgatctgcctgcctcagcctcccaaggtgctagtgtatttaaaatacagttgtttttatgtgtttcagtttaacttcccctccttcccatccttattgatttaactttttcaaaagttgaaactacatgaaaagataggtttacaagtttcagtcacttccatgtcctgtctgtctcattttccctgtcttttgaggacaatcaactatattgatttctggtttacccttcatatgtttcatatatgtatgtttccttgttgcctctttttcttctaatatatgctcttgtgcttcagatagtattaagatttttaaaccagataaaaaaggaagaaaaaagcagtaaaagtttacatgttccttgactctagattctgtgactagaaatggaccttataaaccactcaaactaatatatatgtatatatacatatatatatatacacacacacacatatatatatagggatattcattcatcattgtttataatggcaaaatacaggtaaattattcattgttaaatataatctatttttcatacagtggaatactttttagccactttaaaaaattaatctatatgtactatcatggaaagatctccagggtatactgttaactgaaaaaaaagctagctgcagaagaatatgtatagtagaaacctgtttttataaataaataatttttaaaataaccacagttatacatatgtatcatatagattgcaaaaatttaaagaaatagtaaaaatttcttttttttctttttttttttttttgaggcagagtctcacactgttgcccaggctggagtgcagtggcacaatctcggctcactgcaagctccgcctcctgggttcacgccattctcctgcctcagcctcccaagtagctgggactacaggcgcctgccaccacgcctggctaattttttttgtatttttagtagagacggggtttcaccgtgttagccaggatggtctcgatctcctggcctcgtgatccgcccgcctcggcctcccaaagtgctgggattacagcgtgagccaccgtgcccggccaagaaatagcagaaatgtcttatagtggtattatgagaaaactcatagtttaaattataggaaaacattttcacaagaggcatgcattattttagtctgaaaaaagttcaaaaacagactttttaaaaattctaaattttattttgagccagactttcctgccacccttcaatggtgacaattccttgcaattcctgcagttccttacatgttttattttctttgaaatttaactgagtttcagatctttggcttcaaagaggagactaaatcctgttttccttcatttcccaaatcatttttcattatctcctacaacaaaatgctaccttttctgacacttttatggtctccttttaaatgtttctaatgcagaagaagcttacttgttctcaccacccatttgttaaatttattttcatatctcttagtatttcttaatgtggtgtatatcacagaacatttgtcactcaataagggcatagcatatccaatttttcattccagtttttattattctgccatctgtattgcttttatttgggaagtttcctatttgtaaagaatgatagtttttctttcctcttagtagatctatcttgtttatattctcatgtttagtgaagacctcataggatatattttagctgatcaggggaattctattatctcttttctgtagcataaatattacattccattcttaaaatattgatttgattggtaatgcaaaaagctttagcactccagaaaaaaatatattttcatttataactttcaatgacagagttcttattacacttcaattctctaagtatattgaataaagagtagagaattgttcttggagttggacctatattgattctagtccctgctcatttatttattagctctgtgacatttatctctttaattctgagtttcctcatctgaaaatgagaataataatgatacctatattaccacattcctatgagaatgaaatgaactggtgcccacaaacttcttacttagctcagttcctggcaccaaaatagtgcccagtgaatattaactattataattatcatctagtccatgctctggactaaatactttggggaatacaaaggtgagcaaagttaactctgatggagtagatgagctgtatttatgctatagtttgaatatttgtcccctccaaatcccgcgttgaaatttgatccccagtggttggaagaggggcctaatgggaggtgtttgggtcatgggagcagatctctcatgaatggcttggtgccagaggtaatgagtgaattctcgctctattagttcatgtgatagctggttgtttagaagagcctggcatccttccccgttctctctctccctctctctctcttgcctgctgtctaccatgtgacatagctgctgctccttcaccatcccccatgattagaagcttcctgaggtccttattagaagcagatactggcaccatgcatttagtagagcctgcagaaccataagccaaataaacctgttttttaaataaattgcccagcctccggtattcctttataaaaatacaaatggactaagacaatctacaaagaattcaagtataaggtagaatgcatatgtgctagagaagaatacaaacaaaatggtatggaaagatagaggaagggaatattcaatgagaagttttagggaaggtttcatgaaggagagagaatttgaactagatattgaaaaatcagaattaattttcaaaggcttggagataaatagtatattctgcagagataaccaagtaaatgacatacagatagtcaatggctctgagtggctctactagctacatctttttatgttaataggttttttacttttttcagagaaaattatatccagcatttttaatctttagactaataacaccaggtagacacaaagctattcctggaacattgctttattatagataggaattccataaccaattacctcctatttgctagaacacactaacacaaatacataaaaaatacagactaaactataatagaaggcagttttctctggtgtttgtagcacctctcttctactaatttaaaatatcttcatcactgaggatgcctcctattaaaatgttatatctgagttatactaataactatgaaattaccaggtgtctctgcttgagtagttggaattaatttttttgcctcataactctggagacttctcagaaagtgtagctaaaggtttattcatcaaaatccccttctaatgaatcgactctgatgattctgctgttgtcagaatggatgttctaggaagttgtcatcacacttgaccgtaatgaaaatgctgccctggaccatctccccaaactatgtgtcctcagtattgtgggaagaacccacttcatgatttctaaccagggtagcctctggaagtacaaatgattgctgtaaaattatgaacagagcagcatcaggctttgctctgatgtatcttatgaagcctttctacttccaaatgaagactatgaagagaaccttgaaacaatgcccttctgggagctcattcagcaagcatattctgagggcatattctgttccactctctacgcatggaggattcttgtggtgaggaagacattcttcattggttttaaagagctcaccatttagcacagtcagccgctgagacaggactgctagataactacagaggttatgcattgcaccatttgtacacctcgtacaaccctatgaggtagccctcagggttcaaatggaatgcatctatattttgaatacagagtgatatataataacaagaaatcctggatgtctaattgactgtcttcccaaacagcatagcagattacctttttagtctcatcatttatgtgcagattatgaaacacatttattagtcaatagagtcccttcctgcatttatacattctcctcataactcagttgttctacttcacttccataaggctgacttgcaagtctgaatttatagttgtgttctctttcctaaatttagttcagttatctccctccataatttacatttaaatatcccactgtaacctaaaacatagcttcctttgttaatttccccgttgttacgaagaaaagtattattcctcagtaatttgggctcaaaatattaccctaatctttgactccttctgtcttcctcagtcccaagacacatcaaaggctgatcaaagttagccgggcatggtggtgggcacctgtaaccccagctactcaggaggctgaggcaggagactcacttgaacccgggaggcggaggttgcagtgagctgagatcacaccactacactccagcctgggtgacagagtgagactctgtctcaaaaaaaaaaaaaaaaaaaaaagctctgttgatcttgtttgtcaatcatcccacatttattgttttcttcccattccctttactaccatttagtctaggcagttgtcttcttatgacaaaaatttcataaattggctgggcatggtgtaatcccagcacgcctgtaatcccagcactttgggaggccgagttggggggatcacctgcaataaggagtttcagaccagtctggccaacatggtgaaactctatctgtaccaaaaatacaaaaattagctgggtgtggtggtgggcacctgtaatcccagctattcgggagactgaggcaagataatcgcttaaactcaggagacgagatcgcaccactgcactccagcccagcctggacgacagagcaagacttccatctcaaaaaaaaaaaaaaaaaaaaaaaaaaaacctcataaattgagtgttgtgctccaaaagaatttgaatatgatctactttaattttgtcagtctgccagaagtgggccttataattcgttccttaggagaactcacgaaaggtaggaaattgaggaaatttgggtgttaggaaggttttgaagttagtttacaaagaacataattggagccccagtgactaagaccataatgctgttgagtggctggccagatggatggatggatggatggatggatggatgggtgggtggatgaacatcaattttctagaccttggggcagaaggttaggattggattgcaggagcaagacagaaaactgaattacattatctggtcaggcttcgcttaggttgatttaactcttgctaatctcactaatgagttagacttaaatcttgccttgattagagtcaaggtaagccccaaaactgaaggaaggagagcataccctacagatagagaacttcaactgggaaaattggaaggtcacaaggaccccagaagataattatcaatcccattcattgtttgtcaactaaaaaaacttcaaactaaaacctccagagtaataaacagttagacttcctgcaaggagcatctcacacagaagatagagcctggaagaaaaggctgggaactgacatgaagcaccatgtaggccacaaaaaggagccggaaataatagactaaatggtataataataagtaacgggctggtagcacaatcaactagagttcagaaatgcagtctatgctctaactgatttcctttcctgaaatatttcatatttgcttgggtggctctatagtcatttgggtccatcatggaaatttgtatcattaatacacattttctgttaatacgaataacataaaagtggcttagatgacaagcacatctattattttacacatcaagcagtcttacataacaagaggtaatatccagggttgattaactcagtggctcaatgatattagcaaggacctgggtttttaaatctttattctccgctgtaatcaggatgttggcttatactcttaagctagctttccttggagttaatttcaaggtggctgcctaaatttcaggcattgcatatagaccacaatatctagaagcagaaaaatcaaatacccgtatcttgtttatcttttcaacatggaaaatcttctcagaagccctgtggcagatgctctttccattcctttgattcccaggcctaatcctatcccttggcaaggaaaatgaaaacttcctgattgctatgtcattcaaagtcaccttggcgggcaccagtaatcccagctactcaggaggctgaggcagagaattgcttgaacctgggaggcggaggttgcagtgagccgagatcatgccactgcactccagcctgggtgacagagcaagactccatctcaaaaaaaaaaaaagtcaccttctgagtttggcaaggacccagccttctctgaaggacatatctacttaaaaggagaccaaccaatatcagggttctgttggcctaaaagcctagaagaggatgggcatatatattagccaggcaatccatggtgtcagccacaatgtctgttggacacttacagagccttgtgaacctaactactttcaaaagcaatggccataggctgtaggtcaccttcatggaattccatctagtggcattgccctttagctctaggctacaagaaaaccagctctacagactctttcttgccactggggtgaccctaacttttaccctaacttgatgttctttctatttttttttttttttttttagcaaatgtgcatatttcctcccaaatgctcccaaatgaggaaacagtcaaatcacttagctgttccagtaacaaacgcgggcaccacctcacatgttgttaccccacaaacttaactgagaagtgtagtgataaaaagcaatcatctagtctctgaattcagaatttaaaaagcaatgatctgaaaattgaaagaattcatttaataacaagatatttattgagcacctactaatcataaggtactgctctatatatgtgggatatagcagtgaacaaaacaaaacaaaaatccctgacttcaaagatcttacattttgttggtgggaaacaaaccaataaacaagcgaatacatttttaaagtatatattatatcagatggggatacatgctatggaaaaaaaataagacaggtgagggtgatagggagtgtagggatttgcaaatataaatagggtgatcagggtagacctcacttaagaaagtaatatttaagcaaatacttaaagattatgaaggaacaaacctttctgggagagaatatgccaagtgcaaggtccagaaatgggcacgtgctttgtatttacaagaaacagttagcaaggaggccactgtggctctagtcaagtaaggatgagttcagagatcacagaaggcctgtatgctatttaatgattctacttttacgctgcacaagagggtatggttattgaagtgtttgagcacagaaaatatgatctagcttatattttgaaaggttcattctaactgctgtgttgaggatggactgtcaaaggatgaaagcagaagagagactaattaggaagctgagagttgatgttggcttggaccagaatggtagtggcagaggtggttagaagtccaattttatttttttctaatttgtttattttaattgacaaaaattgtatatatttatgtgtacaacatgatgttttgaaatgtgtatacattctggattgactaaattaattatgaggtagtacatatgttaattatatataactacctcatatttatacatggtgtcaacacttaaaatctactctcttagcaattttcaagcacataatacattgttattaactctagtcaccgtgttgtagccaatattaaatatatcttgaattttctgcaaattatagatgtgaaaggaagagtcaatgactttgacactaagttttttttttaagcctcattttttaaaatgttttcttaaggagaacttcaaacatattcaaaaatagaatagtaaaatgaccctccatgtatcatcactcagcttcagtaattaccaggtcatgctaatcttatttcctgtattccttcattaacttctcctcttcccatgttaaagcaaatctcagatattgcagggatatcattatatcaatatgtatttctaagaggaaatgaccttttaaaatgtaatcatgatagtacttttcaaaaaatgtaacaagaatcacttaatatcatagtatcataaaatggccaattgatgttccaattaccattgtctcataaatgtcataaatgtttttgtttatttacacatgtttgaattggattccaaataagagctatatattgtgattggctgatatgtcaagtcttttttaatctatagtttcaccctccatctctctttgtttcttttggctttttctttttttttttttttttacaactttttggctattgtggcttaacccctgccctaacttgatgtcttagtctagactgattgcctcagtaagatgattctcccttcaggtgtgataaacctattcctcagtcctatgtatttcctgtaaattagctgttggatctaaagacttgatctgattattgttcaattttttttttcttttttaaatttctcatttttatgggtatttagtaggtatatgtatttatggggtacatgtaatgttttgatacaggcatacaatgtgtcatagtcatatcagggtaagtggggtatttatcacctcaagcatttatcattttttgttagaattactgttcaatttttggcaaactgttttattattatggtacattcattcttaggagggacataatgtttcactgtgtctgtttttatgatgttaacaattagtggtgctcagtgcctagagcccattgttcattaggagttgcaaaatgctgatactttaattctaccatctatcctacagttattagctggaataattcattaaagagaaacttccccatatctactattagattactcaatggtacagttcatataggaaaggaaggatgaatgcttgattctccctctttatttaccaatttttaaaataatgaattggtttcctggcatcctcctaggataatcaattaattttttttcatttttaatatcattatgaacaaggcctagaattttttagtatcattttaacatatttactatatcaatccattgaagttattatccttaattagtattcaaattactctgtttttggcctgtgggaggcctgtcaagtagacttcttgatccatttgacatgagcctagtatttgatagcttacttgctatctgctatgtccaaatattccagattcatttctatattttttgttttagacctggaatcagctatttctccaatagctttacttttagtaggaaaaagtatttggagaacacaatctaggatctagggtgctcactgctaccaggttggtgattgtttctaggcttttatagtggacagagcttgcggatttttttaagcaataaaaatatttcatcacttcctattctaattctgggctaaaaggttttaaacttaacctcttcttacatctctactccttttgctcacccagtcaagaatgatagaatatcacattgtctagatgaaaaacctgagatgcaagagcttgagtaatttatcattaaatggcagaaccagggttcaaatatgtatctgtttgactctaaagtctgtgcttaaagtcatctttagaaaatttgtgtttagccagagctcctttgggaagcctaggcaggatgaggggttgagcccaggagttcaagaccagccctggcaacataggaagaccccatctctacaaacaacaacaacaaaacaaaacaaaaactagccaggcatggtggtacatgcctgttgtcccagctactcaagaagctgaggtggaaggaccacttgagcctgggaggtcagggctgctgggagccgtgctcccaccactgtactctagcctgggcaagagaatgagaccttgtttaagaaaaaaaagaagccacagatcccttgctgcaaggcgtagcatttttagcagaactgccaggtagagaattcaattcaactaacacacactgagcacctattaatatttttatacaaagtcctgttcacctgtatgatactggtgtctattaacaaatttgatttgttgatttatctacaaacctagatttatccagaatgcaaccacttttctcaacattccctttaccaccactttggtcctagccaccatcatgttgggttagattattgtagtaaccttgcttggataattataatagtgtcctaactggtctcctggtttctgctcttgccccctgcagtctatgcccaacatatcaaccagaatgatcctttaaaacttaagtcaaagcatgtcagtcctctgctccagaccctttaaaggattttccagttgagcgcagtggcttacaccagcactttgggaaaccaaggcaggcagatcacttgaggttaggagttcaagaccagcctggccaacatggcgaaaccccatctctactaaaaatacaaaatttacccagatacggtggtgtgtgcctgtagtcccagctacaccagaggctggggtacaagaatcacttgaacctgggagttggagtttgcagtgagccaagatcactgcactccagcctgggtggcagagggagactctatctcaaaaaaaaaaaaagattttccatctcagagtaaaagactaagtatttcctgtgatctatcaagccttttatttcatgttctgaattctgttgtttgtatgaccttatttctaatcttccacatatttcctccacatacaccactctgacctcagtgctgttcctctagtaggtgagtcaagctctcaccacaggtttttgcatttgttcttccctctcctaggaatgctgttccagtaggaatctctgtgttgaactcccttgctttcattagtttcttattcaagtcactgtctcagtgaacccttttctggcaatcctatctaatacccacctcacctcacacattgtattctccctactctgctttatgtcttttcttagcacttaacactatctaaaatactatatattttacttatttatcttgcttattgtcttttgccccactataatataaactccctgaagttggggttttatttttggtctgtttattcactaatttatccccattgcctagaactagtagttggtgctcaaaaaatatttgttgaatgaatgagtgtacttctaaagttatagctttaataattctcccaggtgatccacgatttcttacatgatgcatatattgtgggcaaaaaacatactatgagattccagttgtctaatattagaatatttttaaaggaagaataatcctgttttgctatctttctttttcttatacaatccttcctccccaccccagcgactcctgcttgtacttcatagaatatttcctctcttggaactagatatttctttctcttttctttctttttttttcttctggttaaatagccacagactgtccatttgagctgactcttgctggaaagtgagtcagtgcagcctagtggagagcagaggctggagcatttgcatctccagaatgtttgtattgacaaatggcagtcagttattgacatttttatcccttggtgatacttcaattggcttatctttgctggtcaaatgccttaattgttctggcctttaattcagtcaaagttggagctagagcagaggggaaagagaaggagccagactaacagaacatcaagcttgagctgggaggctgctggcaacgatcagcctgtcataatgttatgatttgttcatttttataccatttattagcctttacttgttgtgccatttggcctccagggcagataaagtgctgtctaatttggtaggtttgcttctgtcagagcagcctcgacagggaaggtgttagctgcagtgacaaataatcaatagctgtcgttgtcatgaggaacgtgagcagttgggcctttcatctggaggattagaggtctaattggattgagaatagggagggtgggctgttgggtaaccctgtcagccttgtgaagctgtcaaatatcggccttattcatggtgaagggaataaggaaccttgtgctttcagaactgaggagaaaggcatgtgaaagccctttatacaaaggaatagctcctgaagttgattcagctaacatatgcttccttttaaacttaattaaatatccctttagataataaatctatggaactttaaatgacatttttaaggttggatgtgtaatatacacacacattcacatataacgctatacaaatccaggttggttcttttgtctttgctgatgccagaagataaaccacttgaatggaggtgaaaaatgaaactttatgagagaaattgcataagttgtcatctcattgtcagaattaacaagtgataagcatttttaatactattaatagaaaaaataagtgagacattaaactgatagattagttaataatgaagtatggatatgtgacagttatttttctcccctggtcatttagaaatgtggtttcctataaaacaaatctttcatttattccaacctgaactaatccaaaaaatgaagaattatgcattggctaaattacttcttcaaaggaatgcctaattttttcttccttagcaagtgacaggattgcatttaagtgatatcaatggtatcatgtccaactcagtcccaaaatgtttttgtatatccctacatacttacgctgtactcctttacatttatggtataatgccatcatttggagtatgaatggagaaggtatttgagaaaaatgagttagctcgttctctaatctatggagctcttaatactacctctgcaaggccaagtaaatgactttaaattccactaaatttcatagaaattgagcaaatttaataatgataaatgttaaacacaattttataaaaaaagtataaacttctttatgagtccattctctatgtacaaattaaattcagtgcattgctgttgtccaaaagcaggtataattttaaaaaatgtttttacaatgtggtaggtactaagagcatttgtaagcatcctctatacagtatatctttatgaaagccctgaataaaggtgagttgacagtaatgccaagagtatgtgaataggcatttctaacttatggattatatacttagtccatttctataaacccatggtcccttttctatagtcattcaaagcccagctaaccaatttgaaataacttcaaaaaatactccaaaagaactaaatgtgtgtacaaaagacactagatggatgaacctggttatctcattgggcccttcaaaccctgaggtccatactatttattaccattacaaatgtttcattaagttcttcctgatcagtgctggtttgaaaattctatgattttactcacttgtgtaatccacagtgaaggtcagcaaaattctcaatactactgactaagaatttagaattatggttatctaaagaacttgctttgcttgatctaaactagaaatatttaaaatttcaaacaattatttgtgattacagaaatttctcagatttcatgcagttcttctagagctctatctgtggaagtatagttgtgagtacatttatacttaagcagaattactcataggaaatggtaaggtcagccaaacacaatggctcacatctataatcccagcactctgggagaccaaggccagaggatcagttgagcccaggagtttgagaccagcctcagcaacatagtgagaccctgtctgtacaaaaaaaaaaaaaaaaaatttaaattagcagtcatgttggttcacagctgtggtcccagctacttgggaggctgagagggaggattgcttgagcctaggaggttgaggctgcagcaagctgtaatcacaccactgccctccagcttgggtgacagagcaagattctgtctcaaaaaaaaaataaaataaaaaaggaaatggtaagatcagatttgatatccttgcaaaagaagttcaaagtttaaataggtttaaataggtttgtgtttggggttttgatcagaacatactttctatgacctataaacaaaattgttgctcttgaggttagatgagaatattttgttgctttgtaactccttataatccttattattcactcaacaaatatttgtgcaaaagccactgtgctaagttatggaaatacaaccatgacagggactatcctgccctcagagaagttcatagtttaatggggacaacagacaagctaaatgggtaatgaaaatgtagtattcctgtgttaaatgctaggaaaggagtaagcctaggtatatcataggaaaatgtaagagaggcatctaagccatcctggggtgttgtggtgaagaatggcttccttcaatagatagcaactatgctaagtggagaggagaaaagagagaggaagcccattcccaaggagtattccctccattcccttggagtattctcaaggagggaaagaatatgtacagtcacatgccacataatgacattttgtttaacttcagaccacatatacaatggtggtcccatgagccgtcacacccagcctgttttttatctttcatagaatatttttactgtattttttctatgtttagatacgtttagacacatgaatacttaccattgtgttatatttacctagagtattcaatatagtaatatactgtacaggtttgtagtctaggagcatcaggttataccatatagcctaggtgtgtaataagttataacatctaggtttgtgtatactatgatgttcacactatgacaaaatcacctaatgatacattttgcagaacatattcccattgttaagcaacatatgactatagctcaatatgtatgtattattgactatgaggtagaaaacgtggagagatgatattggataagtaaagtgggatcagaccatgaagtgtctgtcctacatggaggacaataaataaatttgaatatttactgaagagttagatttaaaacttgaatattatttaaattggactaaatgaaagggatttgcaactaactcaccactgcccttctgatcaccaaattcatatacctttcctacttcctcatacctcttgacaaaattggtacattttaccttctttatgattttctccatgcatctctttcttttctctgatgtatatcaagtatatcattggcaaaagcattggactgatataaatcagaagacctagattcatgacttaggctctgcttctttctaacggtgattttaggcaagttttaagtttaaatactctggacttctgtttcctattttttaaatttgtggcaatacttaggttcttacaggagttaaataaattaatatatttgaaaggactctgtaaaacctttgattatgttaagggacacatagtctaaagagtcctgacttagatcacaaaatgataaggcccttgagcatgtaaaaaaaaaaatgtattcaagcagattgaagttaaaattaagaaatgtcaaccaaaacacttaggtaacagttctaagaataacattggacccttacttatgaatcttagcccttattatcccataattattcatgaacaaatttacccctgttattctatgagcttctagaatacagaatcctatcaaatttatctttatatcttcctacaatgccttgcacaaaataggtgctaaataaataccttcaaggaatgaaacaatgaattcttgtagagtcagaattcgttctggatacagtttaatatctaacatacttggatcattttgttttctatttttcagttttgtgaagatgtttaaaaatactactacttctctaaaatcttttatttttccaactttggaatctattaatgagatatagcatttaactcagcaagaaaggacagaagcttggtactggtctcatctacttggacaaggaaagctctaagagaagctggttacagaggttcagcaggaggggacattgagctgcacaaagattatagtttacctgtaatcaagggcagctattgttagcacaagatttaaaaacaagtagatagagagtcagataatacttgtgagtccactacaggtaggcagtggtcaacttgaaattctgtccaagagtaggagggttccaatcaccagcaagaatagagcttaagattgagtggctattcgacccagtgagtcagattattagttcaatagagtgaattggctgcatgggggaaaatatgaaagcccagtgataatcactagatttgaaatcactagataccaagtcccaggttataatagttggatggatggctcaaggtgtgtgctttcttagtggtcagtgcagggctaccattgtcttagaataacttagttagaaggatgaagatgattgagatggcctaagtacttctcacatcatcaagattgatacagcagtactcaaccatctagaaagccttttaaagtagcaatggcttttgaaaatggtgtagtagctcctattggatcagccctccagtagataacatttataaactctgaacaaaatataaaaacaactatctggaggaattgaagagtgaccaagtaggcagaaattgcattgtaatcagcccttggaagaccgtaagaagaggatagcactgggtgagtttccacttttataacagggcctactcagttcttcaaagaggatgaaaactgagtagaaatctgcattcttactttttgaagaatcaaaggacagcatttggggcaatggctgtaagtcagaagagatgtttcaggctgggtgcagtggctcacacctgtaatcccagcactttgggaggccaaggcaggtggatcacttgaggtagggagttcgagactagcctggccaacatggtgaaaccccgtctctactaaaaatacaaaaaattagctgggcatggtggtgcatgcctataatcccagctactcaggaggctgagacaggagaatcgcttgaacccgggaggcagaggttgcggtgagccaagatcatgtccttgcactccagcctgggagacagagtgagacttcatctcaaaaaagaagaaaaatgaaaaacagaagagattttccagaacagagaaattcatataagggaaggcctaacctctacatataaactgccaaaatctctgactaacccctaacctaaacatagatggggaaaaattcaggcagccaagctaaggctaaaataactcatcagcgatttagctgctgcctgcctatgcaggaaaaacataatttagagtttgggttcagccaaggtatctgcctgctaaaacaaaaaatgaatagtcttcagcataacataacagaatccagaatctttacaacacatcattttcagtgtctaagatattctcaaatattgctagacatgaggacaaacagtaaactgtgttccatactcatgagaaaaagtaacaatggagaacaactatctttgttgttccagattttaatgagcagacaaggaatttaaagcaggtcttttaactctgcttaaggatgcaaagaaaaatatgttcgtaatgaataaacagataggatgtcttgcagaaaaatagaaactctataaaaagaactaatggaaattctagaactgaaaactacaatatctaaagattcactagaagggcttatcagcagattggagatgaagagtcagtgaacttaaagatagatcaatagaaattaaccaatctttaaaaaaaaaaagaagcgaatatactaagaaaaaagtgagtctcagtgatttgtaggacaatattgaaagaccaaactgtttgtaattacaaagataggagagagagaatggggcagaaaaataattaagaaaatgatggccaaaaattgcccaaacttggtgaaagacatacatttaaatattcaagaaacgtaatgaactccaataagataaatacaaagaaaatcttggccaggcatggtagctcatgcctgtaatcctgcactttgggaggctgaggcaggcagaccacctgaggtcaggagttggagatcagcctggctaacatggtgaaaccccatctctactaaaaatacaaaattagctgggcatggtggtgcgtgcctgtaatcccagctactcgggaggctgaggcaggagaatcacttgaacccaggaggaggaggttgcagtgagccagaatcatgccactgcactccagcctgggcgacagagtgagatgctgtctccgaaaaaaagaaaatctcacctgaaaataccataatcaaattgctgaaaaccaaagatgaagagaaactcttaaaagcagccaaagggctgaactgagctggttgccttctgttactgtgggagaactcacttcatcccaacttcttcatactttcacttctggagctcatattcctctgacatcttccagaaaaacagtcttaaagccttagccttttttacagtccagctcttaaattttttcctcccctttttcaataataacatgagtgtgcatccagcttgtccccaaaacctgccttgctctgaagcatccaactgtaaagactctttgccaatgtctgtgatttgtgggcccaaaacaaactatccatccttgcatatatcttctgctgagatgcctcacacagagtctggacagctctaattctttcacgagtcccaaaggcagacaactcacttctgcagagaagagcaccgcaaaaaaggaagacaaagtcctggtcaagaaacagatgaccagaactgtgttctcttccacccagctgtgtgtactcagtgatagatttcagagacagaaatacctcagcctccagcagatgcaagaactttacagcatcctgaatcttagctacaaacaggttaagacttggttccagaaccagagaataaaatataagaggtggcagaaaaacagctgcccaaagaatagcaatggtgtgactccaaaggcctgagcacctacctaccccagcctctattcttcctgcctccaaggatgcttggcgaacatgtctgggaacctttcaatgcagagcaaccagacctgtagcagttcggcctggggcaaccagacctggaacatccagtcctagaacagccattcctgaacactcagacctggtgcacccaatcctggaacaatcaggcctggaacaatcccttctatagctgtggagaggaatctctgcaagtcctgcatgcggttccagcaaattcttctctcagtgacttggaggctgccttggaaactgctgaagaaagctacaatggaatacagcagaccactaggtattttagtactccacaaaccatagatttattcctaaactattccaagaacatgcagcctgaagatatgtaaagatgagtgaaactgatattactcaatttcagtctgggcactggctgaatccttcctctcccctcctgcctccctcataggattttacttgtttggaagctacatgttctgccttcatatctttgtttcctttatgcctatcaagtcgattttgtggagggtggggtatgattggagccaaatcagagagttttctttttttcctatgggatctttctggagaaaaaaggttttaataaccttggctgctaaggacaacatgatagaagctgtctctggctatagataagtagatataatactagtttgaatatctttaggatttagaacctagcgtcaagaataggaagtaaaagtacaaattgatgtggtgaaggtatagtcccattttctgggattgggggtctttgcttatttttatttttatttatttatttagagacggagtctcgcactgctgcctgggctagagtgcagtggtgcgatctcagctcactgcagcctccaccttccgggttgatgtgattctcctgcctcagcctcccaagtagctaggattacaggcacataccaccacacccagctattttgttgtatttttaatagacactgggtttcactatgttggccagactggtcttgaactcctgaccttgtgatccgcccgcctcagcctcccaaagtgctaggattacaccatgagccaccgtgcctggccttacttactgttaaaaacccaattattaaggtgaaggattaagctgtaacatacttcactgatttcatcagcccctttggctctgtgttttactatagcccctaattggttggttatgctaatatttatagacagcggtcttgtatttgctacatcacaatgacatcagtactagtttgcctggtttaagtacaaatgaataaaacaaccatatcacctttaaaaaaaaaaaaaagcagccaaagaaaaagacatgatgatgccctaaccaagggaaaccgtgaggcactgtgccatgagcaacggtgcattccggtccagatactacgcttttcccacaatctttgcaacccacagatcaggagattcccttgggtgcctacaccaccagggccctgggtttcaagcaaaaaaccgggcggccatttgggcagacaccaagctacctgtgggagtttttcttcataccccagtggtgcctgggaatgtcagcgagagagcaccattctctcccctggaaagggggctgaagtcagggagccaagtggtctagctcagcagatcccactcccacggagcccagcaagctaagatccactgactcgaaattcttgctgccatcacagcagtctgaagtcgacctgggacactctagcttggtggggggaggggcgtcccccattactgaggcttcagtaggcagttttcccctcacagtgtaaacaaagccaccaggaagctcaaactgggtggagctcaccacaattcagcaaagctactgcagccagactgcctctctagattcctcctctcttggcagggcatctctgaaagaaaggcagaagccccagtcaggggcttatagataaaactcccatctgcctgggacagagcacctgagggaaggggcagctgtggatgcatcttcagcagacttaaatgttcctgcctgctggctctgaagagagcagcagatctcccaacacagcgctcgagctctgctaagggaaagactgcctcttcaagtgggtccctgattccggtgcctcctgactgggagacacctcccagcaggggccgacagacacctcatacaggacagctctggcttgcatctggcaggtgcccctctggaacgaagcttccagaggaaggaacaggcagcaatctttgctgttctgcagtctttgctgcagatacctaggcaaacagggtctggagtggactttcatcaaactccagcaaacctgtagaataggggcctgactattagaaggaaaactaacaaaaataaaagaataacatcaacatcaacaaaaaggatgtgcacactgaaaccccatccaaaggtcaccaacatagaagaccaaaggtagataaatccatgaagatgaggaaaaaccaatgcaaaaagcctgaaaattccaaaaaccagaacacctcttcttctgcaaaggatcacaactcctcaccagcaagggaacaaaactggacagagaatgagtttgatgaattgacagaagtaggcttcagaaggtgggcaataataaactcctctgagctttttctgtaaaggagcatgttctaacccaatgcaagaaagctaagaaccttgaaaaaaggttagaggaattgctaactagaataaccagtttagagaagaacataaataacctgatggagctaaaaaaacacagcaggagaactttgtgaagcacacgcaagtatcaatagctgaatcaatcaaatcgaagaaagaatatcagagactgaagatcaacttaatgaaataaagtgtgaagacaagattagagaaaaaaagaatgaaaaggaatgcacaaagactccaagaaatataggactatgtgaaaagaccaaatctatgtttgattggtgtacctgaaagtgacggggagaatggaaccaaattggaaaacactcttcaggatattatccgggagaactttccccacctagcaagagaccaacattcaaattcaggaaatactgagaacaccactaggatactcctcaagaagaggaactccaagaaacataatcgtcagattcaccaagagtgaaatgaagggaaaaatgttaagggcagccagagagaaaggtcaggttacccacaagggaagcccatcagactaacggtggatctctctacagaaaccctacaagccagaagagagtgagggtcaatattcaacattcttgaagaaaagaattttcaacacagaatttcatatccagccaaactaagcttcataagcgaaggagaaataaaatcctttacagagaagcaaatgcagagagattttgtcaccaccaggcctggcttacaagagttcctgaaggaggcactaactatggaaaggaaaaactggttgcagccactgcaaaaacataccaaattgtaaagaccatcgacactgtgaagaaactgcatcaacgaataggcaaaataaccaggtagcatcacaatgacaggatcaaattcacagataacgatattaaccttaaatgtaaatggtctaaatgccccaattaaaagacacagactggcaaattggataaagagtcaagacccattggtgtgctgtaattcaggagacccatctcacgtgcaaagacacacacaggctgaaaataaagggatagaggaatatttaccaagcaaatggaaagcaaaaaaaaaaagcaggggttgcaatcctagtctctgataaaacagactttaaaccaacaaagatcaaaaaagacaaacaagggcattacataatggtaaaggaatcaatgcaacaagaagagctaaatatcctaaatatatatgcacccaatacagaaccacccagattcataaagcaagttctcagagacctacaaagagacttaggctcccacacaataataataggagacttgaacaccccactgtcaatattagaaagatcaatgcaacagaaaattaacaagaatattcaggacttgaactcagctctggaccaaggagacctaataaacatctacagaactctccaccccatatcaacagaatatacattcttctcagtaccacattgcacttattctaaaattgaccacataattggaagtaaaacactcctcagcaaatgcaaaagaatggaaatcgtaacagtctctcagaccacagtgcaatcaaattggaactcaggattaagaaactcactcagaaccacacaactacatggaaactgaacaacctgctcctgaatgactactgggtaaataatgaaattaaggtagaaataaataagttccttgaaaccaataagagcaaagacacaacgtgctagaatctctgggacacagctaaagcagtgtttagagggaaatttatagcactaaatgcccacaggagaaagtgggaaagatctaaaatcgacaccctaacatcacaattaaaagaactagagaagcaagagcaaacaaattcagaagacaagaaataactaagatcagagcagaactaaaggagatagagacacgaaaaacccttcaaaaaatcaagaatccaggagctggtttttttttaaaagattaacaacaggtagaccaccacccagactaataaagaagaaaagagaaaagaataaaatagacacaataaaaaatgataaaggggatataaccactgatcccacagaaatacagactaccatcagagaataccagaaacacctctacgcaaataaactagaaaatctagaagaaattggtaaattcctggacacatacaccctcctaagactaaaccaggaagaagtcgaatccctgaatagaccaataacaagttctgaaattgaggcagtaattaatagcctagcaacctccaaaaacccaggaccagacagattcacagttgaattctaccagaggtacagaaaggagctggtaccattccttctgaaaccattccaatcaatagaaaaagagggactcctccctacctcattttatgaggccagcatcatcctgacaccaaaacctggcagagacacaacaaaaaaagaaaatttcaggccaatatccctgatgaacattgatgtgaaaatcctcaataaaatactggctaactgaatccagcagcacatcaaaaagcttatccaccatgatcaagtcagcttcacccctgggatgcaaggctggttcaacatacacaaatcaataaacataatccatcacataaacagaaccaatgacaaaaccacatgattatctcaatagatgcagaaaaggccttcaataaaattcaacaccccttcatgctaaaaactctcaaaaaactaggtaatgatggaatgtatctcaaaataataagacctacttatgacaaacccacagccaatgtcatactgaatgggcaaaaactggaagcattccctttgaaaactggcacatgacaaggatgccctctctcaccactcctgtattggaagttctggccagggcaatcaggcaaaagaaagaaataaagggtattcaaataggaagagaggaagccaaattgtttctgtttgcagatgacatgattgtatatttagaaaatcccatcatctcaacccaaaatctccttaagctgataagcaacttcagcaaagtctcgggatacaaaatcaatgtgcaaaactcccaagcattcctatacaccaataatagacaaacagctaaatcatgagtgaactcctattcacaattgctacaaagagaataaaatacctaggaatacaactatcaagtgatgtgaaagacctcttcaaggagagctataaaccactgctcaaagaaataagagatgacacaaacaaatagaaaaacattccatactcatagataggaagaatcaatatgatgaaaatggccatactgcccaaagcaatttatagattcagtgctatccccatcaagctaccattgactttcttcacagaattagaaaaaactactttaaatttcgtatggaaccaaaaaagagcccatatagccaagacaatcctaagcaaaaagaacaaagctggagacatcatgctacctgacttcgaactacactacaagcctacagtaaccaaaacagcatgattctggtaccaaaacagagatatagaccaatggaacagaatagaggcctcagaaataacccaacacatctacaaccatctaatctttgacaaacctgacaaaaacaagcaatggggaaaggattccctatttaataaatggtgttgggaaaatggctagccatatgcagaaaactgaaactggaccccttccttacaccttatacaaaaattaactcaagatggattaaagacttaaacgtaagacctaaaaccataaaaacgctagaagaaaacctagacaataccattcaggacagaggcatgggcaaagatttcatgactaaaacaccaaaagcaatggcaacaaaagccaaaattgacaagtgggatctaattaaactaaagagctttggcacagcaaaagacactatcagcagagtgaacaggcaacctataaaatgggaggaaatgtttgcaatctatccatctgacaaagggctaatatccagaatgtacaaggaacttaaacttacaagaaaaaaacaaccccatcaaaaagtgggcgaagtatataaacagacacgtctcaaaaaacagacactgtcttcaaaagacgacattattgcggccaacaaacacatgaaaaaaagctcatcatcactagtcattagagaaatgcaaattaaaaccacaacgagataccaccatctcatgccagttagaatggcgatcattaaaaagtcaggaaacaacaggtgctggagaggatgtggagaaataggaatgcttttacactattggtggagtgtaaattagttcaacctttgtgaagacagtgtggcgattcctcaaggatctagaaccagaaatactatttaacccagtaatcccattactggatatatgcccaaaggattataaatcattctacgataaagacacatgcacacatatgtttattgcagcactattcacaataagacttggaaccaacccaaatgcccatcagtgatagactggataaagaaaatgtggcacatatacaccatggaatactatgcagccataaaaaggatgagttcatgtcctttccagggacatggattaaactggaaaccatcattctcagcaaactaacacaggaacagaaaaccaaacaccgcatgttctcactcataaatgggagttgaacaatgagaacacatggatacagggaggggaacatcacatactggggcctgccgggggatgaggggtaagaggaggcatagcattaggagaaatacctaatgtagatgacaggttgatgggtgcaacaaaccaccatggcacgtgtatacctatgtaaccaacctgcacgttctgcacatgtatctcaaaatttaaagtataattaaaaaaagaaaagacatgatccaatatagtaaagcatgaatacaggtgacaacatactcttcagtatcaataggcacatgcagacagtaaaataatcgctttaaaatgctgaaaggaaaaactgtcaatctagaattctgtatctggtaaaactatctttccagaataaaactgaaataaggacaaacaaaactaagataatttatcccaaacaaacctatattaaaagaaataatggtcgggcacagtggcttacgcctgtaatcccagcactttgggagactgaggagggcagatcacctgagctcagcatttcaagactgccctgggcaacatggtgaaacctcgtctctactaaaatacaaaacattagctgggtgtggtgatgcgcctgtagtcccagctactcgggaggctgaggcatgagaattgcttgagtccaggaggcagaggttgcagtgagccgagatcgcgccactgtactccagcctgggcaacagagtgaaactctgtttcagggaaaaaaaaaaaaaaaaaaaaaagcaccagaaaagataaataggtagctaaagataaacaattattttttcttaatttctttaaaattaatattgctatttaaagcaaaaattataaaactattatggaatttatagtaaatataggtataatacatatatatgatatctacagcataaagtatggggtggggataatgcaactatacaattgcaagggtcttgcattttgtataaagtgatacaacattaactctaaatagactttgtaaagttatggatatgaactataatacttggaggaaatactaaaataataatgcaatgaagtatcgctttttttaattcaagagaaaaaattttaaaggaattcttaaaaattgcttgagtttcacttcccaagattctaattcaattggtctgaggtagaaaccagacagtaatgctttttaaaagctcctcacctgattctaatatgtttaaaatgccagtgttgggaatgtttctagcagtgctaaatcaaagttattggatgtagttgtataagagagaagtatatgttgcatgtaacagagagtatatgttgctggaaaaccatgcagatcaccagagcactgttttacctcactgaaaagcattagttcctgtgaatccatagaccacttgcttcgtgttgatgacaaagtcctcaccattttgtaaaaaaatgaagaaaagatcattgtagtatttaacatatataggtttgtgtagtatttaacatataggtttgtgcatgtctgtgcacctatagtctgtatgtaataagtctgtcttcctgttactacagttcttgaaaatagttgggtggccttttgctacattgggaagacatatttagaataatatgacttcgtatataggctacatggtatacaaaaaaatgcatgtgggggaaagtaaggggagcactcaaagagatctttcagagcatctcaagcagagattcaataagaggcctatttaagaggtcattggaagggagatgccataattcttaaagacattgcatgcaggaaaaaacagtgattttgaatatttgccacaaatggaaaatgacaggagtagatactcaagttacaattaatttgtgatcctttgctataaagctatttcttacctgggcaattctgtgtaatgcatgccatagatttattgattgtcagttattaatgattttcctcaggcacgaaagatgtaaatagatgttggtgaaaagctaccagctgtcctttcaggaaggacagtcctttatttcctttttgagggcttacacttttttatgaaataatgttgataatagatttactttttaaaatgaacttagattgcaaaaatgtaaactttatactgtcatctttatatttgttccaataatattttttaatgattattattattgagttaaaatgtgcatacaagaatgtacagaaaaatatacaattagatatgtgtaataaatgtacctactcacatcaccaccaccacagtcaggacataaaacatttaggcaacaccagaaagttccttttttccccactttcaaccagtcaccacctccatggttaacaccattatgatttttaacacaaaagattagttttacctgttcttgaagtttttataaatagaattttttttttgctgtctacaagagaaacacttcattttgtatatgcatagaaatatatatatatatatatatatatatatatatatatatatattcattttagtagcttttatagtgcaagtggtttttggttacatggatgaattgtgtagtggtgaagtctaagattttagtgcacccatcacctgaatagtgtatgttgtacccaatatgtagctttttattcctctgcccactctcacccttcccctttctgagtccccaaagtacattatatcactctgtatgcctttgcataaccatagcttagcttccacttataagtgagaacatacagtatttgatgttccattcctgagttgcttcacttagaataatggcctcctccatccaagttgctacaaggacattatttcttcctttttatggctgagtagtatgccattgtatatatgttccacattttcttcatctgctcatcagttgatgggcacttaggttgattccatatctttgcaactgtgaattgtgctgcaatatacatatgcatgcagatgtctttttaatgacttactttcctcggggtaaatacccagtagtagaattgctggatcaaatgggtcaaatggtagatctacttttagttccttgagaaatcttcacgttgttttccatacaggttgtactaattttttttttctttgagatggagtttcactccgtcacccaggctggagtgcagtagcgcaatctcagctcactgcatccttcacctcccgggttttaaacaattctctgcctcagccccctcagtagctgggattacaggcacccaccaccacgcctggctaattttttttgtatttttagtagagacggggtttcaccatcttggccaggctgattttgaactcctgacatcatgatccacccacctcagcctcccaaagtgctgggattacaggcatgaatgaccaaccgagcccagccaggttgtactaatttacattcctgccagcagcatataaagtgttcccctttcaccccattcatgccaacatctcttgttttttgactgtttaataatggctgttctggctgggctatggtgatattatctcattgtggttttaatttgcatttcctgatgattagtgatgtttagcattttttccagatgttggccatttgtatatcttttttgagatgtctattcatgtcatttgcttactttttaatgggattatttgggttttttccttgctgatttgagtttcttgtggattctggttattagttctttgtcagatgcatagcttagaaatatgttcttccattttgtgggttgtctgtttactctgaaaattatttttttcactgagcagaagctttttatttttattaggtctcatttatttttgtttttgttaaatttgctttggggggtcttagtcataaatttttgcctagactattgtctggaagagttttccctaggttttcttcaagaatttttatggtttcaggtcttagatttcagtcattcatccatcttgagttgatttttgtatatggtgagagatagggatccagtttcttttttctacatgtgcgtatccagttttcccagcatcttttattgaatagggtgttttttccccaatttatgtttttgtatgctttgtcaaagatcagttgtaagtatttgactttatttctgggttctctattctgttccattggtctgtacatctattttcataccagtaccatgttgttttaattactatagccttgtaatataatttgaaggcaggtaattgtgatgcctccagatttgttctttttgctgaggattgctttggctgtccagactcttttttggttctatatgaattttaggattgttacttattctgtgaaaaatgatgttggtatttttatcagaattacattgaatctgtagattgctttgggcagtatggtcatttttacaatactgatgcttccagtcaatgagcgtgggatgtgtttccatttgtttgtatcatctatgatttctttttttttttttttttttgagacaaagtctcactctgtcacccaggctggagggcagtggcgtgatctcagctcaccacaacctccgcctcccaggttcaagcgattctcctgcctcagcctcctgagtagctgggattacagatgtgtgccaccacacccagctaatttttgtatttttagtacggatgaggtttcaccatgttggccaggctggtctcaaactcctaagctcaggtgatgcacagcctcccaaagtgctgggattataggcgtgagccactgcatccagcctcatctatgatttctttcagcagtgttttatagttcatcttgtagagatctttcatctttctggttaagtatattcccagttttttgttttgttttggtggtggtgttgttttgcagctatttcaaaagggatttagttcatgatttgatgctctgcatggtcactgttggtgtatagcagtgctactaatttgtgtacattgattttgtaacctgagatataattggattcatttatcaaatctaggattcttttggaggagtctttagggttttgtaggtgtacaatcatatcattggcaaagagagatagtttgaccttctcatttccaatttggatgtcctttctttctttctcgtgctgattgctctggttaggacttccagtactatgctgaatagaaatgatgaaagtgggcatccttgtcttgttccggttcttccagggaatgctttctaattttccccattcattaagatattggttgtgggtttgtcatatgtggcttccttctatacttagacggaacatacctcaaaataataatgtgttgagggtttttttataaagaaatgctagattttattgaatgctttttctgtgtctattgagatgattgtatgttttttatttttaattccatttatgtgatgaatcgtacttattgacttgcaaatgttaaagcatccctgcagccctggatgaaacccagggtgaattatctttttgatatgctgttggattcagtttgctggtattttgctgagggtttttgcatccatgttcatcagggctattggtctgtagtttctttcttttttttttttttttgtccgttagatcctttcctggtcttggtatcagggtgatactggctttgtagaatgagatagggaggattacctctttctcaatcttttggaatagtttcagtaatattgataccaatttttctttgaatatctggtagaatttggctgtgaatccatctgaccttgggcgttttttgttgttgttgttggcaatttttaaaattactgagtcaatctcattgcttgttattggtttgttcaggatttctgtttcttcctaattgaagatggggggctgtgtatttccaggaatttatccatttcctctagatttcctactttgtgtgcatagaggtgttcacagtagtctcaaatgatcttttgtatatctgtgatgtctttttgtatttctgtgttacagatattgctgtagtgtctccacgttcatttctaatggaacttatttgcatcttctttttttttttttttttttttggttaatatagctaatggtctatcaatcttgtttaccttgtcaaaaacacaggtttttgtttcattggttcttttatattgtttatgtttgtttgtttcaatttcatttgattctgctctgatctttgttatttcttttcttttgctagtttgggtttttgtttgttcttgtttctttacttccttgaagtgtgacaataggttgtcaatttgtgatctttcagactttttgatttaggcatttagtgctaaaaactttcctcttactactgcttttgctgtatctcggaggctttaataactgtgtcactattattcatttcaaagaattttttaatttccatcttgatttcattgttaactcagaaataattcaggagaaaattgtttaattttcattacttgtataattctgagaggtccttttggagttgatttctagtttttctccactatggtctgaaaagatacttgtttaccttattgatacttgattatctttgatatgattttgaattttaaaaatttagtgagacttattttgttgcctatcatgtgttctatcttggagaatgttccatttgctgataagaagtatgtgtattcttttttcttttatttatttatttgtttgtttttttttaatagacgggggtcttgccatgtcggccaggttggtcttgaactcctggtttcaagcaatctgcctgcctcaccctcccaaagtgctaggattacaggcgtgagccactgtgcccagcaaagtatggggtagaattttctgtattggttaggtccatttgttgtagagtgcagtttaagtcctgtgtttctttgttgactttctgcctggatgatctgtctagtgctgtcagtggagtgttgaagtcccccactattattgtgtttctgtccaactctgggagctccagagttaggtgcatatatatttaggattgtaatatcttcttgttggattgatccttttatcactatataatgactttctttgtctttttttcttttaaccattgttgctttaaagtctgttttgttaacatcagaatagctactcttgcctgcttttggtttccatttgcttggaatatctgtttccaccctttaccttgagtctgtaagaatctttacatgttaagtgagtctcttgaatacagcagatatttggtttgtaatttttcaaccattctgtcagtggaggatatagaccatttacatttaacgttaatattgagatgtgaagtactatttcagtcatcattgttgactgttaacctactttgttttcttcatgtgttattgttttataggctctgagttttatgctttcaagatgttctattctggtgcatattgaccttttgtttcaagatttagagctccttttagtatttcttgtagagctggtctagtagtgacaaattctctcagtatttgctcatccgaaaaaaaactttttttctccttcatttatgaaacttagttttgctggatacaaaattcttggctgacaattattctgttgaaggaggctaaagataggaccctaatcctttctggcttgtaaagtttctgctgagaaggctgttgttggtctaataagttttcctttataggttacctgatgcttttgtcttactgctcttagaattctttccttcatgttgattttagataccctgataattatatgccttggtgatgtcctttttgttttcttttttttttcttctgagacagagtctcactctgttacccaggctggaatgcagtggcatgatcatggctcactgcagccttgacctcctgggctcaagcaatcctcccaccttagcctcctgagtagctgggactataggcatatgccaccacatcaggctaattttttaattttttatagagatgggttctctctatgttgcccaagctggtctcaaactcctggtctcaagtagtcctcccacctcggcctcccgaagtggtattacaggcattagctactgggtccagctggtgatatcctttttgtaatgaatctcccaggagttctttcagtttctcgtgtttggttatctaaatctctagcaaggtcagggaagttctccttaattattccctcagataagttttccaaattttttgtttgtcttctccctcaggaacactagtgattctttggtttggcaattttacataatcccatatgttttggagactttattcatttcttttaattatattttctttactcttgtctgattgggttaattcaaaagctttgtctccaagctctgaaatttttcttctactagttctagtctattgttaaaactttcctgtgcattttttaattctctaaatgtgtctttcattttcaaaagttctgattggtttttctttaaaatatccatctctagaaaatttatcactcatatcctgaattatttttttaacttcactatgttggttttcacctttctcttgcatctccttgagtagcttaacaatcaaccttttgggttctttatctggtatttcaaagatttcatcttggtttggatccattgctggagagttagtgtgatcttttgtgggtactgtagaaccctgttttgtcatattgtcagaattatttttctggttccttctcacttgggtagactatttcttctagtatttttgaatttatttttcattcaactgtgttttttaatttttttattcccccttaaggatgtaactttaatgtttacagtttattatagcccaatttggctcttgatgatttccggtgtgaagactctgagttccttggttatagagaatctttgtctgatggctttctcagatgctgtttgtagtagcaaggtgcttggtgtgtgagcaggttcactgtcttaagttttccatctggctcacagggtagaccgcagcccaccatttctttcagagggtctgtgatttctgtcagttttcctgttaagttcctgtgttgcttcttgaacaaaagttcacagtatgactctctacacactcttttgtctttccaagtaggggaggcatgctaacaatgctttcagtccaccatcttggggaaaaaagagtgtgtgtgtgtgtgtgtgtgtgtgtgtgtgtgtgtaaatggaataatgcagtatgtattcttctgtgtctaggatctttcactcaatatttttgagatttatccatattgttgcacatatcatagcttattctttctctgttgctgaattatattctgttgcacaaatatatcataatttgtttatacattcatgggatgatggacatttgggttggttacagtctttagctattatgagagaatcttatgaataaactgaaaaaattaacactcttgtacaagtctttttgtggacatttgtactcatcaaataaatacctaaaagtgcaatgatctttaatagtgcctgcatattttttgctttagtagatactgcctaatggttttccaaaatgttgctaccactttacactctgaccaacaacacagtatgtgagagtttcagatgccatatatcttgggcaatatttcgttttgtcagtccttttactttgagcatttctagtgtgtttctcatttttgttttaatttgcatttacctaatgactgatgaagttgagtaattttcatatgcttaataataatttatatattttcttttgtgaagttgtgtgctcaagtcctttacccatttttttctgtattatttttagatgctactacaataagacactaaccaaagtttttaaataagatttcagattagattacctatgataccaatgtcttttttttttttttttctgatacaggattttactctgtcacccacactgaagtgcagtggtagaagcatagctcactgcagccttgaactcctgagttaagcattcctcccacctcagcctcctgagtagctggtactacaggcatgtgccaccatacccagctaatttttaaaatttttttgtagagatggggtgtcgctatgttgcccaggctggtcttatactgctggccatgaacaattctcccaccttggctgcccaaagtgctgggattacatgcatcagtcattgcgcccagtcagcaatatattttgattgattttttaaatctcttttgcacagattctttataaaaattttgcaaaaatatacataacatgaaatttgccattttaaccatttttgagtatactattcagtggcattaagcacattcacagcattgtgccaccatccccactattccttctgcgtatttagtattttcttgaatgtaattgatatgtaacaaattacatatatctcagatgtgtaatttgataagttgtaccatatttacacatcttcaaaagtttcctcatgaccatttgttatcctttcttcaaaccactctctgcctccaccctccctccccaagcaaccagtgatctgttttctgtcacaacagattgatttgcattttcaagaattttatgtaagtgaaatcatataaaactattctttttgcctagcttctttcactcagtataattattttgaaattcattcatgttattattgcatataccaatgatttatatattatcattgttcagtattattctattgtatggatatattacaaattgttctcaagctcctggtctcaagtgatcctcctgactcagcctcctaaagtgctgggattgcaggcatgaacaaggtaaaagtttcaagtttacaggcgtaagcaacagcacctagccttggatacactacagattgtttaaccatttgcctgttggtgaacatttgggttgttttctgttttgggctattactaatgaagatggtaagaacattcatctgtaagcatatgctttcatttctcttgggtaaatcattataaatgtaatggctgggtcatatagcaggtgtacgtttaacttttaagaaaatggtgaacagttttccaaagtgcttgtactattttactttcccactgatagtgaatgaaagttctatttcctccataccctcactttcttatgaggatactttgtatagtcagtctttttcatttgagccattctaaataaagccatttattccatttaggtttgtagtggtattaatttgcatttctctaatgacaaatgatgctgagatcttttcgtgtgcttgtcatttgtaggtctttgatctttttgcattgatcttgtttctgcaaacttgctaaagttcttcattcattctattagtcgtttcatagattttttagtctcctacataaacaatcgtcttatatataaattaaaatgagggttttttttttcaaatctttatgcccttctttcctcccttctttcctttcttccttcttttctttttttcagccttatttaactggctaacacctccattacaaatttaaatagaagtgattagagtagacatccttgccttatttctgatcttaggaagaaagcatgtagtatttcaccactaaacatgaaattaacttcaatttttaaaagatgtccttgagctaaagaatacaggaataacaaatgtagggggaagctactacctctgaggcttagggagagtatccaagggaggagcaaacttggaagctgagattcaggcctggtaggaatgagtgtggctgtgcccctggttggtgaagttcactggaatgccaagggccagagctagagagctggggctgatgagcagaaagttgcccactggggtagtggtgaaacttactggaatgtgagacccactgagtctcctatagacctccgacatctgcatcataggagcaaaaagagcacattggaaccagtgtgaagagccccttcctctgctattatttgtagtgtccctgctgcgcctgctacagataaagtcaaatattgtggcaactgcaaaggagaaattttcacagggtctagtctcacaaaacatggtaaagaagctgatttggagctgagaggcaaaaaactgataaatgatacactgattgaggaaactttcttttgattctagttcgctgagaatttaaaccaagagttggtgttgaatattgtcaaatgccttttctacatctattggaattatcatatagttgttgttctttatttattttgctcattatatcaattgtttaaaaaaatatatagagatggagtctcactgtgttgcccaggctacacttgaactcctaggctcaagcaatactcccacctcagcctctcgagtagctgggactacaggcacacaccccaccacacgcaacacatcaattgatttttttttttgagacgggagtctcgctttgttgctcaagctggagtgcagtgatgtgatctcggctcactgcagcctccaccttccaggttcaagcaattctcctggctcagcctcctgagtagttgggactacagctccgcaccaccacacctggctaatttttgtatttttagtagatacagcattccaccatgttggccaggctagtctcgaactcctaacctcaagtgatctgccctccttggcctcccaaaatgctgggattacaggcgtgagccaccacacctggccacatcaattgattttaaaatgtgaaaccaaccttgcacttctgggattaagtcctactttttatgtattgctcaatttaatttgctaatacattaaggatttttgcaacagtgttaaaaggaatattggtctatagtttagttgttttttttcttcttataatgtctttgtcaggttttcctatcaggatttgcagacttcataaaataagctgggaaactgtcttatcttcttctattatttataaagttgagtaagactggtaagattggaattatttatttcttaacttttttgtagaatttaccagtgaaaccatctagtcttgctggagttttttcttttcgatttggtaggaaggtgttttggcaacaaacctactttcttttatagatttagacttttcagattttatttcttcttacctccattttagtatgctgtctttttcaatgatttctccaaggcccctcaggaagaaatttagaacaaaaagtgatggtcagaattcagtcctcaattctcctttgtctgaggcctgtgtgatagctgttggcatttttcgtctggtgggagtttctgataaacaactcaagaacatatgttaagatgttatcttttagtttccatgggacatcagaataccttgtgactctggcttgcttcggaaactgtttttactaccttcttgcttatcaggttgctcatttacttttcaaggctagctgggtgcctggactttcccttgaagggactcaaaatggttcctttatttccatgctgaggggggcccagcaggtccctgaaaggggtcgctgttctatctcaatctttttctagcttcttatgctggaatcttaggtcaatgattttatataatcattattatgataaaattattataaaatattatatataatatataaatatattatttataattacctaattgtatacatagttttcttaaatacatataattatttaagcctgtgaaattttcctaaccactgctttagctgcaactcacaagttttgctatgttgcattttcttcaagtttgaaattctgaggggagaaaacacacttcacctgtttgggtttttttctgctctctcactcgacacaaaatcaacacagaagacttcagtgaccaaatatatggagacctctccaccagcaagcaagcagtcagttctgtagcagacacccagctggatatcccctaattcaattctaacactatctacccagagatggtatcagataccacagattgaagtctcagtgtccagactgcctcatgcttcagacaccagttacaagtcaaggccccctgaacttctgaccaaaccagcttcaagttggggttcctacaactccctgtctagtttcaattactttgctagagtggctcacataactcagggaaacatgtttactagtttattacaaaggatatattaaaagatacaaataaacagctggttgaagagatacatggtctgggtaccatagctcatgcctacaatcccagcactttgggaggttgaggcgagaggatcccttgatcccaggagttcaagaccagcctgggcaacattgcaaaacactgactctatcaaaataaataaataaaatagaaaaaagaaaagataagctgcataatgcaaggtatagaagggtcccaagcacaggagcttctgtctctgtggagtggggtgcaccaccctcccagcatatggatgaatttcttgttcaccttcctataagcctccacatattcagctatcctgtaccccatccttttgggccttttatggagacttcattggataggcatgattaacaaccatgtagaaatgtgattgggccaaaaaggtgtgatctaattgtaatagattgagggggaaacccattaaggcctgtctgttcagattcatcttggcctctctgcagcattccttcctccagggtatggggcaaagctcttttgaaacagaggtcttgtaacctacagtcagacaaggtaggtcagagaatttctttatggccagaggcagaggaagagtagagtatatttttagtttctaagggcctgccttggggagaaaaaggatcaggtgaaaggaaagcagaaggtcagagagagagattgttttctgaggcctgtttctgaggcctaaagcacccaacattttaacaaaagactgtaactaggtctgtgggagttaagagccagaaaccgtggacaaaaatctatgtctatatctatatcactgtcaaaatcagataattaaaatttatacaacattatcctcagaccctattattatcccaataatatccttaggtattaagttcagaatcacacattgcctttgtcaaacctatttagtgtccttcaatctagaaaagtttcttaatctttcctcaactttaatggtgttgacacatttgaagattgagggctagaatttttttttttttttttttttttttttttttttttttttttttttttttttggagacagtttcactcttcttgtgcaggctggagtgcaacggtgcgatcttggctcaccgcaacctctgtctcccgagttcaagcgattctcctgcctccaaagtagctgggattacaggcatgcaccaccaggtcccgctaattttgtatttgtaatagagacggggtttctccatgttggtcaggctggtctcgaactcctgacttcaggtgatccgccctcctcagcctcccaaagtactgggattacagacatgaagatgtgagccaccgtcgcctggcatttttttttttggagacagactcttgctctgtcgccaggctggagtgcagtggcatgatctcggctcactgcaacctccatctctggggttcaagcaattcttctgcctcagcctcccgtgtagctgggactacgggcatgcaccaccacgcctagctaatttttgtatttttaatagagacagggtttcaccatgttggccaggatggtctcaatctcctgaactcatgatccgcctgcctcagcctcccaaagtgctgggattacaggtgtgagccaccatgcctggccctggctacatattttatataatgtccctcaatttgggtttgttaggtatcttctcatgattagatttgtgttgtccacattcgcagagacgtcataggagtaatgctgtgttcttcctattgaatcctattatgtgtcacaaaattttgatgtttttcatcactaattacattcacttgctcacttaattaaggtacttgtaggctttttatctttataatcagtaaatattttgagggacagtactttgaaactatgtaaatgtcttattgtttactttatctgctactaatgtagccactccaactttcttatcactcatttcaggcaaatgtttttctattattactttcaacctatctgtgtctttatatttaaagtgtatctcttgtagacaacataagcatctcttatagactttcttttttatctagtctgacaatatctgcattttaattgaaacattagtccatttacatttaatgaattcttgatatggttgattttaagtttttcatcttattatttttattttgagccatctgttattgctcctttcaatctgttttctttttctcttttgcattaatcaaatttttaatttttcattttagttcttcaattggctctttacctatacctatgtattatttttaagaggttgctttagggtttacagtatgcatctttcacttaccgcattggaatattatactatgcctcagaaaacttaactatatcattttattgttttctggtagccatcggttccgatgagaagtacaccatcatccctgttgttcctatgtgtataatggtggtggttgtttttctgacttctttcagtgttttcttttttagctttggttttcaatagtttccctatcatgtgcatagaggtagttttctttatattaaccatgctttggattcactgagtttcttggatataaaagttgatatttttaccaaatttaaatcatttctcaaatactgttatctgttccattctctcttcttctgtgacaccaattacacataacattagacttttctatattgtcctacaggtcattgaggttctattgatttttgaaacattttttccttgtcttcaaatttaattatttctgttgatctaaactgaaatttattggcttgttcttctattttttagtctactattaagtccatgctatgatttttacatttcagatatagtactttccaattctggaacttccaattgtttctttttatgtaatttttctctgctgagattccctcatttgtttggtaattatgaccatctttttctgttaagtctttgaccatatttataaagctattgtaaattccttgtgtgctaattccaacatctgggttatcttaagatatctttattttggtttttttctcttgaaattgagtcctgtttttctgtttgtttgcatatggagtaattttttatagcatactcagaattgtggatgataccttgtagggactcttgattctgttatcttcctctaaagaatgttgactttttgttttgtaaaagttaaagctgactaattacactgaacttgttgagtgtctcggtttttcccttagtctagttgaatctattagaccaggtccacagtcctggtacatagtctatacttttaaggcatggcccttctgagatttcagtgggaagtctgaaatatgtactaagacctctaactaagtggaactcaaactccaaattctacccctatgccttgggtagtagctgaaatctctgatcagcttttcaactttccttttgtgggtttctgcagacatcttggagtctcccatacattgtcaattcagggatcagccaaggattttaagggagtctatatgcatatatggggcttcccctttttggctcttttacccatctcttttattccatcattttaatcttatttaccacatctaatgtctaaccaactgaagtagcctaccaatcttcctgattcaagtctttcccctctttaaaccattcttcacactgcggccagatttcattcactcatttactcatgtaacaaatagtcaatgagcactttcctaaaagacaatactgtcaagcagtcaagctactgcagctgctaggctggcttgccacatagattcagctgttaaaaagaccataagtccaaattgatttagacagtttattgcttatggcacagcaggtagcatgagcttcatgtctgcattggttctccttgcccccaagtcccataagggtggtatggaggcaggtccacgtagatgctgcaaaggcagagggtcagtgtcacacctgaggaaacttgaactttaaaaacctccaatcttacatcaaggctgtgagcaaacctgcctatcctttgccaccaaatgaaacattatctttattatcctggttagcaaacaaatctgtcctctaacctgaagggaggtaccatttttagcttccaaagcaactagttatgcagacgtctttgaaaagatagtccaaattaccagatatgcagaaacatgatggacaattgcttccaaacaagtacaaggagaaagcaaaccacttaggtcaagttttgagaatgatttcagagatatcagaaatgtgtccatctgctccccaaccccagttatcattctcctttccatctgcaaagataaaagaatctcaaccacttgctaattatagacataaatttccacaaaaggttttaaatatttcatcccacaacaagatataagactggaagccagaattaccttggaagtgttgggctagcactcctttacactaaactggaaaggtatagtctgcaaaagcaggcattacctgtttataattagcaatttatgtatactttaaacagctatccaaaggaattgagttaggtttaatcagaagagtaagagactagagacatgcactatggttctagctgcaagggccttacacccaagataaggagaatgggcgcatatacttaaagagggcataatcttacaagccagtgttagtatgctgagtgtcccatacaagcaagtctggccatagtgcttctcatattcagaggcgggtacagtcattagggggtgcttttatagaacatttcagtttccattattcttctgactgggtgttgaaaagcagttattacaatagtttttttttttttattttgacttcctgatgcatctgcagatgtgcactgaacttaatactgtagtcacaatggtgactttacatcattcagggagtcattccttaagcctagctagagtccttccacttactttataagtacataattccctgtattaaaatctttcctgcctaaaatacctaaatggcttctgtttcctgtactgaacctgcctaatacatggaggaattgaaatttcaggtggatcttaaagatatggtcaacttttgacatagaatgagaacccagagagaacttcaggcagagggaatagagtgagcaaagattaaaaggcagaaatggccatggcattttttagaaacattgaggaaactgattacagaagagaatgatagagtttcctgttatacaaatttctttatttcctatcaaatcctaaatgttttcatctctttttcttttccacttccttttcttctttctctcttccctctcctttctttccgcatatcacttgtctatcgctttaaccttccatgtcacacagtagcattcatagacattgcttacttattttgggggccttcagaattaaagaagttgctgcacctccaaagttttgttctttccactgaatattccactattaggtcagcaggctcattcttgaacttggctctattactaagcagtctcattcataaatttagtctccttagactaactagatttattgtgggctatcagaaatcctccccagatgtgcatgactgcacttggaagctttgagctttacagccctgtttactgccacctgattctaaccagagcaatatctcttatccattggcagaaaagagttaaggatgtgatagggaatttgagttagtggtaggcatgaaagtaatgtgatgggcttgtagaggatgagtgcaaggcatgttggaggcaataacatagatatttcaccatagctctcagcaaattatatctcctaaggtacaaagcataaagtccaacatacatttgatgtttagcatctatagtatttggtgagccattgtgaagcacataccagttacttttgataaagtagcttgaaagaactcttgatttttttttaaatgcttgcttcaaacataccctgtaattttgttttcctgccccatttactgttactcattctcaatcttttatattgcctattactcagtagctcgacttcttgttgttaataactgtagtctcgggtaactttttctttgtctttgtgaacatttttttctcaagtttattttatccaggctaggtatttaacagctctgtgtttcttataaaaagaaatacaaattataaaagctaaaatgaaccttgaaaaacatttactgcagcatttcccaaagcttcctttttttttttttttttttgaaacagagtctcactctatcatctaggctggagtgcagtggcatgatctaggctcactgtaaactctgcctccccagttcaagcgattctcctgcctcagccttccaagtagctgggattacaggcatgcgccaccatgcgtggctaatttttgtatttttagtagagacaggtttttaccatgttggccagattggtctcgaactcctgacctcaggtgatccgcccgcctcagcctcccaaagtgctgggcacgcccagccccaaatcttctttcttaaagtaatattcacatgtaatgttgtgtaaaaaaatgggtcccatggtcagataagtgtaggaactactgcatgtttctccttgaaaatttagcatgtataagcattctagaagctctgagaagttgcacagtgaagaaacccattaattttttaagtccaaaatttctcataatcatttgatcccaatgctttttttttccagcataaactaacagcatttaaggaaacagtgatctgtaaaacactttggtaaataaaatactagtttataacttaaatgaatttcctcatttcacaattgaggaaactgaggcccagaaagttgttttattcatcacaattaaaaacaatgccttacacaaagaaggtactaaataattgtttggtaaattgaatgatatatttatgtttagataactagttagagccaggactaaaacccagctgtcctgacaagttagacctatagcatttaataaggataatgcagttcacttctattcactgctatttaagctgatgataaaaacattttataattgctattaaaaaagcatcatatgctggtttaaaaggcaaactaaagaagttgaatagttggctgatgttttaaatcgacttagaccacaggtatctatctctttagtttttaacagtgtcaaatattggtctcttgatattgttcagagcactctgggttttgaaaaaacagttcaagtatgtgcaaaggcatctgaaaggggaattttctgaagctttttctactcccatgattctcacaaaattcttcaattcattctagtctagaaagtaatggatcttccataaagatgtgctaatcccaaggtgatcacaaaaaaaaagattttcccacctctgaacaggtttcttttgttgttgttgttgttttgctacttttttttaagtatgcttagcatgttataccaaaaataatgtttcttttttatataaaatattgtactatatatataagaaatacctcagaatttctgtttttaaggactccattttggcatgatattttttggtcattacctacttagctatgtcatattttaatatcaccaaagaaaatatcttaaaatgaaattcttgaattgcgcttgacctttccggttgacagtcagcttaaattatatagtatctcccattatctcacaacagatgtcatctcttaggaatgcttcctttcattgaagacactgtgacaataggaaagggatgtggggtgaaaaaaaagtcacgtatcttttgtttatctgcaaaagtctgtgcatagtttttattgctgaaaataaacatgtatcatgattggtgtatgggggttcacattagtatcagaagtttttatggccactctgctggtgacctagtatattgtgctgttttctcaactgcctttgtaaacacagtagccttaatagatcattttgaaagaagctgccatcctgctgcatctgttggtagcctttctcaggtttctgacatatccttaatctgatgctcagccttgtcatttggatcaatagtaaactagataagatgtcttctacttgcaaggctatggctataaaatgtatttgaaaaataaattcactttttatgtccatgccacaaacctggggagtactaatttgtcattctctctccatctgtctgtaaacagtcagttaaattggttattgatgagaagaaggtgaattatacttgaaacaagagtaatatagaaataaacttcatagtaaatgtcttagattcctacaaaaaggtgacatattttagctgttgtcttaactttaatctctagaataatgagcaatttgttttatattttctattccaaatcatcaataataattataattaattataattataaattatactttacaaaccactcacatatagtattcaatcttgataatctctataactatccattttacaatttgtaaagcatttatttattcaaaaaatgtttatgtagtgcctactataaatgaggcactgtgctaggcactacaaattctctatacaaaacaaaattgtgatgatagaacatgttagaattgtagcattttaatgttagaaggaatcctagaaatcatctactactaacttctcattttacaggaaactagatcttagacagtttgtgaatcatgctcaaccagctatttagtgactttttttctattataggatataaacagataatcttttaaaagtaaacccatagtttaatctttttgaatgtatatttcctcatctaagtagtgagaatacttctggttttcacaacaagaatactgtgaatattaagtaaggcatgagtagggagcattttgaaatttaaatataatctgaggataagaaacaactccttgtagacaagaggaaaagagtatgtaaaaatgtaaactgcgattacctcaggtttaagaggtgcaggctgatcactgttttcttctttatactttatttttgacattcctttaatggacatgttattacttttataacaaaaattttaagttttttttctttttttctaactttatgttttgatataatctcaaatttacagaaaagtttcaagaacagtacaaataattttcatatactctcaaattcctcaaatgtgcacattttgacacgtgtgctttatccttctctctactttgccttgatatatgggaatgtgtagatattgccttctgaatcatttggagtaagttgcaggtgtgatactcctttgcccctaaatttcagtgcatagtttctaaaaacaaggacattctcttacatagccacagctcaattatcacaatcaggcagttaacataaataatattatctcatccaaaaatcttacttagattttgcccattgtcccaacaatgtcatctatttaaaaaaaaaaaaatccaggatcaggcactccattcaatcatttatgtctttttagtcttcattaatctgcaacagtttttcagtcttttgtgtatgtatgtgtgtacttcatgatattcacatgttgtaagtatacaggccagttaaattgtacagtagccttcctttttaatttgtctgatatttccttataattagattcagattatgcacttttggtaagaataccacaggagtgatgttgtattcctctcagtgcctcatatcaggaagcatgtgtcatcaatttgtcccagtaatggtgttaattttggattattcacttgaataaaggagctcctgccaggttcctctgctgtgacgtcactattttttccattgtaactataaataataagtatcttgtgggagctaatttgaaactatataaatatcctggaaccgtccaacccactctattgttagcatcgtttgaccactcacacctgagttggttgttatgatgatggctgccacatgaaagagttatttatttattcattcattttttattttttgtttatttatttatttttcaggcagagtctcactctgtcacccaggctggaatgcagtggcactatcttggctcactgcaactgctgcctcctggattcaagcgattctcatgactcagcctcccaagtagctgggaatacaggcgtgcaccaccatgcctgctaatttttgtttttttagtagagatggggtttcgtcgtgttggccaggctaatctcaaactcctgacctcaggtgattcacctgcctcattctcccaaagtgctgggattataggtgtgacccactgtgcacagctgcacaagttatttttaaaaccactgcttatttaagatatacagttagatgtatacttagatgaaaactatgcaaatcctctctctttttaaacaaaaaaactaaaaaggattagaagagttttcacagaaatgctagcagagcttgtgttaggcttagggtaataaaattgttggtaaccttttttcttactttgttttcccaatttttaatagtttttcaaaattttcaatatatgtaaagcataaaatttctaatttttgaatgtgtttctaaaatttatgtttgtttatttccatttggtccacaaagggcttgagggagatactaaaatattgatttcagaattgtagtgtgcttgcacttgaaagaatagttagattacagttaaaacatagctataacaaacaggacatctaccctggcataaactacagattgacacaactaaaatagtctttaatctgcaaatctttattcctcacttcagccaccaagctgtagcattatgctttctcaactcggttgcttctcttagtttcaaataaaaaggtctaaaatggtggcagacagatgaagagcagtatagagttcagggattgacttgcagatggaggtatgttttgatataattttttaaagatggctaaatttgaaactagaagatacaattttgaattcaagcactcactgtgaggatttaggctaccattttgaaaatggataatagttactaagtcagattactagttatggtcagcatttgattaaaccctttaatgcatggtctgaatgaggttcattaaaggttttttagtataatcgaatttacttacacatttgtctgtatatttgtcttttcccaccatctaagaaatcccatccatagtgtggaactgaagtagagaaggcaaaagatggattcaatcagttgtttgaaacaggtcccccaaaggcacacatcttcgcagagtaggtgaattgatttttctaaactgcatgctaggatcaataaaactaaggtacattgttggaaaactaaagatggagcctacaagacttggggtgcttcaaaggaaccaggagttaaacaaaatttgttgcatttagcttctgagtttaatattaaaatatgatgttttaataactttgcttgcagtgtcactgagaaggctggtcagggtcagtaagaagaacaggctacacagattatcatggacatcaaacaatgagaacattaggagcaaatgaaagctgttttgtttacagatactacttttatgatgagaggagagcaatgatggtatctgagaaagaaaccaatatttgttgagtactcgctgtgcactggtcacttttttttcttttttaccaatgggaaatctgaggctttgagaagtaacttgctcacagttattaataatatagccaatgaagtgcccagatctgactggttccaaaatccattctcattttattacaccgtactgcctccccatggagtagcatttttggatcccctaaagcgaacatcaatatgctaggaaaatgaattacttgtgcagtattgggaaaaaggaaatggatgtaaaaactgttaccctgtggttaaggaaaataaaaattattagaaattaagtcattgttgagtcagttagaataaaaaacatttagttttgaagtagctatagggagcaggtcttctgccttttagaattagaatcatagagtcaaaggacattaagctgggtgggctttagatcagaatccaccctccttatttttcatgtgggaggaaacagaggctaggaaaaattcagtgatttgcctttgggtgtgggagtgttctggctgagacctctctcatgtccctcccttacttaaatccttcagtactggccgggtgcagtggctcatgcctgtaatcccagcactttgggaggccaaggcgggaggatcacaaggtcaggagatcgagaccatcctggctaacacagtgaaaccctgtctctactaaaaatacaaaaaattagccgggcgtggtggtgggcgcctgtagtcccagctactcaggaggctgaggcagaagaatggcatgaacctggaaggcagagcttgcagtgagccgagatcgcgccactgcactccagcctgggcaacagaacgagactccgtctcaaaaaaaaaaaaaaaaaaaaaaaaaatccttcagtactgcttcagaagactgaaaggaaaagcccaaactccttgaccctgcacttttcgtcatcgagttcttgcttatcttttgggcttcagtgtcctgtgtctccagttctactctatcctcagacatactgtgtttttaaagctttcattctagtcacctctttttcatcctccacacacaatgccgtcgcacattcagcttccttcctactttaagctggcttaattgcatatactttcaacatgcagctcaggcactgttttctccaataagcttctactgacccctcaaggctgggttaggtgcccctctacagagttcttactaccgtgtgtccttacctctatcatagaactgatctcattgtatgacagcagtgaatagcattgcatatggtttcactttctattacggtcaaagggagggatagtgtgggggttattggagcatgtaataagtggatccaagagacatgatatacacaacttactaatgttggcttcagaatatgcatataggaggagcttatggggacaaattgattggaaggagtgggagtaagatttgaagctgtctttatatagcactttacataaaattcagaaaatacttattgccctccatatcaaagaaattgggagcaggaacaagatggagacattgaggagtgtcaaagtgttagtaatcctaagttaagatcctgttcaactgccatctctttcatgaagtcattctgttctaaccccttcccctcttcacaaggacatcttggggaagtcacaaggaatgacttttaagtacatcatctatcctgtctttgtgttctgtttttgtatcctttttgtgcatttacccttccttgcttataattttgcattgcatacaagcgtacatctgtataaagcttccccaactcttagcatggagtctgatacagagtaattacatcaaaaataaccattgaatgttgaatgaatggtttaattaggtcagtgcttctcaatcccggttgcatttttgaatcacctaccgaaaatttaagaaatattaattccaaagtcccagaaattctgattttgttgatctaggatgggaacagactttttttttaagctcctaaggattgagaactcctagattaggttctttgtttcaacagtggttctcaaagtttaggattctagaccagcagcagcagcacttcccagaaacttgctacaaaatgcagattcttggcccctacaccagtgaatgacaaactctgcgggagggcctatgtgttttcaagccctccagacgatcttgatgcatgctagagtttgagaacttcttttgctagagtttaagacaaaaaaaaaatgttgtccttaaataaaataccaactgtgagaaaccaaatatactttataatcatcctaaaaggttgtaccaatttaaagcaccactctaaataaatcagagtacctcacaagcacaacagaattatccttgtggaaataagcatcccagcattttataacttttttcaatatttatttttggttagtttcctatatataaaaggctctccaatgaaggcattaattttcataataatctaaataaaataggctatattagtcaggaagagcacctgaaaaatctggcattggataaggaagcctcagagtcaagaatacctttccataatttcctctcatagagaaaagcctttttttgacagtaacattttctccttctctcatttgtgctgtttgactccgtgccacttgatagctctgtctattcctatggaaaccaagttagtggatggagccaaggcttggagaaggcattggggggaaatattagaagagttcagccttagagcaactaaagatgttgcctttccctcagtcaaatcctctttgagagccagaactatttcaagccagagagatgttcttggctgatgtattgtctagctgctctgccagatggatgaacatcttaaacttggaaaatagcaaataaagctcctattctgtctttggagcacattcttagcctttgcttacagaattgtcaaataactaaaaaatatatttttaaagatttgcttaagatggcaggttagtgatgtggttctcatcatatttgttaagtacttagaaattttagcaataaaacacagaattaagccttgacaatcagaagtttaagtaaagaggaagaatgtcggtcagtggaaaaagcaatgcagatttcattttatttctgtagctcagtgaatttatgtctttcatgagttgattgctgtaactgtttgcttccctataaaatcactttaaagactaagcaaccagagtacaaacagacatctaaatcaactgaaataagaaaattatctaagcatacaagaaggcattctcctttctaatccatttctgctctacattttatatggcactggtagctaactcatgattgcattgtactgagccatttatgtggatatttatattatgtttatatttcaagaagggtgtagagattcatatttccaatttatattctttgatttatgtcagaaaattaatgtcttctgagaaaacagttgagacaactattaatatagatgcctcataaatctatatcttgaatctagccatctcttctaatgttcaggtctatatgtatctgcccctccccaacaaccttttctttttgctagacctctctgcatagattcccttcaggtgcctcaaactccactttagaaaaaaaaaacagaactcaaaaatttttatccctaaccctatttttttctcccatctcttcagttgttggtaacaccctctatctggtagccattcaggaatcttcttatgtatttcactgatctcttcccttatttccatttagctctcaacatttctattgtgggttgctgtaataacccccttactgctctgcttgcctaaagattttttcccctcaaatcagtgcttcacataacctccagtgtcttttctaaaaacacaaatccagtcatgtcatttccttcttaaatcttctctttttcctgtcttagtttgcttggccttctataacaaaaatactttagactggatggctggaacaacagacatttatttctcacagttctggaggctggagagtccaagatcaaggcaccagcagattctgtgtctggtgagggcctgcttcctggttcatagatggctgtcttcttgctgtatcctcacatgacagaagggagtgaaagagctctctgaggtctctttttaggggtactaatcccatttatgagctccaccctcgtgatgtaatcatcttccaaatgtcccatatcctaataccaagacattggcgttagaatttcaacacatgaattgggggggtttgggggttggggggacatatattcagtctgtagcactcctttttaccaatatgatcaactttaggctccttatcataacatattagactatccattttataacccctgctcacctctctgatcttacttttcacttcctcttacagtgcatttcttttcttttttctttttttttaattagagaaagggtctcactatgtggctcaggctggtttctaactcctgggctcgagtgatctgcccaccttggcctcccaaagtgctgggatacaggcatgagccaccattcctggcccttacaatgcatttcatattacaatgatattgaattatttgcggagtttgagatgagattttaccctaaatataagctaagaagttagtctgttactgtttcatggatgctaacaatagatacgagactccgcagtcagagacaaagtagtttactactcacaacacagcaaaaagaatgagcaccacgtctatgcttcccttgcccccagagaacatgtggaagttgcagaggctgcacacagtgggttttcatcacaactgaggaacaccgaacttcaggaatctaccacttttatagtaagcacttagtaagcccagaggaagacattacctcatctctccagttgcttgttgcaaacacaaccctgaaaaattacctaagtaaagagtggccaagactttgcattcttggcatacccagtaagaacgtttaggaatgcttcaggcccatggtagattgactcttccaacaacccatccctcagcccagcattgtcttgacatgagtatgccactacatcagctacttttatttatcttaccaagagagactaggaccatcgctttaatttgtctcatacagcacttacttaacaagactccaagtagcaggataaaaacatcctgtaatattggtatcaactatgtccctcagtatcttggactaaatcaactgtgaataagccccagaggagaaagtagatcttactttatacagctaggatgtaatctaagtctggtctgttatctattttgacccatgcaagggagtttagactgacatgctaatctttggcctcgttgcagatagttacaggaggcgctagattacaggggccaaaaagcaacccccaagctcaaaggtggaatacaccatggcctactctttcctacatacaaacatgtagcctaaagaggctgaaataaagagtcactttatttcaggatttgtcattaaacttggatcaaccattacattgatttgtctaagccacatgggcagtatcactaagtagttgttacttcagttgccatgcatggcataatccaaagctgctcacatgtcagaagaagcatatggatttgtgtacatcagattaaaataaggttgtgccagtccctttgcttccatgtatacaacggggtccacattcaggagctgtcattgatggtatcaagcacagcaaaagaattaagaaccaccaatgcccatgtgaatttttctgtttcatagcaagcacatggtcagagataaaacagacgcaggtcagatggctggcctcagctgctgtttgattcaggtagctcactatatatttgttttgccaggatgcacttgcggatccagaggacaaagaaagtattaattgtcctccccatccctgtacttcctgaggtctcatgtgtttccttcctaggggctgaagttgttgctttccttctttggccacatagttaatgtgtcccattccagtagatataacttcgccttttctccaatcatcccctacttgtgcctgtagcttatagaagggtaagtacatatgggacaaatttagaaacctattatgtcttccattttggcctatatggaccactatagaatgactcagtgagcagggcactcaatcagatggtcattatggatatttatgatctgggaccttatcagttgaacaaaatgaatccaggtgggtaaacccaaattaagcttgaatctctaagcccccttttggctggctgccacccaagggatatatgaaacaaaccatcctgagattgcttttgggaaaaagaaagaagcaagataaccagggttgggccaggcagaatcccaaattttcaaaacagatgtatataatcccccactccttttgtcctgattatttcccaggaggctacaaggatgaaatgaaccctttctgaaggtggccacagttagtaagcaaactgcttcatacaggagtgtggaccaggaggaggtaagagaggtggagccagaaacatttttgagttgattttcaagaaggcctttccaagctctcaacaattccagatacctgaggatggtaggaagcatggaatgtccattaagtacctaactattggctcattgttaggcatatcatggtcagactatagaaggtctaggaaccccaaaacatggtcctcagtgctatagcttgaataggctaatcagattggagcagcaactccatatggtggagcagcaacaccataacctgaaaaatgtctatggtggaaaggcacgaggtgagcccaagaggaggtgacagaggtccctgctgggaaggggcaagggcaatcctccatgtaatgtggactccttcaccacaagaaaaggaggccaactgggcaagatacataagtctggtatgcagtggtatcttctgcatgaaaaacataccttttactttgtatccattctattgtggtgggttcattgccttatctagtgcagtgatggatcctagtggcaaatcccagtgaccaggcaatacagacttgttcagcgacttgatttcagtcggtcttatcagagagcaggcccttactgttactgtgggtatctatgtgagtgacccaaagtgtctgattggcagccacaatttgtttgtagtttgtggccccaaacaggaatatctttaatttaccaactgtagtcttccaagtggcagaccaggtgactacagtactgttagcagaccaagaatcagtaaaaatacggctagtctttgggagtattgcctaaggtaagggtgatggcttttcatttcagcccattgggctaactggtcattaccactcagtctcctggagctgtcattgaggttggacagctactgccccctactggacaccatcgggttttaacttagccaaagcatcagcaaaccaggccaaggcatttaagggaccattaagccagcagctttgcttcagacagtggccacctgtatacccagtgctttgtcctcaatgtcaaataagtcaggctaaagcaggaatcagatacatagaacagttgactctgtcctattaggcaaggttttgcattcacattcacttttgagcacctgctcactcatgtctcaaccaaatgaacttctaatgttttcaatccacctaaagatccatgtcaaatagcaaaatcttcattgttctctccatttatttctgttttggagatttcttggccctgcagccgcaaccacatggtctttcagcttgctgcccccgtggtcatgtaccattccttcttttgcctgcccagaggaaggtgagcaaaaacaaaggcactatttgggtggcttgctttaatcccacctctcaccattcagactcattaacagagagaatactggggtcactcgccccttaaccttgcccaccacctgggcatgatctcagggggtcttctcacccttgaacctaaggatacctgagaatgggcctctagggttcttgtccttactcttcaagaaaactatgtctctccagctgggtgcagtggctcatgcctgtaatcccagaacgttgagaggccgaggtgagtagatcacttgaggtcaggagtttgtgaccagcctggccaacatggtgaaaccccgtctctaccaaaaatataaaaattagccaggcatgggggcacacacctataatcccagctacttgggaggctgaggcacaagaattgcttgaacccgggaggcagaggttgcagtgagccaagatcgcgccactgcactccagcctgggcgacagagtgagactctgtctcaaaaaaataaaaggaagaaagaaaggaaaactatgtctctgtcagtatcctatcatcttttactgtcttgtcagttctggcatttaattaaccctatttacaaggtaataagttagctgcagatgctggcagaagacacaagactcccatcagagacgaaaagcgtcattactaatggcatagctaggagctaggagtacttatctgtttgcatgagtttccctcccctccaaggattatgggggcaatatggaggactcagatgggcccagcacacagtgggtttgcatgacatctgaagagtgctagattttgggaatctccagcttttagtaaatagagtagtaagcaagcctgcttgttctttgccctggtgggtgacattacctcgtcactcaagattgctcactgcaaaccccactctggaaaatggtcccagtaaagtggagtcaagcttttgcattcttggcatacccagtaagtacattcagggacattcaaggcccagggcagattgcctctcccaacactattgtggtatttccaaaactcatttgtgtctgcaaccactacagaaaagtttgatataatgaaattactgatatttgcgacctatatacttcctagggatagtaattctttttacaaattaatacagtaaatgccttgagagtttataaatacataattatatagctataattataattaataaatcatgtttctatttttccatttcaattttaagtaatgtattttgggtatataatatatttaggatttaaaatgaactatgacagagtacctactttacatttgtgtgtgctattataaatatagttatctttctaggccaaaattttataccaatttgtaaatgaacaaaaaaatatagtgaacatttatatatatatagtgagcaattgtttttctctccaagtacagtgacagaaaatataagcactggggacacagaacaagaatgcaaagaaattaattggaaaacatgtaggtcccaaagtattggttttgggaaaacatctggcctcttcagtactccagtggggagaagggccaccgtaggcagttttagtcaagtcttgggcattgaagtctgttaaagtaatcgtctcagctgaagaggaagcaaatagcaaaggccccagggagacagatatagaaaatatggtagccattttggggaaaaaatgtagaggtaggatccagaatattttgaggatcagctgccaattatctataagttaatcataaaggcacttactgggaacaaacagcagtcctgtagaatatgatttcagaatagggttcaggaagatgcctccttccttttcactgattgaaaggtggtcatatttgtgcaaaaggcaagaaaattcttagaattttggaatattctttgcctcactatgaggctacagctttataggaagctgtttatctagagaaatggcagaagcaggacaccatccaagcctcaggtcaggaagctactcactagctcactgttaataattgtgacatccctaatatcactgaagacagggctccaggagatctgtgtaggagcagattgttataatggactaggagctgggtggaagatgctctatgggtcaacaaggagaaaaaaggaaaacaaagcaaacaaatgaaaaacaaaaatgaacctgcagacagaaatttcaaaatatttgaagaaatctaatgctaacaaagcaaacaatattattcagattacgaattcattcctagtgggagagcataaataaagcaaaaaaataagccacacagagaagatatttgcaaaaccaaccaagaattagtatccagaatacataaagaactcctatagatcagtaagaaaaaaaaacaaatagccaagttcagaaatgagttacaacacaagaaggctatttacaaaagaaacaaatatccagcaaacatataaaaacattccacctcaattcgggaaatgcacattaaaacacagctgtaggccaggcacagtggtgcacgcctgtagccccaactacttgagaggctgaggtggtaggatcacttgagcccaggagttgagtccagcctgggcaagctatagcaagaccccttctattaaaaaacaaaacaaaaaactgtaaccgtcagattggcaaaaattagcaagtcagacaaaacccagtgtggtgaggatgtggagaaacaggaactcatacattactgttatgaatgttaacttggagtagctattttagagagcaatctcaaaccagaagtttcagaaattcttatgtacttaccaggagatatgtatgagaatattcattacaatattgggtaatcttgaaaaatgagaaacatgctaaatatccctctagagaagaataaatatattattttcatatgacagcatacttattccagtgaaaatgtatgaacccaggcaacttgaataaatctgaaaaatactgctttgagtaaaaaatgacacgattcatgcaagaccatttgtacaaagattgaaaacatgtaaaacaatactatgtcgtttatggatatatatatatatatatgtttgtatgaaatagaagcataaaaacattcattggaatgataaacacccaattcaggatagtagtctccaaagagggagagaaggtaatggaattggggacacaaaggaagtattaactttatctgttaggttttattacttaaaaaatgaaaaatccaaagcaaaatatcaaagtatttttctcaaaatctccatatcattgttattaccattaaatagctatgtgctttttttttaaaaaaaggagttcatcttaagagaactggacagacacaaatataaagttaaaaatcacattttgacctaatttgtttcccagattcctttcaagtgctgttctctgggtcagagaacttttaattctctttcacccttttcatacatttggagaaaatctaagtgtcataatctttatgtgacagatgaaagaagctcttggtgttaattacaggaagatttagaggaaaattatgaccacctaatgaaaaacgaaaaaaaatttattcactgtttcagagatattgggaaatgttttcacatttcagaagcatgatggacctgatcatagcagagtaatgtccttttaaatgactaaatcaagaccttcctgtaacttcagctcccttacttctgcttacctaccatcagagttttcttaagtatatatcctcttttgatctattatctccttcgctcttatactatttcctacccactccaaaattataaaagcagaccctaaaacaaaccgtcctccaaacaggatcagtttctgtatagctctaacaggttatactaaatgattaacttccaggccaggcacagtggctcacgcctgtaatcccagcactttgggaggctgaggcaggcggatcacctgaggtcaggagtttgagaccagcctggccaacatggtgaaacctgatttaccaggcttggtggcaggcacctgtaatctcagctattcaggaagctagggcaggagaattgcttgaaccctgaaggcagaggttgcagtgagctgagattgtgctactgcactctagctgggcaacagagcaagactctgtcccaaaaaaaaaaaaaatagattaacttccaaatcctccaaaaagtatttgcattataagaatattctcaaaaacataagaactcctcagttcaagaaataccgaggaagtatttagactttctgtaatgagaaggttttacaggaagcaaagtagcctataacatgggtccaaagggtcacacaaccttcagagggttgtcaaattagcttactgcctcaaactagtatcttcctctgttccattgatactagaaatattctcctgattttagcacttaaagttctctgtcccttctgctcattcccaaagattgaatttgcatacaggacaattttttttttttttttgagacagggtcttctctgatacccaggccggggtgcaggggcacaatcatggcttactgcagttttgacctcctgggctgaagtgatcttcccactccggcctcccagagtgctaggattacaggtgtgagccactgtgcccagccagttgcttgtttaggagaacaaacaggttggccttggtccaagtaaattatattgtttctagtccagccttcatagataatatctgatgggtctctgtcatttgaaataggagatgctggcctcctccccaaggtacctgctaaattcctattgtctatgcctttgttggtcctatatcatcattatctgtaggcagaatatagacatctttctcagtgaaaaaaaaaaatcagacaaaccactactgtaattccccattatccacggttttgctttctgtgatttcatttactgtggtcaaccatgatctaaaaatactaaggtattttgagagagagagaccacattcacataacttttcatacactatattattataattgttctattttattattagttattgttaatcttttactgtgcctaatttataaattaaactttaccatagatatgtgtgtatatgaaaaaaatagtatatatagagggtttggtgctatctgcagtttcagatattcactggggatcttggaatgtatccccaggagataaagggggactactctatttataacattctaactatttttacttttaccttttcctaatcttggttcttaatcactagctgaactgtgtatattacaatcagatctttctgtctgcatgccctttatcttgggccattcttggttctatctgaccatctatgttttgttgaatactacacactggaaaactatttataataataaaaacatctactgagcatttgctttgttcactgttctaagaacttttacaaatatcatttgtctcatttcatatgcataataacttcaggtaccattattacccctgttttatatatgagaaaatagaggcacaggaggataatttatttaatctgtgaaaatgtttgatgatacttctgtgagaaacaaagatgaaattatgtcaaagagctttgtaatacgtaaaacaaagtacgagcattgtactgttatctgcttcataacaaggctcaatgaatatttgttgaatgaatgaatgagtaaatatcattactgagttgcactgtgtcttgtgagggtagagtcctcagaataatgtaaagtgtaaatatgccaagcactgtgtctatagctcagtagttacccccaccaacatatactagtttccttcttctccttcccttttcctctaatttccaatcgaaatgactgtctgattgaatatctttaaaggtcatgatgaattactctgtaatatttgaagtgttatgttcagaaaggtcaaactttatttttcggtatgaagtgtcacacagatttgtttttcctgggcaaactttttttttttttttttccccaaagaaaagatggcaagaaatttagagcagggtgccctcttgaggaaattttagcatcttccttctcaagaactgacatcaaatgaaatgacaagtccagataaatgatgtacactattaatgaagctcagaaaaatgaaacattaaaaagtaagaataaccaaataccaggtatttgagaattaagattcttaactgttatgatctaatatagcaactgtaaataagaatttttatcatttatttatttatttatttttaatttttttttttgagacagagtctcactgtgtcacccaggctggagtgcagtggtgcaatctcagcttactggagcctccgcttcctgggttcaaggattttcatgcctcaccctcccgagtagctggaaccacagcttgcaccaccatgcccggctgattttttttgtatttttagtagacacaaagtttcactatattggccagcctggtctcgaactcctgacctcaagtgatctgcccatctcggccacccaaagtgctagaattacaggcatgagccaccactcccaggcttgtaaataagaatttttaaatgaaaacaaaaacctctagaagatatttcatttcttcttatttactcatttcttcaagtaatatttattaggcacctattctgtgccaggaactatgctgagcacagggatcaataaaacatggtctctgctttcatggagcttacagtttgtgagggagctcacactgaagagaaacaaacaaatatatatgtaattgcaaactgagaaaagtactatgagagaaatgaataggtactagaataaagaataacaagtaagttctatttagggtcatcaagggaaacctctctgagaggaaatatccagcagagtccgttggcttttccacctattccaagtcttcccatctaatatagacagtctacagatcctctttcctagccatggtctttcttatcttctcttatctctgcccctgtggtggactgagtcaatcctatctctgcccctgtgggcaagcagttagttctcattcgtccttctgcacctcactgtcactctagtaaccttgccttacagcagggatgtccaatcttttggcttccctgggccacactggaagaagaagaattgtcttcggccatacataaaatagcactaacaataactgatgagcaaaaaaaacaaaacaaaaaaaaacacgcaaaaaaatctcataatgttttaagaaagtttaagaattttgttgggccacattcaaagccatcctgggccacgtgcaagccaggtgccgcggtgtggacaagcttgctgtagagctgcacattcttcacagtaggtggtctgcttgattaaaaaatgtattccttactaatattgatagtccctcataggagaacatcaatgcattatcatgctaaaagggcccacttctaacaaggttaaggatgacaaatggacaaataatcctgcctgccattatcctctgaatagggagagataaataggcacgaagtaggctgagaacctgatcaggcaatactgtttggtcacactgaccttgaaatatctgaggtaccaagcacatagaaacctccaactggaagtaaaaatgaggaaatagatctgagaaaagagcccagaagaacaatttttagagtcttattttgttcaaagctgccatgttacacagacttactatgtaatggttggcctggctcattaacactcttgctgtggcccttgtaactaagcttctttctctttttttttttgaaatggagtccggctctgtcacccaggttagagtgcagtggtgcgatctctgctcactgcaacctctgcctcccgggttcaagcaagtctctgcctcagcctcccgagtaactgggattacaggcgcctgccaccacgcctggctaatttttgtatttttagtagagacggggtttcaccatgttggccaggctggtctagaactcctgacctcgtgatccccccacctcagcctcccaaagtgctgggattacaggcatgagccaccgcacccggcctgcttctttcttgaggtgggttgattctaccagactggaggatttaactgacttggagagtactgcctgcaagtgggtgggcctaccatgacttctgagttggcatttaggtgaccgtttgagtctgggatccaaacttggtttttttgtttttttttttttgagacggagtctcactctgtcgcccagcctggagtgcagtggcacgatctcggctcactgcaagctccgcctcccaggttcacgccattctgctgcctcagcctcccgagtaaatgggactacaggcgcccaccaccacgcccggctaatttttcgtagagatggggtttcaccgtgctggccaggatggtctcaatctcctgacctcgtgatccacccgcctcggcctcccaaagtgctggggttgcagatgtgagccaccacgcccggccctgggatccaaactttgaataagctgcctctaccttagttgtacccataaatagctttctttaagaaaactaatcatccataccttattaaccagaggtcctgaacaaaacgtttaactactttgaatctcagtttcctcacctgtaaattgggatttaacatctctgcttatttcgcattattacactttgagtataaataataggtactatgttggtcaaaatgtgctgaaactaatacacctacacattgctgctgttagatagcaatttggaaaatacaccaaacactgtaaaatgtgcaaacgtctttgacccaacaatttggttcctgataatttattcttgtgaaaaaattaagaaaaaaaatgtgaaaaaagatgtacagtgaagcatttactacaaaaaaaatattagaaacattctagatatctaacaataatagactggttaaataaaacatgttgttttatttgcaataaaatattggccagccactatgtaaattatattcatgtagaaagttcttggaaggaaacatgaaaaaataaaacaattgatagtatagtggaattacaagcatttttccttattaatttctctggatgttattactctaggagaataattaacatacttaaaacattttaaaattaaaaaaaattttgaccccatagtacatttttttcttatcatctcttgttttttatttagggaaattatcgtttcatgaaactcttacttacacgcagagcaaactggatgcaaaaggatctggaagagatgactcctttgcacttgaccacccggcacaggagccctaagtgtttggcacttctgctgaagtttatggcaccaggagaagtggatacacaggataaaaacaa

SEQ ID NO: 15641 - DNA, 54504 bp, Homo sapiens; identical to SEQ ID NO: 1206

SEQ ID NO: 15642 - DNA, 30965 bp, Homo sapiens
agtgccacattagaacagcttgaagaccgttcatttttaagtgacaagagactcacctccaagaagcaattgtgttttcaggtagcaaatttttattattctgattgtttccaaataaactataatttttaagtataattttttactttatgagaaaattaatcatttatattctaatttcctgagtatgtagagagtatagataatgttcctttatgtagaaatatttaaatgtaagatgattttaaatcagaaagaatatttgattgatttaaaatttttaaatgggctttaatattttcagaggttttctttacttagggatttttggactgacattattgccattatttattaattttgtttttgcccaaatcaagaggtttcataattgtttactctctctctaccaattccctttccaacattactagccacagagttggccaatgaacaataaacacaacagtagtctggaggtctcaatttgtatcttgggaagcattataaattttccaactccctagacacaaatgtaccaaaaaaaaacccttgttttctataccagtaattgtgtgctttgtcttgcaattcagacatttacaagaaaatctaaatcaccttaaattaagatttatgttaaatgtggtctaaaaccagcagagttatgtattgttttcttttttagaatgattttattcaagcaagcaacttatttcatttccttgtttgctacagtttcctgtggtaagtgaattatctataaaacatggaattcaggctaagacaggagtagccaagcaagtggcaccacccctggagaaagctattgaacatacagcttcgggggtggagattgtccctgatgattcaggacacgtgtctatttaatgttccacaacaaggaccacttgtcaggtatattgctgtagacatatgttgcagaccagaggaaggagctcagaagtaggaatgtcttgggacttgtgttaacaaaaacttctgttcgcagatgacactctgcaaagcaaaacttgaaacaaaaaaaaattagtcctctatttttattatcaacagtaaaaaattaaactttatctgaaaattcaaaagagtgctaggcattttatagtgtctgggtccaatccaagtatctgttaggaacaccatacatagttttactctggaccgctagggaaccatttcaaaaatgaaagtaactggtttaaatttaacttagcaaaccatgcatttggatagttctaggtgaatagctttcaacaccagatttagatctcatttctctattaatttcattaatttttggagaataaaaatgattctggacatttcattaatcattacagagggagttttctctgtgtccccacaaggcatgattctgggtctatggtgacttaagagggccacacaacaatgagtatttaattttcctcagatgtatggctacaataaacatctataggtaaggtttacattcataaagagacctttttttttccaggaaaaaagacttttattccccctaaatcacaactcccctgtgtctgtccctcaaccctgatttctcttctaaaccgtaatttacaaacccatgtgcaaacccactgaaaggtgagaaggagcataagccagagacactgggaaccacagccaactacagggggtttttcatttttttgttttgttttgttttttggcaaaataaatcatgattatggctaggaaaatcagggatgtaagtaagcaaaaatttagaaactacatattgcatgtagtccccaaattcagaaacagtcatcgttaaacatcttttatttagtctttcagatatttttctacatatacctatttgcacatttcacaaaaaagagttattaactgtggacactctttgacttgcattttccacttatagctatcttttggtgcaaataagtaatatattttggagcttgctattcttctctttttatggtatttttgtgtgcacattcttatgctcttattcagttatttctgtagaatacaatttttgaaataaaaatactagattcaaaggtgtgaatatttttgaaggttttgtggtgtggtatcatgaaattaggtttcagaaagtttactccatagttgactttttctaccagctaataagagtgctcatttaccccacttaggccaactctaacaggcttctgttgctttgcatcctgacatatttatctttctggaaacagtgtcctaatttatttctgcagagctactgcctctcagttttggtccatgtggttctggtgaccctgattcttctgctgaaccagaaagtgcacacatcctcctggctgtggtgacccaatcagagccaacgtcttgcaatgaagcttttctttagacatctagaaataagactcttatgttttttttttccaatttgacttgaaacttaagacaatacacaggcctgagttgttggtactattttgctactacgtggagcttgagagtaatggtaacaccaagactggagcaagtggaaggagacatattgtccactgatgctatcagttgagcacaatgtgcagttactttttaagccagattcaccatgggctttttggctcctgaaccaatagatttcatttgttttcaagccactttgtactaggttttccatcatttgcaatcaaaaccagtatacaaacactggttatttaatttttcatttttgctaatctcagggataaaatggcttctagttgttttaacttggctatatttgtgattcttcccattttcatatacttactaatcacttctatttcttttgtaaattatcttttcatatttgttatctaattctttaaaatttgagtactttaattctcattattgtttgtggaattgttaaacaagactgaataatctgcccaaagtccatggacatgggggcccatgtaaaagctttgaaagccaccatcattatgagataaattatataatagtactttacataggctccaaaatacagcacagacacagctatcattgtcatggtcatcattatcatcatgatcaccaacttatgaggataagcaagaacacctactagaagtttctttccattcagcaacaaaattggtgtctttctagtcactcccttccctgactgtcacatagcagttcacagaggctcagttgcagaatgagaagctctgggccaggacctgccattgtatgcatccttgcatgggaactgggggctggaagaggagtgactgcttgataattatgagtcagtcaaaaccaccaactgtctgaaaaaaataggcctttttgtaactagtattgtcactaaaccaactcctccatgttttgtgcatacatgaaatctaggcaatacacttgtattcccaaaagcttccacttgaagagatctgtgctctttccaaatataaaccttacccgagaggtggtcatcttggccacacctcagagagggagagaggcagtcttgttgggttgggtggtcataatggggctcagggccaaatccccagggggtaggatagtgcagagaagatggcactctccagtgcttaataaaatgcacgtggtctaagctgcccactccctcaaaggcaataaaaaataggtactatttaaattgaagagtaactactgccccagggaatggacaggttgtcattggaatagccatggttaatggtcccagttgacaactgaaatgaatgtgctacctgaacaggaaagcttattaaccagatttcaaagacagtctttcccggtaaatccaaatttacaaattaaagccagtaaagacaccgaattctctaataatatgtggggtgcagtatattttagagctgggaataattccaaacagcaaatagttcaaaatttattttcaatttagcatatgcatgcatttgcttaaactgtcttaaaaatgagtaaaaaatactgtcagtttgtttcaatcatactgagatgaggaacaatgtttagcattgcatgctagaaaaggacacaggattgggagtcagggctgggtgaccgtcacaggactttcactaactgtgtggatcttgggcaagtctgtgtgccctgagactcagttatttaactttcttttaaaaaacatagtccagatgcagataacaaagcctgcctctaatttcccttacagaattgtgagaagctggtggagatgtttgttacaaaagtgttttgaaaatagagcaaatattattctttttaaggcatgatgttttcatagcatgtcaggcaacaggaaaaaactaagttaggattttattttattgtggggaatttatgtgcaaattattgtgcaatttaatgaaaataagccaatgttttatacagaagtacccagaaaattaaataacactatacattgttcaaatagttgccttaatatattttattttctcagcataattagagttgtattatacaggtctttgagtagtcagtcagtgggagaagttaagacaacagatatctttttattaaaattattatatgaattatcgcaaattaatttttatggttctgtcacaggatgtctgactcaactctatgaaaacgccttcttcagaggtggggatgtagcttccatgtacaccccaaatgcccaatactgccagatgaggtgcacattccacccaaggtgtttgctattcagttttcttccagcaagttcaatcaatgacatggagaaaaggtaaaagttggtatttcattattggagaagctgtttttcaaaactgaatcagttttgtgcagaaaggtgtagtataactgagagttcttcctcacacggggttcaaggaccagcttcagcaaaatcccgtcaagtggttcttacaaatgcagattcctaggccacaacccagatctgctgaaccaaagtttcttgtgaccaggaatctgcattttaaacaatcactgtgtttctttaaagtagtagaagctagtcattttctattcaaagcctcaaaatgcttgaatatcattgggctaagggattgtctcaagaaagagtctaacaggtgcacatttcatctgaataaagaaacagatttaactgtgtgacccatgatcacattagcggatagcacagtccaaagaaaataacataagacaagcattttgctgagaatgtaattgagaaagatctagaacttgtgattttgggacagggcagttctaaatggggcctatagtgagccagtttgggcacctgtggcatgatgctatgtatggtgtgtgtgtgtatgtgtgcttgtgcttgtgtgaatatgtattattaactggaaatttgtaaaagtattggaaaaatagtacttacgattttgtgtgtgtgtgtgatggagtctcgctttgtagcccaggctggagtgcagtggcgtgatctcggctcactgcaacttccacctcccaggttcaagcgattctcctgcctcagcctcccaagtagctgggattacaggcacgcaccaccacgtccagctaatttttgtagttttagtagagacggggtttcaccacattggccaggctggccttgaactcctgacctcgtgatccacctgcctctacctcctaatgtgctgggattacaggcatgagccaccgcacccagcggtaattacaatttttattaggtcagagagatgcttattaatcacgagccacagtttcatcttaatgatttttccttttgattaatatccagagtaagcttttctttgttgttcccatttccatgttcataactctttactcatcttcactctatgtgagtttaccaactagaaattggatagtcattctctgatcccacatgttaaacttgtagagaaaactcagattgtatgtgaggatcatcatattaaaagtggaggaaggttctagaattcttataaataatgaaattaacatgaaggtggacatctaagacagagggaagtcttccattaagtgcagactacaaggagttaataagcaagatgaacacgatatacaaatccagctcttatcactaagttaactttttaagtaaatgaaagtatttgcaaaaataattaccaattgagaacatagttgcctgaaagtttaagaacacaggaaaaatcattaactctttaatatggttgatttcctgtacttaaaaaatgtgagtgtaaagaaaacgcagtgatggagttagatattatggggtgttataaaattagctctaagagtgttctttccagcaagtattggggaagctatattattttccttattcctggttttatttgttagtgtgtagaaaatgctagacatttcctcaatgtatgtttattattctacttcctaagtaaagctacttttaaaataggtttggttgcttcttgaaagatagtgttacaggaaccctgccaaaagtacatcgaacaggtgcagtttctggacattccttgaagcaatgtggtcatcaaataagtggtaagttgtgaatttcttagctacatttgagttaatattggatctcgcttagaacagcttttgctcaaagtttgtactgctacagctttttggaaggcatcactcataaagataggagatggggcagtattctggacacaaaagagggacccatattcatctggacacttctattgtctttataaatcaacacatacttaatgagcctctattatttatgaggttagcgctcaagtgtaagatttgcagaaaatgaatccaaataattgtgtctcgtttccagataagaatttttaagaaaacacaagggaacatctctctcaagttcacttgagggtaatttttacatcagtgattctcaaccagcagtgattttgtctcttccactggggacatttgacaatgtctggagacatttttggtggctacaactagggaggatgctattagcatttactaagtagaggccagaatgtttgaatgctgaccaacattctacaaggcacagggcagtcgtccacagcaaataattttctggcccaaaacgtcaacagtgctgacatcaagaaactctgtgatataccactaggcccaaattgaagaactgagttctgcaaatcttgctaagaataatacttcctaaaggaaacttgaggactaggatgctagagaactttgattctgacatctgaagctactgatgtcttgggaaacagtttccaatgctatcctaataaatttaagacaaatgaactatttctcaaacatgactgggactgataagaaagtgaaaagtgctgaaaagattcaactgatgggttgtcagaatcttaaaataactgctgttattctatgtatgactatatatcattactattttattttcattatgcacaattaattttgtaggttcaaatttcagatgtttttaaatttgtcatcctttcctccctcattgatatcacctcttcaatacgtacacactttgagcctgctgtttgcattttaaccagttatcaaaggatggcaatgccttcattataaatgtgggcctgacttagccagtataataggtgtagtctacgtgaggtggagtacatttcctattttaaaagatcaatttttatgttaatccaatttggtataaattattcgagtaagtgctatttctgattgttgtatcttgtagcaaaatttaaagaaaaagtaatttgtgcctttctcaatattcctgttattgttcatgtattctaaaactcactgttactcacttagcttgcttttaatgttttttaaagtgaaaaattgttcccaagtacataaaatctctacactcaagaacaattctagtcaaaagcatttagagcttccgtatgaacacttaaagagtttttatttgtaagagtcgcatcccaactcttagcctgttcttttctcacatgcagaaaaataggaaagagacttcgtttccacagtctgcaaattcctgtgtttaagaaccacagtgaataatccacctccctgcccaactcatcgtactgtcatatagttttcctgacagtttgtgtattttctgtctttcccacccttaaatttagttttatgacttcaaccatacttcttaggagtggaaaggtatctgtagtagattatggtttattccacataatcttggggaataaaactttaaaaaagtatacagtttatacttctggttacattacttccttaaccaaaagtctaaccaagaaatttgaatctttaaaaaaaaaagaggccgggcgcggtggctcacgcctgtaatcccagcactttgggaggccgagacgggcggatcacgaggtcaggagatcgagaccatcctggctgacacggtgaaaccccgtctctactaaaaatacaaaaattagccgggcgtggtggcgcgcgcctgtagtcccagctactcgggaggctgaggcaggagaatggcgtgaacccgggaggcggagcttgcagtgagtcgagatcgcgccactgcgctccagcctgggcgacagagcgagactccgtctcaaaaaaaaaaaaaaaaaaaagagcctaattttgcttcactgtctgtgaaaagaattatctgtatcttttgcatgtaagacaaatctcaatgaaaagggtgcttaaatagaagttaacactattttaaagcaagaatggaagtggtttcatcatgcgtaaacaacaactctccacattttgtaatgattgatctggatgcaatttgtcatcagacaggagaagtcgaaagcaaagaaataacactgggagatagagaagctctttcattcaatgcgaaaggtcaaaggcacatcagtttctttaataatgcaaacctcagcacacattatcagtgtcctcattattattgccttgtttatttcccactgctcattgataatttcaacgtgaaatttacctgtattgctgcatgcatcttgcagtttaagaagtgaagtaacccaatttcaaagctagtgctttagggaaaatattggattgtatttacttcaagcagagttcgataatttatgtacataataaaaattttaaatcccttagttaatatagcagttgccaaaactgggctattatcattctaaactaccaacccaaatggtagtgggtatctaatctacctctagaaagaaaatggactgtatttgctctatgtatttttcttgtacagcttgccatcgagacatttataaaggagttgatatgagaggagtcaattttaatgtgtctaaggttagcagtgttgaagaatgccaaaaaaggtgcaccagtaacattcgctgccagtttttttcatatgccacgcaaacatttcacaaggcagagtaccggtgagtacaattcaaggtgtgtgttctttgtattggtgcctccaggatttcactgtattcttcttaacctcttttgttcccaaactaaaaaccaaacagggcttttattctaaccactttcctcatttacttactctattttatttttttatcttttatttatttatttatttattgagatggagtcgcgctctgtcgcccaggctagagtgcagtggcgtaatctcgactcactacaacctccgcttcccgggttcaagcgattctcctgcctcagcctcccgagtagctgggattacaggcgtccgccaccatgcctggctaatttttgtatttttagtagagtcggggttttactatgttggtcaggctggtctcgaactcctgatcttgtgatccacccacctcagcctcccaaagcgctgggattacaggcatgagccactgcgcctcgcccttcattttttaattaaataattcatttaatttcatttgtttctctactcttttcccctggcatgtaattgtaccgcatcttcaaagcctgacatcctcttcccctacttctccaaagctgattcttgcaggtctttcctcaaataccgtcccctccaaaagcccatttctgagcattctcttttaagtcacactcagctctgtttatttcattcatagagctaatcacaatttgatattaacttgtgatttttttccttatttttaaatcttatttttatttgcatagatgtatggggtacaagtgtaattttgttactttgatgtattttacagtggtaaagtctgggcttttggtatatccatcactggagtcatgtacattgtacccactaagctatttttcaacgcccgcccccttcccacctctctgtcaccttcccagtctctactgtctatcgctccatgctctactcaattttggtgtcattttttcctgaagcaaaattttggtgtcattttttctgaagtcattttctgaagtctgtgtcatttttcgctttcctgaagcgaattttggtgtcatttttcctgaagttccgtttgccccacacataggccttgcttatagaatgagggtttagtgtcacggagtctcctgcctcattctcaccctaacttttcctttacccctttgcgaggggaaggatgtccattaggttaataatgcagacccctaacccactcattatcagggtcattgtttttccactgtgcattttaatactaactgttacctgcactgctccctgcccctcaaagtgcagaaagcaaagtaacctcttttcttcccattcaggaacaattgcctattaaagtacagtcccggaggaacacctaccgctataaaggtgctgagtaacgtggaatctggattctcactgaagccctgtgccctttcagaaattggtaattgtaggactacttcactttgtgattgtggtaggtggaataggagcccccagagacgtccctgtgctgagccctgggacctgtgcgtgtgttcccatagctggcaaaagcgtttctgtcaatggcatgcagttacgggcttcgagatggggagtttactctggattttctgaatgggcccaatgtactcacagggttgagtgctcacaaggctcataagaaaaagagagaggcggaaggctcagagccagagagagaggtttgaaggtattacactgctggctttgaagatgaaggtccgtgagccaaggaatgcaggcggcctctagaagttgaaaagggcgaggaaagagtttccctgtggagcgtcctggaggaagaagccctgctgatgtcttgattttagcccagtaagacccaatctctagaacagtaagataattaatttgtgttgtttttaaccactaagtttgtggttatgcccctagagcagcagttataggaaactagtacagtgatactgttagagttataggacagtgatataggacagtgatactgttatagttataggaaactagtacagtgatactgttagagttataggacagtgatataggacagtgatattgttatagttataggaaactagtacagtgatactgttagagttataggtacagtgatattgttatagttataggaaactagtacagtgatactgttacaggtacagtgatataggacagtgatactgttataggaaactagtacagtgatactgttagagttataggtacagtgacataggacagtgatactgttatagttataggaaactagtacagtgatactgttagagttataggtagagtgatataggacagtgatactgttatagttatagaaaactagtacagtgatactgttatagttataggacagtgatataggacagtgatattgttatagttataggaaactagtacagtgatactgttagagttataggtacagtgatataggacagtgatattgttatagttataggaaactagtacagtgatactgttagagttataggtacagtgatattgttatagttataggaaactagtacagtgatactgttataggtacagtgatataggacagtgatactgttataggaaactagtacagtgatactgttagagttataggtacagtgacataggacagtgatactgttatagttataggaaactagtacagtgatactgttagagttataggtacagtgatataggacagtgatactgttatagttataggaaactagtacagtgatactgttatagttataggacagtgatattgttatagttataggaaactagtacagtgatactgttagagttataggtacagtgatataggacagtgatattgttatagttataggaaactagtacagtgatactgttatagttataggacagtgatataggacagtgatattgttatagttataggaaactagtacggtgatactgttatagttataggtacagtgatattgttatagttataggaaactagtacagtgatactgttagagttataggtacagtgatataggacagtgatattgttatagttataggaaactagtacagtgatactgttatagttgtaggacagtgatattgttatagttataggaaactagtacagtgatactgttagagttataggtacagtgatataggacagtgatactgttatagttataggacagtgatattcttatagttaccgtggtatagttatagttaaaggtacagtgatattgttatagttataggacagtgatattgttatagttataggacagtgatgtagttacagtgatataggtacagtgatattgttatagttataggacagtgatatagttataggacagtgatattgttacagttataggtacagtgacgttgtaatagttataggacagtgatattgttatagttataggtacagtgatgttgtagcaaaactgtaaggtcattccttggttgtgtccctatctagtgaaatgactctaccaggggtagggaaataaaactctgtcgtttcacacataaaggtaatttcaatggaattatccagaaaattgccatgacattccacctcatttagcatgtcaggatgttaatgacaagatgttactaaaagcaaatcccttacggccagttttccgcagtactgggtgctggctctgtgcctggccctgtattgggtgctgggctaggatttccctgtggaagattgggaaggttggttacaaggtggctattttcctgtctcctctttgcgacagcacaccttctccatggtgtgtgccaggttcacgtgtactggtgatttaattttaacgttcatattatttttttctgggagagtttttgaaggctgccaggaggcaggactcgatgcaaacatgctccattctgtacccagccctgttgctggaaggatttgctgcacttacccagggaacaggcaagctcgtgctgtggctctgggctgtcacagctgctgtccacacctgggagagcaccctggatggctcatctgtgtacttgctttcttgttaaattgcagtgagttcacatgtgatttaatcggatcaaatggcctttacagactgataaaaatatggctgtttcaggtggtgttttgagctgctaagggcgtggcttttcactgagtacgtggtccccgttcctcagggaacacccagtagccacatgcctcctaaacctagagtagggctgtctcctggcctaactgcccaaatgagattcataagttagggatgatctgtagttatcactacagatttgtccttggtttcaccaaggattttcctaattttacaaacaaaacccctaaggctcctggaaggagggtagaagtgaaggtgctccgggggcaacacagctgatgagctgaaccagaactcgacccttgggtcacacacatttcacagtgctcactccaccttttgtttttttaatggatttaatggtgttttaaagcctcctgcctctcaacacatatgaattcattatatttacagatttccttctcttgtggtccatcttcctgcatagatcttgagagatgtcaggctaaccacgtttcctcagttaatttaacaaaaccatttgcaactctgacatggaaaattcctaccatgtgacttattaatttatcaattgagatggtacacatattttcaagccaaaaggaggaaaacataaattggaaaaaaaaggtttttttatttttatcacctctggggaagaaagtctgataaacgaagctggttgataaaattgcaattaggggaagcaacatcatggtttctgttcggaggctaaccagatggcatacttgaaatagagaatgtcctagaaatcaactggttgcttggccaaaatatctataaatagtgcccaacatattagataggaaaagcaaagtaaaaacaattttaacaggttaggacattgggctgaagtattgcatatatttaatgtcatgtgcgtccgtgtgaagagaccactaaacaggctttgtgtgagcaagaaagctttttaatcacctgggtgcaggcaggctgagtccgaaaagagagtcagtgaagggagatggggtggggacgttttataggatttgggtaggtagtggaaaattacagtcaaagggggttgttctctggcgggcagcggtggggggtcacaaggtgctcagtgggggagcttctgagccaggagaaggaatttcacaaggtaacgtcatcagttaaggcaggaaccggccattttcacttcttttgtctttcttcagttacttcaggtcatctagatgtatacgtgcaggcctgggcccagaggcctgacattcctgtcttcttatattaataagaaaaagaaaacgaaatagtggtaaagtgttggggtggcgaaagtttttgggggtggtatggagagataatgggcgatgtttctcagggctgcttcgagcgggattaggggcggcgtgggaacctacagtgggagagatgaagctgaaggaatattttatggtaaggggtgatattgtggggttgttagaagcagcatttgtcatatagaatgattggtgatggcctggatatggttttgtgtgaaatgagaaactaaatggaagacacaaggtctgaataagagaaggagaaaaacaggtgttaaaggactaagaattgggaggacccaggacatctaattagagagtgcctaagggggttcagtgtaattacttgcttggttggtgagtttttgggctctatccttgacagagtcctcctttttaagttggaggctgagcttggtgaggtgtgtttttaaaagaccattagtctgttctacctttcctgaagattgaggatggtgaggggtatgaaggttttactgaataccaagagcctgagaaactgcttgggtgatttgactaataaaggccggtctgttatcggattgtatagagatggaaaggccaaactgaggaattatgtctgacagaagggaagaaatgaccacggtggccttctcagaccctgtgggaaaggcctctacccatccagtgaaagtgtctacccagaccaagaggtattttagtttcctgactccgggtatgtgagtaaagtcaatctgccagtcctgggcgggggcaaatccccgagcttgatgtgtagggaagggagggggcctgagcaatccctgaggaggagtggagtagcagatggaacactgagcagttattttttgaggatagatttttacgacggaaaggaaaagtgaggttttaagaggtgggttagtggcttgtaacttacatggaagagtttatgaaatgatgacagaatagaatgggcctgtgaggctggaggagatattttccttggtccaagaattatttgccttgtgtgggaagagattgataggtggaagtttcaatgggggagtagatgggagtgacagatgaggaagaaaaaaactggctgtgagggatagaagttggaatgctcgctgcttttttagctaccttatcagcataggcattgtcctgagcagtgggatctgatgccttttggtggcccttgcagtgaatggcttcagcttcctttggaagtaaagtggccttgagaggagtttttattaaagaggcattaagatggagaacccttgtgtagtgaggaaacctccttcagcccatataaccgcatggtggtgcagaatatggaaggcatatttagagtcagtataaatattgacacgtagtccctttgcaagagtgagggcctgagttaaggcaatgagttcagcttgctgagaggtagtggagcggggcagagcagtagcctcagtgatagatgtggaagatactacagcatagcctgcctttgctggtgagtggtgattaggcctggtggaactgccatcaataaaccaagtgtgatcagggtaaggaacaggaaagaaggaaatatggggaaatggagtggatgtcaggtggatcagagagatacagtcatgggggtgggggccagcctaaaacagtaaggtcaagttgtttgaacagaaaggctacagggcgtggtcctggctcttgtgtaagaattttgactgcgcagccctgcacttcggctgtgtgtaatgaaaagggttgggatgagttagggagagctagtgtgggagcagtttctagggctgtttttaaggaatggcaagaggagtggctaaaggatttaggatctttggggtcagctagctttgcttttgtgagtttatataatggtttagtcaggatggtaaaacttagtatccaaaggcggaagtacttaaccatacctaggaagaaaaggagttgttttgtagaaggggttggggtttgggagatgagccagacacaatcagcagggagagcacatgtgttttcatgaagaattatgccgagataggtaatggatgaggaagaaatttgggcttgactgaagtaatgggggctgtcctcgaagccttgtggcagtacagcccaagtaagttgctgaggctgacgggtgtcagggtcagtccaagtgaaagcgaagagaggctgggatgaagggtgcaaaggaatagtaaagaaagcatgtttgagatccagaacagaataatgggttgtggagggaggtattgaggataggagagtatatggctttggtaccatggggtgaataggcaagacaatttggttaatgaggcacagatcctgaactaacctgtaaggcttgtccggtttttggacaggtaaaatgggggaattgtaaggagagtttataggcttcaaaaggccacgctgtaacaggtgagtgataacaggctttaatccttttaaagcatgctgtgggatgggatattggcattgagcggggtaagtgtgattaggttttaatgggatggtaaggggtgcacgataggttgccaaggagggagcagaggtgtcctatacttgtggattaaggtggggacacacaaggggaggatgtgaaggaggctttgaactggggaaagggtggcattgaggtgtggctgtggcctaagaacagtcagggaagcggataattgagttaaaatgcctcgacctagtaagggagctgggcaggtggtgataactaaaaaggagtgcataaaagaatgttgtccaagttggcaccagagttggggagttttaagaggtttagaagcctggcggtcaatacctacaacagttatggaggcaagggaaacaggcccttgaaaagaacgtaatgtggagtgggtagcctctgtattaattaagaaggggatggatttaccctccactgtaagagttacctaaagcatctgtgatggtccaggaggcttctaaggtgatcgggcagcgtcagtcttcagccgctaagccaagaagatctgggaagcagtcagtcagagagccttgggccagagttccaggggctctgggagtggcagccaggccagttagacagtccgatttctagtggggtcccacacagatgagacacagcttaggaggaatcccaggctgcgggcattccttggcccattggccagatttctggcacttgaaacaagatcctgatggaggaggtcctgtaggaatgcttgaccactgcagtttaggcattttgaagtttttgtgtgtgctggagatgtggctgggttttgtctcacagcagaggcaaggaatcgcaactcagaaatacattgctacttggctgcctctattattgtacatcttgaaggcgaggttaattaagtcctcttgtggggtttgagggctggaatctaatttttggagtttttttttgtttgttttttggttttttttttttaatgtcaggagctgactgggtgataaaatgcatattgagaataagaggccttctgacccttctgggtctagggctgtaaagcgtctcagggttgctgccaaacgggccatgaactgggctgggtttttcatatttgatgaaaaagagcctaaacgctaactgatttgggagaggtcggataaataaaaaggaacattaatcttgactatgcctttagctccaaccacctctttaagaggaaattgttgggcaggtgggggagggctagtcgtggaatgaaactgtaagctggaccgggtgtgaggaggggaggtgatagaaggattatagggtggaggagcagaggctgaggaagaattgggatctggcttggcctggcaaggagcagcctggggaggaggggagaggtcagatgggtccatagaaaaggaggattggaaagactcagcaacacttggggttgggattgagaggacagatgggttgggattgaggggacagatgggagggaaagaaggaagatttgggacaagttgcattgggaacagagactagggagggaccaatgtgtaaaagaatgcctggacgtcaggcacctcagaccgtttgcccattttatgacaagaattatctagatcttgtaggatggaaaaatcgaaagtgccgttttctggctatttggaaccattgtcgagtttgtattggggttaagcagcattgcagaagaaaataaggcatttaggttttaggtcaggtgtgagttgaagaggttttaagttcttgagaacataggctaagggagaagaaggaggaatggagggtggaaagttgcctatagtgaaggaggcaagcccagagaaaagagagggtagagacatggagagaaggggtgggggggtgcttgcccccaggaaagtggttcttgccactaagggtgaaggatcaaggcaggcattcgcgcggtgatcagatacctctgaaacgtgggtgaataatcaagcaggtgtccctgcagtgattaaacagcaaggaaagactatcttcccaagtccatgaccagtgccagagttttgggttcatggataaaacgcgtctcctctgtctctaccagaaaatgaaaggaattgaaattaagagaagggagagattgaaggatggcgccaagattgaaaggaaaaagaggttgagggatagggagagaggttggataagagagtaaaaagaggctgcttacccaatttaaaatcggtgagatgttccttgggcttgttggtctgaggaccagaggtcatgggtggatctttctcatggagcaaagagcagggggacaggggattgatttcccaagggaggtcccctgatctgagtcacagcaccaaatatcacgtgtgtccatgcgaagagaccaccaaacaggctttgtgtgagcaagaaagctttttaatcacctgggtgcaggcgggctgagtccaaaaagagagtcagtgaagggagataggggtggggacgttttataggatttgggtaggtagtggaaaattacagtcaaagggggttgttctctggcgggcaggggtggggggtcacaaggtgctcagtgggggagcttctgagccaggagaaggaatttcacaaggtaacgtcatcagttaaggcaggaaccggccattttcacttcttttgtcattcttcagttacttcaggccatctggatgtatgcatgtaggcttgggcccagaggcctgacatttaacatggataaatgtaaagttcttagaatcatacatacactttggaaaagatggggcttaatcgcactttataagacttgaaggatgtttgagaatcactatgaaactgctgaaaataccaagaaaatttaattcttatgtatataaataatgtgtctgttttacatgaatcccttctacaagcttggtatttaatatggcatatattgttttttcatagtagatttaaaatttttgatatctaatttagataacataaaattaaccctttgaaagtgtacaactccgtggtttttagtatatccacctgattgcacaacgatcaccactgtctagttccagaacatttttatcaccacaaaagaaaggctgtatccaggccgggcacggtggctcacgcctgtaatcccagcactttgggaggccgaggcgggcggatcacggggtcaggagattgaaaccatcctgggtaacacggtgaagccctatctgtactaaagatacaaaaaaattagctgggcatgatggcagatgcctgtagtcccagctactcaggaggctgaggcaggagaatggcctgaacccaggaagcggagcttgcagtgagccaagattgcgccactgcactccagcctgggcgacagagcaagactccatctcacaaaaaaataataaaaataaaataaaaaaaaaaaagaaaggctgtctttctcctttcccattggccgtctttctccattccctactcctccaatcccctggcaaccactaaatctactttccatgtctgtggacttgactcttcgggacattttacataaatggaatcatgcaatgcagcacattttgcatctggcttttttcacctggcgtgttttcaaggctcattcgtattctagcatatatcaatactttgttcctatttaggactaaataagattctattgtatgaataaaacatattttgtttatatacttagtttgatgaacatttgagttgtttctggatttttttttttttttttttgcctcttatgaataatgctgctatggacaacagtttttgggtaggcatgcattttaaattctcttatgtatatacttaggattaaaattgctggatcacagagtaactccatgtttaactttttgatgaattgccaaactgtttttgagagcagctacacaatgttacattcttaccagcaacaattgagggcttcagtctctctacaaccttaacaacacttgttattgtctttgtaattattgcctttctaggcagtgtgaagtggtgtctcactgtggttttgatatgcatttccctaatgactaacaatgttgtgtatcttttcgtgtgctcattttcaatttgaatacattctttgggaaaatctctgtttaaatcttttggccattaaaaataattgggttattttcattgttgagttgtatgaactctttatatactctggatactacactcttatgacatatattattttcaaaaattttctgtgcatctgcaggtcatcttttcactttactgatggtgttctttgaagcaccaaagtttttaaacttgatgaaatccagtctggctttattcttgcacgtgctttacctaaaacgccaaaacctaattcatggttttgaagatttttgcttatgatttgttcttagaggtttatagttttagctcttacatttaggcatttgatgcattttaaattaaattttgtatatggtgtaaagtagcaatccaacttaattcttgcatgtgggtattcagttattccattgtcttgaaacccttttcaaaatcaattgtctataaatgtaagagtttatttttggaccatcagttctatcctgttgacctatatatgcctatcctaatgccagttacacacagtcttgattaccataactttgcagtaagttttgaactcagacagtctgagtgcttttattttgtcctttttcaagattaatttggttattccggatcttttgcatttccatatgaattttaggatggttgtcaatttctgcaatagaaaagcagcaggattttgatagagagtgcattgaatctgtagaccaatgagtatcaatggaattatgtgttatcaaatttagtaaactacataaacgatatgtacacaactaaaacaaaactaagatataagatcatattaatgtaatgataataaaagtggattgtctcctgttctaattttaataggcacaaggcatttttgttaatcacttcttattaaagaattttttataatattcaggaaaatacaacaaaaaaacccttacattcctaaggcctcagagtcagagtaatataaaggaaatgtaaacacatgctgagtaatgcaagcatttggcaatggtggtgactggagctgggagcacagcttttatttctctgaaataggaatttgccccttagagttagaccaattttgccttcctctaaatggcaaacagtttggagatactttaaaggacattttttcacttaggatgtttagtactatgaataataaatagtcacaatttccttaactatggtgacaaaatacaagcaaatttagcctcatgtcatttcctaaggaacatcttctctctgtgagttcacaggttgccacatgaacatcttccagcatcttgcgttctcagatgtggatgttgccagggttctcactccagatgcttttgtgtgtcggaccatctgcacctatcaccccaactgcctcttctttacattctatacaaatgtatggaaaatcgagtcacaaaggcgagtatgcatggaaaatcgcatcacaaaggcgagtatgcatggggagcacttgctgctgtactttcatcacttttatagtctgagttcttaaaagtttcgttcatttccctcaaaacacttgaacctgcagtttcagtaggtactgttctgccaggtgcagattagttaagagattagcagacttctctgcctatcttctcttactttaaaacaaatgttaccattgaatcaaggaagcaatagccatgagaaaaaagaaggatctgacgcctttgaatgaagattcaaaacatgatcttcatgttttgtattagcttggagtaaaatccacttgctggcaatatagcccttaagcttgttgcctcttctctttgtttcagaaactagagccctgtttattctgatcaaggctctggcccactgtctttatctcagataacccaccctcttctgcacacagcatggagctaagagaagggtgtctagttatgtaatatcatcggcagcataaattcccagaatttgttctttgatttttttgtttgtttttccagttagaaggtggaacttcatcattgtcctcttttcaggttgtctgtgcctattagttttctccagagggagaggtggcttgatttacatttaatctctgcaatttattagagtcctgtagttggatttactttgaagagagtttcccagaagaataaaatttgctgcgttgctttttgggtgtgagctgcttttgtatttgcctaatgcctttaatgcaaatttctttctttctctcttgcttttttttaaaaaaaatagaaatgtttgtcttcttaaaacatctgaaagtggcacaccaagttcctctactcctcaagaaaacaccatatctggatatagccttttaacctgcaaaagaactttacctggtaatgtgatttgataataatattacataaaatgtaacctatttcatgacttttaacagcaacagtgatgaaacaatcctcaaggtaacagaaacttgtgtaaatgtcgttcattgcttttcccatctgatatctttttgtgtttataattgacacagaaccctgccattctaaaatttacccgggagttgactttggaggagaagaattgaatgtgacttttgttaaaggagtgaatgtttgccaagagacttgcacaaagatgattcgctgtcagtttttcacttattctttactcccagaagactgtaaggaagagaagtaaaggaaattttatttttcaaagacagttgacatgaccatttcatattctctttccccctgtgaaggcttactctttctactgttcatttcatctaggtgtaagtgtttcttaagattatctatggatggttctccaactaggattgcgtatgggacacaagggagctctggttactctttgagattgtgtaacactggggacaactctggtgagtaacctcactttttcgtggacctgtcagggatgtctgtcatgttgatagtttgcttagtcttaaggaattatgtgtcttgttctccttggttagaagggactttgattcacttctaattccaaccattagcgtcaacgctctcttttcagtctgcacaacaaaaacaagcacacgcattgttggaggaacaaactcttcttggggagagtggccctggcaggtgagcctgcaggtgaagctgacagctcagaggcacctgtgtggagggtcactcataggacaccagtgggtcctcactgctgcccactgctttgatgggtaagtgttggatgcatctcatccagagtcttatcttggcttttcattttgaaggatctatgatcagctgcttcaccgccatgtgactttatgaatagagacgtgttaaagcggggatggtattcacaacatttaacttatagggtccaagcactgaccaacctgaccattagaacagagtgtggtctctgtacagggcagatggcgctgagtgggtattctccacagaaagagaaacgaagacagtaccccactcctccaacccaccacccaccaccaatcccaccaccaattccaccaccaatcctgccacccaccaccaatctcaccaccaatcccaccaccaatcctaccacccaccatcaatctcagcaccaatcccaccaccaatcccaccaccaatcccaccacctaccccaccaccaatcccgccacccacgaccaatcccaccaccgatcccgccaccaatcccaccaccaatcccaccacctaccccaccaccaatcccgccacccacgaccaatcccaccaccgatcccgccaccaaccaccaatcccaccaccaatcccaccaccaatccctgatgtgttcttcaaagacttatttgtcaggcccatagaaatgttacttcttgctctttgattcataaatatactaagtcataataatttttaaaagtgagagtttcgtactctgtatatttcaatgtatataatttgatctatttcaatttattggtcaaatagtagacatgttaggtaagtcttaaaatactgaggctttggagttagacagaacatggcttaagtgacagctttgctgcttattagaggtgtggccctagaagatttgtaaatccctctgagctttatttgatctaaaatatgaatagtaatagtcccgaatttgtaacgttgttgggaagattaagtgacacatttaaaatgcttagtactgtgtgtagaacataaacacttcaaaaaatgtaaactgtgatttctatattcaataagaaatgtagaaatggacaaagcatataaaaagcaaaagaaatactagaagacacttgatttttctcaaaaataaacacaccaagtatttttgttttagtgaaattcatgcttacatgctgtatactaggattgaacatactgccaccaaaatatagcagtcggtggtacatgtgggtggagcaagacccctccaccttgtcatcgtgtgaaggggctctgccatacatgaccttgcatgtgactttaaggtggttggcctggaagaaaagtcccaagatgggaaatagtaggtgtcttttttactaaatgcactccaatttgggaccaaaaattttcattcttgaaggctcagtattgtgagtttataagagataatagacataaaagtgtaatgatttcattgcaaataaaaaaaggcccctttgcacctgatatctccatcatttttctagaattttgtgcacacatgccttgcactacttggtgatgataaagatttccagatctttgcacagaataaggctttgctttagatcagaattttggatgtacttagtatacattcatcttttaaataatctatttacattttcatactttccaaaatacagatatattttattttatttatatatttatttaatttattttttgagatggagtctctctctgttgcccagagtagagtgcagtggcacaatcttggttcactgcagcctctgcctcccgggttcaagcgattctcctgcctcagcctcctgagtagctgggattacaggcgcgcgccacacctggctaatttttgtatttttagtagagacgaggtttcatcatgttggtcaggctggtctcgaactcctggcctcaagggatccacccacctcggcctcccgaagtgctgggattacaggtgtgggccactgtgcccagctgtatagagatattttaaacaacactaaagtcctcctactttgactaattagaagagcattagaagatcagcctgacttcttgacagttctgaatttagtggagcaatgaggttcagctttggtgaatgagcttaatttttccatgataaactgctagtttcttcccactacagtgtctctcaaaaatgggacagcaacattctttttgttttcacttgcagtaagcatgatgcaattacataaatgtacacttttcaatttgttaaatagaatcttcagagattcactactgccgctattggtgatgaaaaattaccagaaggaggaattaggtaggagaaaatgtgtcctatgtatttccttcccagttctttgaaagagagtgataggaaaaaggaacactattgaaggaaggactgcccagtttcaaacaggtatttatttttctctcctaggcttcccctgcaggatgtttggcgcatctatagtggcattttaaatctgtcagacattacaaaagatacacctttctcacaaataaaagagattattattcaccaaaactataaagtctcagaagggaatcatgatatcgccttgataaaactccaggctcctttgaattacactggtatgtagcatatgtaagaaggtggagagcagaattgcgctggttgatattttcatatcagtttgaacaagagggcagacctagagagactgtcgtcgttttctgactggtggagttgagggaaacgtgagggttgctgggaagtgaagaccccgcgacttgccgtgaaatctcttctacttaaagagcaagacatgtgaattaattctttcagggagggatacaactgcatgcaggtgatggaaataatgggcgtgggaaatgtctgtgccgtctgagaggcactgggcttgctttgacaagagtagcagaactgtcattgctttgggcttagggatattcgaatgtgtgagggcaagtgggatcagatatctacttccaggtataatttgggtaggaaagagactcatgcagaaagaagccctggaaggccagagcatcgtggtcagaggtgttgcctttggagggtcattgctgccaggagccgaatacccactgtatccaataacattcatggtcaggaatggtggctcacacctgtaatcccaacactttgggatgcccaggtgggaggattgcttgaggccaggagtttgagaccagcctgggcaacacagtgagaccccgtctctacataaaattagaaaaaaacaattaactgggtgtggtggtgtgcacctgtagtcccagctagtcaagaggctgagacaagaggatctcttgagcccaggagctcaaggctgtagtgagccaagatcgtgccactgcacacaaacaattatgtgacctcgggcaagttgctttacctctttacacctcttaatttccttatctgtaaaatgaggatgataatttcttcctgggtctgttgtaataattaatacatcaaagcacttcatgtctggaacagtgaagataccctgctatgactattaaggatagtatacatggaataagacacaggaacttctaaatgcttttgaccatagatttaggttctgagttttaagaatttaactcaggaaattgtaacaccaaaaatgtcatgtgaaaaatggtggtgacaaattttcttgaatcattagccttagaggttgggcagaaagcaaaaaattattcttgatgctactctatagaaagagaagacagaaaaagagaaagatgtatttttaaagtctatatccataactttatttgaccaaactctaatttaaaaattatgtttcagaattccaaaaaccaatatgcctaccttccaaaggtgacacaagcacaatttataccaactgttgggtaaccggatggggcttctcgaaggagaaaggtaagcatgacgctttaaatattgcttctagagtaagtctcacatgttgaaatacatggagtgggtcgttttaatcggtttctgtctgaaattatatctaaactctttatctttcctatctatttattcccaaatatttattcagttattcttaaaaaatgtatttttgctttggcttgaaaaaaaattttagggagacttttaagcatcttacttcattataaagatcagttgcttgactttgcatgaagcagattgggcccttctagggctgacaagcccgtgcaagaccacccgctcctcagtgttagtagcgttcccgtctcccaaaaccatgttctcccttgatgctaatggccgggagcacaggcaggtgtgtcgtctcactatggagaataatatttgtgtcattctttacagaagaaggtagcttgccaaactgtctccatctttcccgattcagtcttttgttcaagtaattcacatttttagattttttattggtaatctgagacaagaagaaatttaaagtaatcttcactaagccatgaaagctcccaacattgttctccatgagagatgctggcctgcatttattcaaaaacaaaagacccctctgttgccaaagctcggagggcttttcagaaacgatatagttgtaaattataattttgaatatataaagcaaaaaaatgaaaagtgagaacttccaggctttggattgttgtaggtgataaatataaaatgggatttctggggggctgctactgagatgaggggatggcagaaaacatggaagcaaggtctctggtcagcccagggtgctgggcttgtcccaacaccacgtaggcaataagaggacagtacagggtgccgtctctctccctcttcctctctctgtctctctctctctgtgtgtgtgtgtgtgtgtgtgtgtaacactaccttcccaatttttactgtctatttgtattcaaagataaggtccttatgaaaaatacactgctctgattcactttaaaacttatttccatatttattatttattgtgggaataataatattcccaatattattatttattatttaagttattattattaacttccctctgaggttatatattggttactcacaggtgaaatccaaaatattctacaaaaggtaaatattcctttggtaacaaatgaagaatgccagaaaagatatcaagattataaaataacccaacggatggtctgtgctggctataaagaagggggaaaagatgcttgtaaggtaactcatgagattatgaaaaacacaataggctgcttgagaaaattcatttcaaaatatattttccaatagcataattcaatcatagtttttaaaaaaattcagagacaaatgatctgataaattgataagcaacttttaacaaattgaatatacataatatatatttatattatttatgatatatgtcacaatctatgcatgtgctatttaagaggggcaaatatacatgcaataattgtgctagaatataaaaacattagacttcatcattgggatgatgatatcaagatttctttgttagatttatttcagatagaaaaggggatacgaaaaatgcaggcacatgagatacttggagaactttaagaaagagtgagtgtgtgtgtgtgtgtgtgtgtgtgtgtgtgtgtgtctggcaagcaaggtcttgcacacacacagcactttgggaggccaatgcaggtggatcacttgagcctaggaatttgagaccagtctgggcaatgtgatgaaacccatctctacaaaaaaatatgaaagtatctgtgtgtgtgtgttgctgtgtagtggactacagaactttagaggcagtcacttatttgaatcccattgtcgtaactttctactattttatttttccactgtgactcagggagattcaggtggtcccttagtttgcaaacacaatggaatgtggcgtttggtgggcatcaccagctggggtgaaggctgtgcccgcagggagcaacctggtgtctacaccaaagtcgctgagtacatggactggattttagagaaaacacagagcagtgatggaaaagctcagatgcagtcaccagcatgagaagcagtccagagtctaggcaatttttacaacctgagttcaagtcaaattctgagcctggggggtcctcatctgcaaagcatggagagtggcatcttctttgcatcctaaggacgaaaaacacagtgcactcagagctgctgaggacaatgtctggctgaagcccgctttcagcacgccgtaaccaggggctgacaatgcgaggtcgcaactgagatctccatgactgtgtgttgtgaaataaaatggtgaaagatca

SEQ ID NO: 15643 - DNA, 30734 bp, Homo sapiens
tcacctccaagaagcaattgtgttttcaggtagcaaatttttattattctgattgtttccaaataaactataatttttaagtataattttttactttatgagaaaattaatcatttatattctaatttcctgagtatgtagagagtatagataatgttcctttatgtagaaatatttaaatgtaagatgattttaaatcagaaagaatatttgattgatttaaaatttttaaatgggctttaatattttcagaggttttctttacttagggatttttggactgacattattgccattatttattaattttgtttttgcccaaatcaagaggtttcataattgtttactctctctctaccaattccctttccaacattactagccacagagttggccaatgaacaataaacacaacagtagtctggaggtctcaatttgtatcttgggaagcattataaattttccaactccctagacacaaatgtaccaaaaaaaaacccttgttttctataccagtaattgtgtgctttgtcttgcaattcagacatttacaagaaaatctaaatcaccttaaattaagatttatgttaaatgtggtctaaaaccagcagagttatgtattgttttcttttttagaatgattttattcaagcaagcaacttatttcatttccttgtttgctacagtttcctgtggtaagtgaattatctataaaacatggaattcaggctaagacaggagtagccaagcaagtggcaccacccctggagaaagctattgaacatacagcttcgggggtggagattgtccctgatgattcaggacacgtgtctatttaatgttccacaacaaggaccacttgtcaggtatattgctgtagacatatgttgcagaccagaggaaggagctcagaagtaggaatgtcttgggacttgtgttaacaaaaacttctgttcgcagatgacactctgcaaagcaaaacttgaaacaaaaaaaaattagtcctctatttttattatcaacagtaaaaaattaaactttatctgaaaattcaaaagagtgctaggcattttatagtgtctgggtccaatccaagtatctgttaggaacaccatacatagttttactctggaccgctagggaaccatttcaaaaatgaaagtaactggtttaaatttaacttagcaaaccatgcatttggatagttctaggtgaatagctttcaacaccagatttagatctcatttctctattaatttcattaatttttggagaataaaaatgattctggacatttcattaatcattacagagggagttttctctgtgtccccacaaggcatgattctgggtctatggtgacttaagagggccacacaacaatgagtatttaattttcctcagatgtatggctacaataaacatctataggtaaggtttacattcataaagagacctttttttttccaggaaaaaagacttttattccccctaaatcacaactcccctgtgtctgtccctcaaccctgatttctcttctaaaccgtaatttacaaacccatgtgcaaacccactgaaaggtgagaaggagcataagccagagacactgggaaccacagccaactacagggggtttttcatttttttgttttgttttgttttttggcaaaataaatcatgattatggctaggaaaatcagggatgtaagtaagcaaaaatttagaaactacatattgcatgtagtccccaaattcagaaacagtcatcgttaaacatcttttatttagtctttcagatatttttctacatatacctatttgcacatttcacaaaaaagagttattaactgtggacactctttgacttgcattttccacttatagctatcttttggtgcaaataagtaatatattttggagcttgctattcttctctttttatggtatttttgtgtgcacattcttatgctcttattcagttatttctgtagaatacaatttttgaaataaaaatactagattcaaaggtgtgaatatttttgaaggttttgtggtgtggtatcatgaaattaggtttcagaaagtttactccatagttgactttttctaccagctaataagagtgctcatttaccccacttaggccaactctaacaggcttctgttgctttgcatcctgacatatttatctttctggaaacagtgtcctaatttatttctgcagagctactgcctctcagttttggtccatgtggttctggtgaccctgattcttctgctgaaccagaaagtgcacacatcctcctggctgtggtgacccaatcagagccaacgtcttgcaatgaagcttttctttagacatctagaaataagactcttatgttttttttttccaatttgacttgaaacttaagacaatacacaggcctgagttgttggtactattttgctactacgtggagcttgagagtaatggtaacaccaagactggagcaagtggaaggagacatattgtccactgatgctatcagttgagcacaatgtgcagttactttttaagccagattcaccatgggctttttggctcctgaaccaatagatttcatttgttttcaagccactttgtactaggttttccatcatttgcaatcaaaaccagtatacaaacactggttatttaatttttcatttttgctaatctcagggataaaatggcttctagttgttttaacttggctatatttgtgattcttcccattttcatatacttactaatcacttctatttcttttgtaaattatcttttcatatttgttatctaattctttaaaatttgagtactttaattctcattattgtttgtggaattgttaaacaagactgaataatctgcccaaagtccatggacatgggggcccatgtaaaagctttgaaagccaccatcattatgagataaattatataatagtactttacataggctccaaaatacagcacagacacagctatcattgtcatggtcatcattatcatcatgatcaccaacttatgaggataagcaagaacacctactagaagtttctttccattcagcaacaaaattggtgtctttctagtcactcccttccctgactgtcacatagcagttcacagaggctcagttgcagaatgagaagctctgggccaggacctgccattgtatgcatccttgcatgggaactgggggctggaagaggagtgactgcttgataattatgagtcagtcaaaaccaccaactgtctgaaaaaaataggcctttttgtaactagtattgtcactaaaccaactcctccatgttttgtgcatacatgaaatctaggcaatacacttgtattcccaaaagcttccacttgaagagatctgtgctctttccaaatataaaccttacccgagaggtggtcatcttggccacacctcagagagggagagaggcagtcttgttgggttgggtggtcataatggggctcagggccaaatccccagggggtaggatagtgcagagaagatggcactctccagtgcttaataaaatgcacgtggtctaagctgcccactccctcaaaggcaataaaaaataggtactatttaaattgaagagtaactactgccccagggaatggacaggttgtcattggaatagccatggttaatggtcccagttgacaactgaaatgaatgtgctacctgaacaggaaagcttattaaccagatttcaaagacagtctttcccggtaaatccaaatttacaaattaaagccagtaaagacaccgaattctctaataatatgtggggtgcagtatattttagagctgggaataattccaaacagcaaatagttcaaaatttattttcaatttagcatatgcatgcatttgcttaaactgtcttaaaaatgagtaaaaaatactgtcagtttgtttcaatcatactgagatgaggaacaatgtttagcattgcatgctagaaaaggacacaggattgggagtcagggctgggtgaccgtcacaggactttcactaactgtgtggatcttgggcaagtctgtgtgccctgagactcagttatttaactttcttttaaaaaacatagtccagatgcagataacaaagcctgcctctaatttcccttacagaattgtgagaagctggtggagatgtttgttacaaaagtgttttgaaaatagagcaaatattattctttttaaggcatgatgttttcatagcatgtcaggcaacaggaaaaaactaagttaggattttattttattgtggggaatttatgtgcaaattattgtgcaatttaatgaaaataagccaatgttttatacagaagtacccagaaaattaaataacactatacattgttcaaatagttgccttaatatattttattttctcagcataattagagttgtattatacaggtctttgagtagtcagtcagtgggagaagttaagacaacagatatctttttattaaaattattatatgaattatcgcaaattaatttttatggttctgtcacaggatgtctgactcaactctatgaaaacgccttcttcagaggtggggatgtagcttccatgtacaccccaaatgcccaatactgccagatgaggtgcacattccacccaaggtgtttgctattcagttttcttccagcaagttcaatcaatgacatggagaaaaggtaaaagttggtatttcattattggagaagctgtttttcaaaactgaatcagttttgtgcagaaaggtgtagtataactgagagttcttcctcacacggggttcaaggaccagcttcagcaaaatcccgtcaagtggttcttacaaatgcagattcctaggccacaacccagatctgctgaaccaaagtttcttgtgaccaggaatctgcattttaaacaatcactgtgtttctttaaagtagtagaagctagtcattttctattcaaagcctcaaaatgcttgaatatcattgggctaagggattgtctcaagaaagagtctaacaggtgcacatttcatctgaataaagaaacagatttaactgtgtgacccatgatcacattagcggatagcacagtccaaagaaaataacataagacaagcattttgctgagaatgtaattgagaaagatctagaacttgtgattttgggacagggcagttctaaatggggcctatagtgagccagtttgggcacctgtggcatgatgctatgtatggtgtgtgtgtgtatgtgtgcttgtgcttgtgtgaatatgtattattaactggaaatttgtaaaagtattggaaaaatagtacttacgattttgtgtgtgtgtgtgatggagtctcgctttgtagcccaggctggagtgcagtggcgtgatctcggctcactgcaacttccacctcccaggttcaagcgattctcctgcctcagcctcccaagtagctgggattacaggcacgcaccaccacgtccagctaatttttgtagttttagtagagacggggtttcaccacattggccaggctggccttgaactcctgacctcgtgatccacctgcctctacctcctaatgtgctgggattacaggcatgagccaccgcacccagcggtaattacaatttttattaggtcagagagatgcttattaatcacgagccacagtttcatcttaatgatttttccttttgattaatatccagagtaagcttttctttgttgttcccatttccatgttcataactctttactcatcttcactctatgtgagtttaccaactagaaattggatagtcattctctgatcccacatgttaaacttgtagagaaaactcagattgtatgtgaggatcatcatattaaaagtggaggaaggttctagaattcttataaataatgaaattaacatgaaggtggacatctaagacagagggaagtcttccattaagtgcagactacaaggagttaataagcaagatgaacacgatatacaaatccagctcttatcactaagttaactttttaagtaaatgaaagtatttgcaaaaataattaccaattgagaacatagttgcctgaaagtttaagaacacaggaaaaatcattaactctttaatatggttgatttcctgtacttaaaaaatgtgagtgtaaagaaaacgcagtgatggagttagatattatggggtgttataaaattagctctaagagtgttctttccagcaagtattggggaagctatattattttccttattcctggttttatttgttagtgtgtagaaaatgctagacatttcctcaatgtatgtttattattctacttcctaagtaaagctacttttaaaataggtttggttgcttcttgaaagatagtgttacaggaaccctgccaaaagtacatcgaacaggtgcagtttctggacattccttgaagcaatgtggtcatcaaataagtggtaagttgtgaatttcttagctacatttgagttaatattggatctcgcttagaacagcttttgctcaaagtttgtactgctacagctttttggaaggcatcactcataaagataggagatggggcagtattctggacacaaaagagggacccatattcatctggacacttctattgtctttataaatcaacacatacttaatgagcctctattatttatgaggttagcgctcaagtgtaagatttgcagaaaatgaatccaaataattgtgtctcgtttccagataagaatttttaagaaaacacaagggaacatctctctcaagttcacttgagggtaatttttacatcagtgattctcaaccagcagtgattttgtctcttccactggggacatttgacaatgtctggagacatttttggtggctacaactagggaggatgctattagcatttactaagtagaggccagaatgtttgaatgctgaccaacattctacaaggcacagggcagtcgtccacagcaaataattttctggcccaaaacgtcaacagtgctgacatcaagaaactctgtgatataccactaggcccaaattgaagaactgagttctgcaaatcttgctaagaataatacttcctaaaggaaacttgaggactaggatgctagagaactttgattctgacatctgaagctactgatgtcttgggaaacagtttccaatgctatcctaataaatttaagacaaatgaactatttctcaaacatgactgggactgataagaaagtgaaaagtgctgaaaagattcaactgatgggttgtcagaatcttaaaataactgctgttattctatgtatgactatatatcattactattttattttcattatgcacaattaattttgtaggttcaaatttcagatgtttttaaatttgtcatcctttcctccctcattgatatcacctcttcaatacgtacacactttgagcctgctgtttgcattttaaccagttatcaaaggatggcaatgccttcattataaatgtgggcctgacttagccagtataataggtgtagtctacgtgaggtggagtacatttcctattttaaaagatcaatttttatgttaatccaatttggtataaattattcgagtaagtgctatttctgattgttgtatcttgtagcaaaatttaaagaaaaagtaatttgtgcctttctcaatattcctgttattgttcatgtattctaaaactcactgttactcacttagcttgcttttaatgttttttaaagtgaaaaattgttcccaagtacataaaatctctacactcaagaacaattctagtcaaaagcatttagagcttccgtatgaacacttaaagagtttttatttgtaagagtcgcatcccaactcttagcctgttcttttctcacatgcagaaaaataggaaagagacttcgtttccacagtctgcaaattcctgtgtttaagaaccacagtgaataatccacctccctgcccaactcatcgtactgtcatatagttttcctgacagtttgtgtattttctgtctttcccacccttaaatttagttttatgacttcaaccatacttcttaggagtggaaaggtatctgtagtagattatggtttattccacataatcttggggaataaaactttaaaaaagtatacagtttatacttctggttacattacttccttaaccaaaagtctaaccaagaaatttgaatctttaaaaaaaaaagaggccgggcgcggtggctcacgcctgtaatcccagcactttgggaggccgagacgggcggatcacgaggtcaggagatcgagaccatcctggctgacacggtgaaaccccgtctctactaaaaatacaaaaattagccgggcgtggtggcgcgcgcctgtagtcccagctactcgggaggctgaggcaggagaatggcgtgaacccgggaggcggagcttgcagtgagtcgagatcgcgccactgcgctccagcctgggcgacagagcgagactccgtctcaaaaaaaaaaaaaaaaaaaagagcctaattttgcttcactgtctgtgaaaagaattatctgtatcttttgcatgtaagacaaatctcaatgaaaagggtgcttaaatagaagttaacactattttaaagcaagaatggaagtggtttcatcatgcgtaaacaacaactctccacattttgtaatgattgatctggatgcaatttgtcatcagacaggagaagtcgaaagcaaagaaataacactgggagatagagaagctctttcattcaatgcgaaaggtcaaaggcacatcagtttctttaataatgcaaacctcagcacacattatcagtgtcctcattattattgccttgtttatttcccactgctcattgataatttcaacgtgaaatttacctgtattgctgcatgcatcttgcagtttaagaagtgaagtaacccaatttcaaagctagtgctttagggaaaatattggattgtatttacttcaagcagagttcgataatttatgtacataataaaaattttaaatcccttagttaatatagcagttgccaaaactgggctattatcattctaaactaccaacccaaatggtagtgggtatctaatctacctctagaaagaaaatggactgtatttgctctatgtatttttcttgtacagcttgccatcgagacatttataaaggagttgatatgagaggagtcaattttaatgtgtctaaggttagcagtgttgaagaatgccaaaaaaggtgcaccagtaacattcgctgccagtttttttcatatgccacgcaaacatttcacaaggcagagtaccggtgagtacaattcaaggtgtgtgttctttgtattggtgcctccaggatttcactgtattcttcttaacctcttttgttcccaaactaaaaaccaaacagggcttttattctaaccactttcctcatttacttactctattttatttttttatcttttatttatttatttatttattgagatggagtcgcgctctgtcgcccaggctagagtgcagtggcgtaatctcgactcactacaacctccgcttcccgggttcaagcgattctcctgcctcagcctcccgagtagctgggattacaggcgtccgccaccatgcctggctaatttttgtatttttagtagagtcggggttttactatgttggtcaggctggtctcgaactcctgatcttgtgatccacccacctcagcctcccaaagcgctgggattacaggcatgagccactgcgcctcgcccttcattttttaattaaataattcatttaatttcatttgtttctctactcttttcccctggcatgtaattgtaccgcatcttcaaagcctgacatcctcttcccctacttctccaaagctgattcttgcaggtctttcctcaaataccgtcccctccaaaagcccatttctgagcattctcttttaagtcacactcagctctgtttatttcattcatagagctaatcacaatttgatattaacttgtgatttttttccttatttttaaatcttatttttatttgcatagatgtatggggtacaagtgtaattttgttactttgatgtattttacagtggtaaagtctgggcttttggtatatccatcactggagtcatgtacattgtacccactaagctatttttcaacgcccgcccccttcccacctctctgtcaccttcccagtctctactgtctatcgctccatgctctactcaattttggtgtcattttttcctgaagcaaaattttggtgtcattttttctgaagtcattttctgaagtctgtgtcatttttcgctttcctgaagcgaattttggtgtcatttttcctgaagttccgtttgccccacacataggccttgcttatagaatgagggtttagtgtcacggagtctcctgcctcattctcaccctaacttttcctttacccctttgcgaggggaaggatgtccattaggttaataatgcagacccctaacccactcattatcagggtcattgtttttccactgtgcattttaatactaactgttacctgcactgctccctgcccctcaaagtgcagaaagcaaagtaacctcttttcttcccattcaggaacaattgcctattaaagtacagtcccggaggaacacctaccgctataaaggtgctgagtaacgtggaatctggattctcactgaagccctgtgccctttcagaaattggtaattgtaggactacttcactttgtgattgtggtaggtggaataggagcccccagagacgtccctgtgctgagccctgggacctgtgcgtgtgttcccatagctggcaaaagcgtttctgtcaatggcatgcagttacgggcttcgagatggggagtttactctggattttctgaatgggcccaatgtactcacagggttgagtgctcacaaggctcataagaaaaagagagaggcggaaggctcagagccagagagagaggtttgaaggtattacactgctggctttgaagatgaaggtccgtgagccaaggaatgcaggcggcctctagaagttgaaaagggcgaggaaagagtttccctgtggagcgtcctggaggaagaagccctgctgatgtcttgattttagcccagtaagacccaatctctagaacagtaagataattaatttgtgttgtttttaaccactaagtttgtggttatgcccctagagcagcagttataggaaactagtacagtgatactgttagagttataggacagtgatataggacagtgatactgttatagttataggaaactagtacagtgatactgttagagttataggacagtgatataggacagtgatattgttatagttataggaaactagtacagtgatactgttagagttataggtacagtgatattgttatagttataggaaactagtacagtgatactgttacaggtacagtgatataggacagtgatactgttataggaaactagtacagtgatactgttagagttataggtacagtgacataggacagtgatactgttatagttataggaaactagtacagtgatactgttagagttataggtagagtgatataggacagtgatactgttatagttatagaaaactagtacagtgatactgttatagttataggacagtgatataggacagtgatattgttatagttataggaaactagtacagtgatactgttagagttataggtacagtgatataggacagtgatattgttatagttataggaaactagtacagtgatactgttagagttataggtacagtgatattgttatagttataggaaactagtacagtgatactgttataggtacagtgatataggacagtgatactgttataggaaactagtacagtgatactgttagagttataggtacagtgacataggacagtgatactgttatagttataggaaactagtacagtgatactgttagagttataggtacagtgatataggacagtgatactgttatagttataggaaactagtacagtgatactgttatagttataggacagtgatattgttatagttataggaaactagtacagtgatactgttagagttataggtacagtgatataggacagtgatattgttatagttataggaaactagtacagtgatactgttatagttataggacagtgatataggacagtgatattgttatagttataggaaactagtacggtgatactgttatagttataggtacagtgatattgttatagttataggaaactagtacagtgatactgttagagttataggtacagtgatataggacagtgatattgttatagttataggaaactagtacagtgatactgttatagttgtaggacagtgatattgttatagttataggaaactagtacagtgatactgttagagttataggtacagtgatataggacagtgatactgttatagttataggacagtgatattcttatagttaccgtggtatagttatagttaaaggtacagtgatattgttatagttataggacagtgatattgttatagttataggacagtgatgtagttacagtgatataggtacagtgatattgttatagttataggacagtgatatagttataggacagtgatattgttacagttataggtacagtgacgttgtaatagttataggacagtgatattgttatagttataggtacagtgatgttgtagcaaaactgtaaggtcattccttggttgtgtccctatctagtgaaatgactctaccaggggtagggaaataaaactctgtcgtttcacacataaaggtaatttcaatggaattatccagaaaattgccatgacattccacctcatttagcatgtcaggatgttaatgacaagatgttactaaaagcaaatcccttacggccagttttccgcagtactgggtgctggctctgtgcctggccctgtattgggtgctgggctaggatttccctgtggaagattgggaaggttggttacaaggtggctattttcctgtctcctctttgcgacagcacaccttctccatggtgtgtgccaggttcacgtgtactggtgatttaattttaacgttcatattatttttttctgggagagtttttgaaggctgccaggaggcaggactcgatgcaaacatgctccattctgtacccagccctgttgctggaaggatttgctgcacttacccagggaacaggcaagctcgtgctgtggctctgggctgtcacagctgctgtccacacctgggagagcaccctggatggctcatctgtgtacttgctttcttgttaaattgcagtgagttcacatgtgatttaatcggatcaaatggcctttacagactgataaaaatatggctgtttcaggtggtgttttgagctgctaagggcgtggcttttcactgagtacgtggtccccgttcctcagggaacacccagtagccacatgcctcctaaacctagagtagggctgtctcctggcctaactgcccaaatgagattcataagttagggatgatctgtagttatcactacagatttgtccttggtttcaccaaggattttcctaattttacaaacaaaacccctaaggctcctggaaggagggtagaagtgaaggtgctccgggggcaacacagctgatgagctgaaccagaactcgacccttgggtcacacacatttcacagtgctcactccaccttttgtttttttaatggatttaatggtgttttaaagcctcctgcctctcaacacatatgaattcattatatttacagatttccttctcttgtggtccatcttcctgcatagatcttgagagatgtcaggctaaccacgtttcctcagttaatttaacaaaaccatttgcaactctgacatggaaaattcctaccatgtgacttattaatttatcaattgagatggtacacatattttcaagccaaaaggaggaaaacataaattggaaaaaaaaggtttttttatttttatcacctctggggaagaaagtctgataaacgaagctggttgataaaattgcaattaggggaagcaacatcatggtttctgttcggaggctaaccagatggcatacttgaaatagagaatgtcctagaaatcaactggttgcttggccaaaatatctataaatagtgcccaacatattagataggaaaagcaaagtaaaaacaattttaacaggttaggacattgggctgaagtattgcatatatttaatgtcatgtgcgtccgtgtgaagagaccactaaacaggctttgtgtgagcaagaaagctttttaatcacctgggtgcaggcaggctgagtccgaaaagagagtcagtgaagggagatggggtggggacgttttataggatttgggtaggtagtggaaaattacagtcaaagggggttgttctctggcgggcagcggtggggggtcacaaggtgctcagtgggggagcttctgagccaggagaaggaatttcacaaggtaacgtcatcagttaaggcaggaaccggccattttcacttcttttgtctttcttcagttacttcaggtcatctagatgtatacgtgcaggcctgggcccagaggcctgacattcctgtcttcttatattaataagaaaaagaaaacgaaatagtggtaaagtgttggggtggcgaaagtttttgggggtggtatggagagataatgggcgatgtttctcagggctgcttcgagcgggattaggggcggcgtgggaacctacagtgggagagatgaagctgaaggaatattttatggtaaggggtgatattgtggggttgttagaagcagcatttgtcatatagaatgattggtgatggcctggatatggttttgtgtgaaatgagaaactaaatggaagacacaaggtctgaataagagaaggagaaaaacaggtgttaaaggactaagaattgggaggacccaggacatctaattagagagtgcctaagggggttcagtgtaattacttgcttggttggtgagtttttgggctctatccttgacagagtcctcctttttaagttggaggctgagcttggtgaggtgtgtttttaaaagaccattagtctgttctacctttcctgaagattgaggatggtgaggggtatgaaggttttactgaataccaagagcctgagaaactgcttgggtgatttgactaataaaggccggtctgttatcggattgtatagagatggaaaggccaaactgaggaattatgtctgacagaagggaagaaatgaccacggtggccttctcagaccctgtgggaaaggcctctacccatccagtgaaagtgtctacccagaccaagaggtattttagtttcctgactccgggtatgtgagtaaagtcaatctgccagtcctgggcgggggcaaatccccgagcttgatgtgtagggaagggagggggcctgagcaatccctgaggaggagtggagtagcagatggaacactgagcagttattttttgaggatagatttttacgacggaaaggaaaagtgaggttttaagaggtgggttagtggcttgtaacttacatggaagagtttatgaaatgatgacagaatagaatgggcctgtgaggctggaggagatattttccttggtccaagaattatttgccttgtgtgggaagagattgataggtggaagtttcaatgggggagtagatgggagtgacagatgaggaagaaaaaaactggctgtgagggatagaagttggaatgctcgctgcttttttagctaccttatcagcataggcattgtcctgagcagtgggatctgatgccttttggtggcccttgcagtgaatggcttcagcttcctttggaagtaaagtggccttgagaggagtttttattaaagaggcattaagatggagaacccttgtgtagtgaggaaacctccttcagcccatataaccgcatggtggtgcagaatatggaaggcatatttagagtcagtataaatattgacacgtagtccctttgcaagagtgagggcctgagttaaggcaatgagttcagcttgctgagaggtagtggagcggggcagagcagtagcctcagtgatagatgtggaagatactacagcatagcctgcctttgctggtgagtggtgattaggcctggtggaactgccatcaataaaccaagtgtgatcagggtaaggaacaggaaagaaggaaatatggggaaatggagtggatgtcaggtggatcagagagatacagtcatgggggtgggggccagcctaaaacagtaaggtcaagttgtttgaacagaaaggctacagggcgtggtcctggctcttgtgtaagaattttgactgcgcagccctgcacttcggctgtgtgtaatgaaaagggttgggatgagttagggagagctagtgtgggagcagtttctagggctgtttttaaggaatggcaagaggagtggctaaaggatttaggatctttggggtcagctagctttgcttttgtgagtttatataatggtttagtcaggatggtaaaacttagtatccaaaggcggaagtacttaaccatacctaggaagaaaaggagttgttttgtagaaggggttggggtttgggagatgagccagacacaatcagcagggagagcacatgtgttttcatgaagaattatgccgagataggtaatggatgaggaagaaatttgggcttgactgaagtaatgggggctgtcctcgaagccttgtggcagtacagcccaagtaagttgctgaggctgacgggtgtcagggtcagtccaagtgaaagcgaagagaggctgggatgaagggtgcaaaggaatagtaaagaaagcatgtttgagatccagaacagaataatgggttgtggagggaggtattgaggataggagagtatatggctttggtaccatggggtgaataggcaagacaatttggttaatgaggcacagatcctgaactaacctgtaaggcttgtccggtttttggacaggtaaaatgggggaattgtaaggagagtttataggcttcaaaaggccacgctgtaacaggtgagtgataacaggctttaatccttttaaagcatgctgtgggatgggatattggcattgagcggggtaagtgtgattaggttttaatgggatggtaaggggtgcacgataggttgccaaggagggagcagaggtgtcctatacttgtggattaaggtggggacacacaaggggaggatgtgaaggaggctttgaactggggaaagggtggcattgaggtgtggctgtggcctaagaacagtcagggaagcggataattgagttaaaatgcctcgacctagtaagggagctgggcaggtggtgataactaaaaaggagtgcataaaagaatgttgtccaagttggcaccagagttggggagttttaagaggtttagaagcctggcggtcaatacctacaacagttatggaggcaagggaaacaggcccttgaaaagaacgtaatgtggagtgggtagcctctgtattaattaagaaggggatggatttaccctccactgtaagagttacctaaagcatctgtgatggtccaggaggcttctaaggtgatcgggcagcgtcagtcttcagccgctaagccaagaagatctgggaagcagtcagtcagagagccttgggccagagttccaggggctctgggagtggcagccaggccagttagacagtccgatttctagtggggtcccacacagatgagacacagcttaggaggaatcccaggctgcgggcattccttggcccattggccagatttctggcacttgaaacaagatcctgatggaggaggtcctgtaggaatgcttgaccactgcagtttaggcattttgaagtttttgtgtgtgctggagatgtggctgggttttgtctcacagcagaggcaaggaatcgcaactcagaaatacattgctacttggctgcctctattattgtacatcttgaaggcgaggttaattaagtcctcttgtggggtttgagggctggaatctaatttttggagtttttttttgtttgttttttggttttttttttttaatgtcaggagctgactgggtgataaaatgcatattgagaataagaggccttctgacccttctgggtctagggctgtaaagcgtctcagggttgctgccaaacgggccatgaactgggctgggtttttcatatttgatgaaaaagagcctaaacgctaactgatttgggagaggtcggataaataaaaaggaacattaatcttgactatgcctttagctccaaccacctctttaagaggaaattgttgggcaggtgggggagggctagtcgtggaatgaaactgtaagctggaccgggtgtgaggaggggaggtgatagaaggattatagggtggaggagcagaggctgaggaagaattgggatctggcttggcctggcaaggagcagcctggggaggaggggagaggtcagatgggtccatagaaaaggaggattggaaagactcagcaacacttggggttgggattgagaggacagatgggttgggattgaggggacagatgggagggaaagaaggaagatttgggacaagttgcattgggaacagagactagggagggaccaatgtgtaaaagaatgcctggacgtcaggcacctcagaccgtttgcccattttatgacaagaattatctagatcttgtaggatggaaaaatcgaaagtgccgttttctggctatttggaaccattgtcgagtttgtattggggttaagcagcattgcagaagaaaataaggcatttaggttttaggtcaggtgtgagttgaagaggttttaagttcttgagaacataggctaagggagaagaaggaggaatggagggtggaaagttgcctatagtgaaggaggcaagcccagagaaaagagagggtagagacatggagagaaggggtgggggggtgcttgcccccaggaaagtggttcttgccactaagggtgaaggatcaaggcaggcattcgcgcggtgatcagatacctctgaaacgtgggtgaataatcaagcaggtgtccctgcagtgattaaacagcaaggaaagactatcttcccaagtccatgaccagtgccagagttttgggttcatggataaaacgcgtctcctctgtctctaccagaaaatgaaaggaattgaaattaagagaagggagagattgaaggatggcgccaagattgaaaggaaaaagaggttgagggatagggagagaggttggataagagagtaaaaagaggctgcttacccaatttaaaatcggtgagatgttccttgggcttgttggtctgaggaccagaggtcatgggtggatctttctcatggagcaaagagcagggggacaggggattgatttcccaagggaggtcccctgatctgagtcacagcaccaaatatcacgtgtgtccatgcgaagagaccaccaaacaggctttgtgtgagcaagaaagctttttaatcacctgggtgcaggcgggctgagtccaaaaagagagtcagtgaagggagataggggtggggacgttttataggatttgggtaggtagtggaaaattacagtcaaagggggttgttctctggcgggcaggggtggggggtcacaaggtgctcagtgggggagcttctgagccaggagaaggaatttcacaaggtaacgtcatcagttaaggcaggaaccggccattttcacttcttttgtcattcttcagttacttcaggccatctggatgtatgcatgtaggcttgggcccagaggcctgacatttaacatggataaatgtaaagttcttagaatcatacatacactttggaaaagatggggcttaatcgcactttataagacttgaaggatgtttgagaatcactatgaaactgctgaaaataccaagaaaatttaattcttatgtatataaataatgtgtctgttttacatgaatcccttctacaagcttggtatttaatatggcatatattgttttttcatagtagatttaaaatttttgatatctaatttagataacataaaattaaccctttgaaagtgtacaactccgtggtttttagtatatccacctgattgcacaacgatcaccactgtctagttccagaacatttttatcaccacaaaagaaaggctgtatccaggccgggcacggtggctcacgcctgtaatcccagcactttgggaggccgaggcgggcggatcacggggtcaggagattgaaaccatcctgggtaacacggtgaagccctatctgtactaaagatacaaaaaaattagctgggcatgatggcagatgcctgtagtcccagctactcaggaggctgaggcaggagaatggcctgaacccaggaagcggagcttgcagtgagccaagattgcgccactgcactccagcctgggcgacagagcaagactccatctcacaaaaaaataataaaaataaaataaaaaaaaaaaagaaaggctgtctttctcctttcccattggccgtctttctccattccctactcctccaatcccctggcaaccactaaatctactttccatgtctgtggacttgactcttcgggacattttacataaatggaatcatgcaatgcagcacattttgcatctggcttttttcacctggcgtgttttcaaggctcattcgtattctagcatatatcaatactttgttcctatttaggactaaataagattctattgtatgaataaaacatattttgtttatatacttagtttgatgaacatttgagttgtttctggatttttttttttttttttttgcctcttatgaataatgctgctatggacaacagtttttgggtaggcatgcattttaaattctcttatgtatatacttaggattaaaattgctggatcacagagtaactccatgtttaactttttgatgaattgccaaactgtttttgagagcagctacacaatgttacattcttaccagcaacaattgagggcttcagtctctctacaaccttaacaacacttgttattgtctttgtaattattgcctttctaggcagtgtgaagtggtgtctcactgtggttttgatatgcatttccctaatgactaacaatgttgtgtatcttttcgtgtgctcattttcaatttgaatacattctttgggaaaatctctgtttaaatcttttggccattaaaaataattgggttattttcattgttgagttgtatgaactctttatatactctggatactacactcttatgacatatattattttcaaaaattttctgtgcatctgcaggtcatcttttcactttactgatggtgttctttgaagcaccaaagtttttaaacttgatgaaatccagtctggctttattcttgcacgtgctttacctaaaacgccaaaacctaattcatggttttgaagatttttgcttatgatttgttcttagaggtttatagttttagctcttacatttaggcatttgatgcattttaaattaaattttgtatatggtgtaaagtagcaatccaacttaattcttgcatgtgggtattcagttattccattgtcttgaaacccttttcaaaatcaattgtctataaatgtaagagtttatttttggaccatcagttctatcctgttgacctatatatgcctatcctaatgccagttacacacagtcttgattaccataactttgcagtaagttttgaactcagacagtctgagtgcttttattttgtcctttttcaagattaatttggttattccggatcttttgcatttccatatgaattttaggatggttgtcaatttctgcaatagaaaagcagcaggattttgatagagagtgcattgaatctgtagaccaatgagtatcaatggaattatgtgttatcaaatttagtaaactacataaacgatatgtacacaactaaaacaaaactaagatataagatcatattaatgtaatgataataaaagtggattgtctcctgttctaattttaataggcacaaggcatttttgttaatcacttcttattaaagaattttttataatattcaggaaaatacaacaaaaaaacccttacattcctaaggcctcagagtcagagtaatataaaggaaatgtaaacacatgctgagtaatgcaagcatttggcaatggtggtgactggagctgggagcacagcttttatttctctgaaataggaatttgccccttagagttagaccaattttgccttcctctaaatggcaaacagtttggagatactttaaaggacattttttcacttaggatgtttagtactatgaataataaatagtcacaatttccttaactatggtgacaaaatacaagcaaatttagcctcatgtcatttcctaaggaacatcttctctctgtgagttcacaggttgccacatgaacatcttccagcatcttgcgttctcagatgtggatgttgccagggttctcactccagatgcttttgtgtgtcggaccatctgcacctatcaccccaactgcctcttctttacattctatacaaatgtatggaaaatcgagtcacaaaggcgagtatgcatggaaaatcgcatcacaaaggcgagtatgcatggggagcacttgctgctgtactttcatcacttttatagtctgagttcttaaaagtttcgttcatttccctcaaaacacttgaacctgcagtttcagtaggtactgttctgccaggtgcagattagttaagagattagcagacttctctgcctatcttctcttactttaaaacaaatgttaccattgaatcaaggaagcaatagccatgagaaaaaagaaggatctgacgcctttgaatgaagattcaaaacatgatcttcatgttttgtattagcttggagtaaaatccacttgctggcaatatagcccttaagcttgttgcctcttctctttgtttcagaaactagagccctgtttattctgatcaaggctctggcccactgtctttatctcagataacccaccctcttctgcacacagcatggagctaagagaagggtgtctagttatgtaatatcatcggcagcataaattcccagaatttgttctttgatttttttgtttgtttttccagttagaaggtggaacttcatcattgtcctcttttcaggttgtctgtgcctattagttttctccagagggagaggtggcttgatttacatttaatctctgcaatttattagagtcctgtagttggatttactttgaagagagtttcccagaagaataaaatttgctgcgttgctttttgggtgtgagctgcttttgtatttgcctaatgcctttaatgcaaatttctttctttctctcttgcttttttttaaaaaaaatagaaatgtttgtcttcttaaaacatctgaaagtggcacaccaagttcctctactcctcaagaaaacaccatatctggatatagccttttaacctgcaaaagaactttacctggtaatgtgatttgataataatattacataaaatgtaacctatttcatgacttttaacagcaacagtgatgaaacaatcctcaaggtaacagaaacttgtgtaaatgtcgttcattgcttttcccatctgatatctttttgtgtttataattgacacagaaccctgccattctaaaatttacccgggagttgactttggaggagaagaattgaatgtgacttttgttaaaggagtgaatgtttgccaagagacttgcacaaagatgattcgctgtcagtttttcacttattctttactcccagaagactgtaaggaagagaagtaaaggaaattttatttttcaaagacagttgacatgaccatttcatattctctttccccctgtgaaggcttactctttctactgttcatttcatctaggtgtaagtgtttcttaagattatctatggatggttctccaactaggattgcgtatgggacacaagggagctctggttactctttgagattgtgtaacactggggacaactctggtgagtaacctcactttttcgtggacctgtcagggatgtctgtcatgttgatagtttgcttagtcttaaggaattatgtgtcttgttctccttggttagaagggactttgattcacttctaattccaaccattagcgtcaacgctctcttttcagtctgcacaacaaaaacaagcacacgcattgttggaggaacaaactcttcttggggagagtggccctggcaggtgagcctgcaggtgaagctgacagctcagaggcacctgtgtggagggtcactcataggacaccagtgggtcctcactgctgcccactgctttgatgggtaagtgttggatgcatctcatccagagtcttatcttggcttttcattttgaaggatctatgatcagctgcttcaccgccatgtgactttatgaatagagacgtgttaaagcggggatggtattcacaacatttaacttatagggtccaagcactgaccaacctgaccattagaacagagtgtggtctctgtacagggcagatggcgctgagtgggtattctccacagaaagagaaacgaagacagtaccccactcctccaacccaccacccaccaccaatcccaccaccaattccaccaccaatcctgccacccaccaccaatctcaccaccaatcccaccaccaatcctaccacccaccatcaatctcagcaccaatcccaccaccaatcccaccaccaatcccaccacctaccccaccaccaatcccgccacccacgaccaatcccaccaccgatcccgccaccaatcccaccaccaatcccaccacctaccccaccaccaatcccgccacccacgaccaatcccaccaccgatcccgccaccaaccaccaatcccaccaccaatcccaccaccaatccctgatgtgttcttcaaagacttatttgtcaggcccatagaaatgttacttcttgctctttgattcataaatatactaagtcataataatttttaaaagtgagagtttcgtactctgtatatttcaatgtatataatttgatctatttcaatttattggtcaaatagtagacatgttaggtaagtcttaaaatactgaggctttggagttagacagaacatggcttaagtgacagctttgctgcttattagaggtgtggccctagaagatttgtaaatccctctgagctttatttgatctaaaatatgaatagtaatagtcccgaatttgtaacgttgttgggaagattaagtgacacatttaaaatgcttagtactgtgtgtagaacataaacacttcaaaaaatgtaaactgtgatttctatattcaataagaaatgtagaaatggacaaagcatataaaaagcaaaagaaatactagaagacacttgatttttctcaaaaataaacacaccaagtatttttgttttagtgaaattcatgcttacatgctgtatactaggattgaacatactgccaccaaaatatagcagtcggtggtacatgtgggtggagcaagacccctccaccttgtcatcgtgtgaaggggctctgccatacatgaccttgcatgtgactttaaggtggttggcctggaagaaaagtcccaagatgggaaatagtaggtgtcttttttactaaatgcactccaatttgggaccaaaaattttcattcttgaaggctcagtattgtgagtttataagagataatagacataaaagtgtaatgatttcattgcaaataaaaaaaggcccctttgcacctgatatctccatcatttttctagaattttgtgcacacatgccttgcactacttggtgatgataaagatttccagatctttgcacagaataaggctttgctttagatcagaattttggatgtacttagtatacattcatcttttaaataatctatttacattttcatactttccaaaatacagatatattttattttatttatatatttatttaatttattttttgagatggagtctctctctgttgcccagagtagagtgcagtggcacaatcttggttcactgcagcctctgcctcccgggttcaagcgattctcctgcctcagcctcctgagtagctgggattacaggcgcgcgccacacctggctaatttttgtatttttagtagagacgaggtttcatcatgttggtcaggctggtctcgaactcctggcctcaagggatccacccacctcggcctcccgaagtgctgggattacaggtgtgggccactgtgcccagctgtatagagatattttaaacaacactaaagtcctcctactttgactaattagaagagcattagaagatcagcctgacttcttgacagttctgaatttagtggagcaatgaggttcagctttggtgaatgagcttaatttttccatgataaactgctagtttcttcccactacagtgtctctcaaaaatgggacagcaacattctttttgttttcacttgcagtaagcatgatgcaattacataaatgtacacttttcaatttgttaaatagaatcttcagagattcactactgccgctattggtgatgaaaaattaccagaaggaggaattaggtaggagaaaatgtgtcctatgtatttccttcccagttctttgaaagagagtgataggaaaaaggaacactattgaaggaaggactgcccagtttcaaacaggtatttatttttctctcctaggcttcccctgcaggatgtttggcgcatctatagtggcattttaaatctgtcagacattacaaaagatacacctttctcacaaataaaagagattattattcaccaaaactataaagtctcagaagggaatcatgatatcgccttgataaaactccaggctcctttgaattacactggtatgtagcatatgtaagaaggtggagagcagaattgcgctggttgatattttcatatcagtttgaacaagagggcagacctagagagactgtcgtcgttttctgactggtggagttgagggaaacgtgagggttgctgggaagtgaagaccccgcgacttgccgtgaaatctcttctacttaaagagcaagacatgtgaattaattctttcagggagggatacaactgcatgcaggtgatggaaataatgggcgtgggaaatgtctgtgccgtctgagaggcactgggcttgctttgacaagagtagcagaactgtcattgctttgggcttagggatattcgaatgtgtgagggcaagtgggatcagatatctacttccaggtataatttgggtaggaaagagactcatgcagaaagaagccctggaaggccagagcatcgtggtcagaggtgttgcctttggagggtcattgctgccaggagccgaatacccactgtatccaataacattcatggtcaggaatggtggctcacacctgtaatcccaacactttgggatgcccaggtgggaggattgcttgaggccaggagtttgagaccagcctgggcaacacagtgagaccccgtctctacataaaattagaaaaaaacaattaactgggtgtggtggtgtgcacctgtagtcccagctagtcaagaggctgagacaagaggatctcttgagcccaggagctcaaggctgtagtgagccaagatcgtgccactgcacacaaacaattatgtgacctcgggcaagttgctttacctctttacacctcttaatttccttatctgtaaaatgaggatgataatttcttcctgggtctgttgtaataattaatacatcaaagcacttcatgtctggaacagtgaagataccctgctatgactattaaggatagtatacatggaataagacacaggaacttctaaatgcttttgaccatagatttaggttctgagttttaagaatttaactcaggaaattgtaacaccaaaaatgtcatgtgaaaaatggtggtgacaaattttcttgaatcattagccttagaggttgggcagaaagcaaaaaattattcttgatgctactctatagaaagagaagacagaaaaagagaaagatgtatttttaaagtctatatccataactttatttgaccaaactctaatttaaaaattatgtttcagaattccaaaaaccaatatgcctaccttccaaaggtgacacaagcacaatttataccaactgttgggtaaccggatggggcttctcgaaggagaaaggtaagcatgacgctttaaatattgcttctagagtaagtctcacatgttgaaatacatggagtgggtcgttttaatcggtttctgtctgaaattatatctaaactctttatctttcctatctatttattcccaaatatttattcagttattcttaaaaaatgtatttttgctttggcttgaaaaaaaattttagggagacttttaagcatcttacttcattataaagatcagttgcttgactttgcatgaagcagattgggcccttctagggctgacaagcccgtgcaagaccacccgctcctcagtgttagtagcgttcccgtctcccaaaaccatgttctcccttgatgctaatggccgggagcacaggcaggtgtgtcgtctcactatggagaataatatttgtgtcattctttacagaagaaggtagcttgccaaactgtctccatctttcccgattcagtcttttgttcaagtaattcacatttttagattttttattggtaatctgagacaagaagaaatttaaagtaatcttcactaagccatgaaagctcccaacattgttctccatgagagatgctggcctgcatttattcaaaaacaaaagacccctctgttgccaaagctcggagggcttttcagaaacgatatagttgtaaattataattttgaatatataaagcaaaaaaatgaaaagtgagaacttccaggctttggattgttgtaggtgataaatataaaatgggatttctggggggctgctactgagatgaggggatggcagaaaacatggaagcaaggtctctggtcagcccagggtgctgggcttgtcccaacaccacgtaggcaataagaggacagtacagggtgccgtctctctccctcttcctctctctgtctctctctctctgtgtgtgtgtgtgtgtgtgtgtgtaacactaccttcccaatttttactgtctatttgtattcaaagataaggtccttatgaaaaatacactgctctgattcactttaaaacttatttccatatttattatttattgtgggaataataatattcccaatattattatttattatttaagttattattattaacttccctctgaggttatatattggttactcacaggtgaaatccaaaatattctacaaaaggtaaatattcctttggtaacaaatgaagaatgccagaaaagatatcaagattataaaataacccaacggatggtctgtgctggctataaagaagggggaaaagatgcttgtaaggtaactcatgagattatgaaaaacacaataggctgcttgagaaaattcatttcaaaatatattttccaatagcataattcaatcatagtttttaaaaaaattcagagacaaatgatctgataaattgataagcaacttttaacaaattgaatatacataatatatatttatattatttatgatatatgtcacaatctatgcatgtgctatttaagaggggcaaatatacatgcaataattgtgctagaatataaaaacattagacttcatcattgggatgatgatatcaagatttctttgttagatttatttcagatagaaaaggggatacgaaaaatgcaggcacatgagatacttggagaactttaagaaagagtgagtgtgtgtgtgtgtgtgtgtgtgtgtgtgtgtgtgtctggcaagcaaggtcttgcacacacacagcactttgggaggccaatgcaggtggatcacttgagcctaggaatttgagaccagtctgggcaatgtgatgaaacccatctctacaaaaaaatatgaaagtatctgtgtgtgtgtgttgctgtgtagtggactacagaactttagaggcagtcacttatttgaatcccattgtcgtaactttctactattttatttttccactgtgactcagggagattcaggtggtcccttagtttgcaaacacaatggaatgtggcgtttggtgggcatcaccagctggggtgaaggctgtgcccgcagggagcaacctggtgtctacaccaaagtcgctgagtacatggactggattttagagaaaacacagagcagtgatggaaaagctcagatgcagtcaccagcatgagaagcagtccagagtctaggcaatttttacaacctgagttcaagtcaaattctgagcctggggggtcctcatctgcaaag

SEQ ID NO: 15644 - DNA, 49491 bp, Homo sapiens
ttagtgaagattgtgaagtgggtaagtatgctatacctaaagtagaagggagagggaaactttctaatgtctaccttgctccggtctcataatgtattgactacttcttgacagcaggttacagagttctaaaaggcactgaagccgtcatcattccctatgcattgcacagagatccgagatacttccccaaccccgaggagttccagcctgagcggttcttccccgagaatgcacaagggcgccatccatatgcctacgtgcccttctctgctggccccaggaactgtataggtttgtatccatctgaattggtttgacctttcaggcccacttgatggtgggtttctcacagtgatttctttgagatgtgatgtgacattgcccatatgcaacagccttaaaaaaaaaataggtggtttcttttttccctcactgtgctttgtagttttaaaatattacggtcaaaaggtatattagtatattcgcctgcatgggcttccatagcaaaataccacagactgggtggcttaaacagcagaaatttattttctcacagttctggaggctggaagttcaagaacaaggtgttggcagggctggtttctcctgaggcctctctccgtggcttgtagatgccattttctccttatgtcttcacttggtctttcctctgtgtgggtctgtgtcctgatcttctctccagtcagactacactagggcctaccccaatgacctcacttatacttactgacctctttcgattacctgtctccaaatacagtcatattctaaggtatggggggggcttagaatttggagagagacacaattacccataacataaaacataattagcttcatggtagagtttcaaaatgttgtagagttttaattacagtagaatataacttattgtggtaaaaactttattaatgattacttatggttaacctaatttttgtgtttattgcttttaagaatttcattttgcaaatcaaaacagcaaatgcttgccatatggccagctagtacttaagcaaaatgaatgcacatcaccaccctgcattataaacccttttggttttagtatctctagcattttgtcatttatgtaaatgcagacatcggtaaaatgaggccagagtgaaacgggtgaatctgaagcttttttggtgaatccatagtaaatgaaagacccactaagacataatctagggtagtgagtctcaagcttgaaggagctcaggatttatctggatcagctggagtacaaattctctgatcctccccagctatagatgtgcaaggtgggatcagggagggaaactcaagactcttcatctttaacaggtgttccaagccattctggttctccttccacctactgcgaaaatgtaaagtggctcgcttcctatgacaggacctcttgtttctcacatttggggtaaatctataactaaagcgatggtatctacattaatttgaaggtcaaaagtttgctgtgatggaagaaaagaccattctttcgtgcatcctgaggcacttttggatagaatccaaccagaaaagagaagagcttggtctagaaggacagttgattcttcgtccaagtaatggcatctggatcaagttgaagaggagaaatgcagatgaacgctaactatattattgggttgtgcctttatcatgagaaaggtctttattttaagagatccttgtcatttacaatttacagatcatgagttcaatatgcttgaatcccctagacctaatttttccttgatcccactgatcttgacatcaagtctaacaaagaaaaagttttgagttttgtattttcttttttcttttttctttattttttttttttgaaaccgtgtctcactctgtcgcccaggctggaggagtgcagtggtgtgatctcagctcactgcaacctccacctcccaggttcaagcaattcttctgcctcagcctcccaagtagctgggattacaggtgcctgccaccatgcctggctaatttttttgtatttttagtagaaacagggtgtcaccatgttggccagactggtctcaaactcctgacctcaagtgatccacctgcctcagcctcccaaagtgctgggattatagtcgtgagccaccacgcctggccagagttttttatttttatcaccaccatagatgttacagttggctgtggtcacaaaagtagttaattgtgtcagcacccaaataaacatctaacaggtttctcaacagaggaatccacagtccaattccacttcaattgatagacccaaaaaatataatttaatcaaagttctagagtttttgtttgtttgtttgagatggagtcttgctctgtcgcccaggctggaacgcagtggtgacatctcggctcactgcaacctccacctcccaggttcaagtgattctcctgcctcagcctcctgagtagctgggactacaggcgcctgccaccacgcccagctaatttttgtatttttagtagagatggggtttcaccatgttggccaggatggtcttgatctcttgacctcgtgatctgcctgcctcggcctcccaaagtgctggcattacaggcatgagccaccatgcctggcccaaagttctagaattttttaaaggtattcatggtgactcaggaatacacacatacacacacacacacacacacacacacacacacatacacacatataatttgaaagaggtgagtatgtactctgacttcagctctcaggttttaaaaattatattagtgggaccagttatgacaagaataatcattatagtacttttcagattttataacctggagcagattattttaagttgattagtaggttctgttacagtttttcttttgatcgtgcacttatagtcttcatttaattcctcatagaatcccagtcacctttatatatcatattattggaagagattcatcttcataatctccagttttttcacagtgcctcacagagttaatcatgccttttggagctagaaggactttagaacttatctagttatgctcctttatattataagtaagggaatagaatcaataagacagtttctgcccaaagtcatgttaccagttggtgacagagctggaaatacgtagagatctatacccttaaatctctccactcacatgctgatatactttctactacaatatgctatagctttatggaactcagggtgatgatcagacgtgtcattagaacatgagtcctctgcttctgattcaggcatacttttgggattcttccatctttaaaggaaaaaggaagccattcatctatatttagtaacccagtaatatctcacttagtttagggttagatctttagttaattcaaccttatagatcatacttatgaaggtgataactgacacgtgttcactgaattttaatttgataggcaatacatctacccactccattattttttaaaacttcatttaatagtttaaacaagattggttttgttttcaatttttattcactcttcatagaatcacaattacctttatatatcatatgttattggaagagattcctcagtaatctccaatctctcatagtgcctcacagggttggtcaatggcttttggaactggaaggaccttagaacttatctgttatgctcctgatagccaatagcagatagaagcttgcaatcaagagggtaggacatgtgttcttcaatggatatcaaaggaagaggttgcaaaccaaagccatttggcaagccctgtagcctgggccatttaagacaggggcggtctcagccaaattgcacccatttaactatcccaaagagccacagtgcctacaacccaggccctaagttgatgaagaaaaagtcaaggaaggaggtgatacaattggaaatattcccatcaaatggttaatcttatttagaaaatgggcatattagaaaaagtccttccaagatgattttggataataaaagttgtatttgtggaaattggtattatctctgttttatgcacttacatttatcccttacattttgtttttagtgaccctacatgacattaaatttaaagtaaaacattgtttaatgttaccttttggcttgagaatgtctttcagctccagaattattgttactcatattttaatcagtaagtcatttaagctatgacagagtaggaattgagaaattatttcatatgctacagtattgaaatgtggatgctgccttgttttataagaagatgatcaaggtttgtgtgcccattacctttcctctgcctgaaagacgtgtctcaagaaaaataaattctattttagatgcaggtactgcattttattctaagaattgatatcaattcaaaacatagaaaactgtaaaagataaatcaggagatggctgattcataatgggtaataaaataaatagcactttcgagctgatgtcgtcagtgactcttggattttctaacaaaaggttcctttactgttgtcatagagagattgtgaatttctctgactctgaagaatcaactagaagaagtagaatcaccagaacattttgctcagctgaaagcacaaagtaaactcagttactgggaatcagcaaaaaccacaggcatcactggtcccagggatttagagtccagaaacctctccaggtgatggactgttgatttggggctctatgcattgtcacagacagctggggatatcagtttctggaccaaatgacccaataagagatgctggtcgtaaaaatccatttttatctggaatgtttctagaagatcaaaacctttttccttccagcatctaatgcctgagtgatacatttaaaaatttttagtctgcgtgggcaccctctttttctaggagcagcactttttatttttgaaattatcctacaatgaattaccggcttttcttctgttctcatctttttccttccccagcatacacacactgtaaatatgtgccatattcttaggcaatcccactttctcaacctttgttgagtgacccaagcaaggttaaattcgagttctccccaacgagttttcccagctgcaattgaagaagagatacagtccatctctgtggtggaaactccaggttgtgaaactcaagatcaatcagcaatagaacctctggagcagctgctgggtgatgagaagaagcaggcagaagaaatggacagaatcctggaggaacctgagtcccacatggcaggtgatgctgaggctcactgcatgtctgccctgctcactcttcagtgggtccaccctacttgggaacccaagagccagtatattgccgtttgcttaaaaggactgtctttcatttatgaccaaaagcgagttagtgtgtgtcaggtcagccgaaggatgaaggaagggcccccattctctggatatgatcttaggtcttcaccctattttctttgtgctgttcaataattctctgtattggatcatcagcatatatgcccaccagtcctttaaatgcaataccatttaagaaaatgcagagttttctcttttctagatagtaggaaagttaaagttacactgcattgttttagaagacagctaggcttaacctaacacatcagtctagttttttggttctgccatgatgactttctggactaattagtcatttttctcctctaattaaaccaggttcattttcctgctggctagctgtatgccacatttcagggataaatctctcatctctaattactaaaatggactcgttgcatccttgcctcagtttcttgtccagaagttcaccaaatggttatttccttgggctgaattcagttttggaattaactccagcatttagctgttgatcttgttctctttatcctagtagataagtttttggcacgttctttctccttcccatcattatctctcctctttacccgtcactttctttctgttgtggtttgcatttattgatctctgcctttcctgatactactcaatttatgtttcacagaaataacggctgtacttaaatgaaactcagattcctatataaaaatgttgggataactttgttccttcagtaagggtcatacagacattatagatcttatcgggaagaaaaattatcacaatatttagacatgactgtcttattttaaaaatgttttcagtttactttcagattccatatatagttttaaaatacatgttttagctgaatagtaaaaaaaaaaaaaaatatgtaggcacaggagtatctattgggcactcctgggaaggagagtagcctttctttctctttctttctctttctttctctttctttccttctttctttccttccttccttccttccttctttccttgctttcttctttctttccttgctttctctcttgctttctctctctctctccttgcttgcttgctttcctttttttttttctatattctacctctaggctttgcgtccttgcttgcgcaagtcaagcccaagttttaagttttatgcttatggaaatacagtaaattaagacatttatttatttatttatttatttatctatctatctattttttgagacagggtcacctaggccggagtgcagtggcgcaattgtggctcactgcaaccttcacctactgcgctcaagggatcatcccacctcagtctgctgagtagctaggactacaggtgcatgccaccgtgcctggctaatttttgtaatttttcttgtacagttggggtttggccatgtttcccaggctaaattaagacatttaaatcactcaggcacaactaattttttcatattgccacatcttcctaggagtgggattgtgcttcagttttttcagctgtctatgccttaattttgactcccatcaataatgcttgatgttgtagccagtgttggtttattattaccaaaagcaatgctgttctggaaaggcaaggactgcagtgtctcatatgatgcaattggacggaacctcaagacgacatttgctcccagcaaagggcattcagcagaacaaggaccaatcagaattcatccaacaatcattttcagtgtcatctaagactggcaggtaatagcttacatgtgcgattgtgactttcatgtgaggatgagatggtccacaactgcggggaaagcaaccttcctgtcctcaatctcttgtttttaaaagatatttcattccttattcatgtgcttatttatttatcgttttactctttcattcataaaagtctgccaagttctattgagggagctggggaaagacagcaagcaagccccagtcctaccagcaaggtgttacagacagtgggcgtctgaaaaacaacagagaaatggacaaggaggtaacagaatggcagggagtgagaagcgttacgcagaaagacaaagaatggtgaagagacaggaggtggaagagatggaaggtgccttttcagatgagatgcttgctggaggatggtatcctgaggagatgatgtttgagcagtggtctgattgaagtgagtcacgtggggatctgggacaaggggaggtggagagggctccatcctggcacgtgtctaaggggaggttctggagaaaaatcctctttcaagcacgtgcagtttgttggaatattcagtgctttgggatggtaggggtgaaatccccatgttctttttggctcttgtccagagatgactctcaggtccttccccgtgacccatctcaaagccagcgctggagcacttccctgctgtcaatccctcttaacgctctgaatctctctgacatctccttatgctgaccgcagaggaaaactctgcttttaatgggctcatgtaataagatttggcccactctgattgactccattttgattggcacaaagccaagtgtttagtaatcttaaccccatctgcagaattgcttttctcatgtaacataatcatgggcagatgtgatatctcgttttattcactgtccccaggatttgagtgggagatttgggagaatgttttagaattctacttaccacgcctcttttcaatttagttctgatttggttcacctgaatctacagaggtttttttagttttattgtgctactagaatgtaacatgtttcactgtaagaaaactccaactaaacctagaagcatatttaaataggttaaaagtctgtaatctcaccttttagaaaaacaaaccctgagggtttctgctgtgatgtgaaggcagggtgcttttgtcccagttgttttgttgttgttgttgttgttcttgttttctgctgagcctggtagctgatgaaatctaaaatataaactcttttctactgcacaaagtggagagatttgttgactactgctgcaccacttgatatcctaaaagacagcacaacatgcatatttaaaatatgctacttccttctcaccagaaaatattttattggcaacattatcctacatttctaataaatgtagttctgcattccagtaatatacataaaatatttatttaagaatcgactccaaaaactctaatgtactaatcaagatgatatactgtaatttcaaagaatagaaaacaaaggagatttagtgggcaggtcattgtggtctttaaatattttaaaagcagaaaaaggagaatcagttgttttgtgtgggtctagtacgtaaatctaggactgaaggatagaagtttgcaaggaggtgtatttcagtatacaggaagtttttttcttttcttaaaaataaaattaaaatagagctccctgagctctgaaataaaataaaattaaaatagagctccctgagttggagcaggctgcttaggaaaccagtttctcctcagtcgaagtattttgacaggaaggtctaaagtctatgtcagaagtgttatccagcagatttcagccaaccttatctgtagagtcagatagtaaatcttcttggcttttgaggccatgctgcctctgtagcaacttcttaactctgccattgtaaggtgaaagcaggcatagacagcaagtgaatgaatggccatggctgtgtttcaataaaactttatttacaaaaacaggtgcaaagccaaatgtggtctgtgaactgtggtttgtcaagcctgatatattgcatttcctgaattgggtgggaataggacctaaacatcaagccagtcccttccaaatctaagatttcagtgttatatgattctttggtagggtgtaggaaggcatagatatcatttgctaaaatatccctctaggaggagctatccatacccatccattattcactgtgcctgcaagcaactctaataaaaaaaagttctgttagatgaggtttcaactacatgccactaaatactgggaatgttataagcattttttaaaatggaaacctgtgcataaactgtgtgaccctaaaatgaaattagggtccttttgagtgcagcatttttctacctttttttatgtatcatttacaaataaaaattatatatatctactgtgtacaagatagtgttttgatatacatgtacattgtgaaatgattaccatagtcaagctaattaacatgtccattattttacatagtgtgtgtgtgtgtgtgtgtgtgcgcatgtgtgtgtgctgagaacccatcagatctattctctagtgaagttcatgtatacgatacagtattatgaactatagtcaccatgtttgcattagtcagggttctctagaaggacagaactaataggatagatgtacatataaaggggagtttattaaagagtattgactcacacgatcacaaggtgaagtcccacaatagtctgcctgcaggctgaggagcaaggaagccagtctaagtcccaaaacctcaaaagcaagaaagtcaacagtgcagccttcagtctgtggtcaaaggtccaagagcccttggcaaaccactggtgtaactccaagagtccaaaagctgaagaacttggagtacaatgttcaagggcaggaaacatccagcacaggagaaagatgagggccagaagacttagccagtctagtccttccacgttcctctgcctgcttttatcctagcccggctggcagctgagatggtgcccacccagattgagggtgggtctgcctctcccagtcaactgactcaaatattaatctcctttggcaacaccctcacagacacatccaggaacaatacttggcatccttcaatccagtcaagccgacactcaatattaaccatcacaagtccaccccttgtctacttgaacccatacgcatctcctgaaatcatatataatcttcaaataaagataataataaggtcataattatgttaggtaatacataatacagctatccttcgtacaaccagaagtgtaccaatccccaacccaaatgctgttacataaagttaacaacatttaaatgctgatttgaagtaaataaatcttatgtcacatgataaaggaaaaagaaaggaaataaaatgaagatattttcttagtacaagtgtatacatacacaaacatgttcctaacaaaataaggaggaaatatgacaattacagtcctcatttctgcagctggtcacgtgggcatagccggtattgatgactaccttcttctactacccattctgtattccttttgccttcagcaagcatctcagcaggttgtggttttttacctggtggagtgacccaaacattcattcctaaggggtctgggccttatgtagcactgcctggattgggctgttgtagtttcccattgaccttaatcacagggcatggtaatactaagagttgcctgaagggatctcctgtattccttgcatactcttccttacctccactgtggagtaatagactaacttcatcttgatagtccaggtcaatcaccacagccaacactgcaactcccttctgagcctgttgacttagaggtaaaaggatctcaaagtgtccaggtggcaagcttaacttccagtttaatggaatccttgttgtgtcttctggtggcagcatttttccctctgaaactaacacaactaagcaagcagaaggtaatgtattgggaacaggaagcaaaaattttgctagtggatagctaggggtgatggtgagtggtgccacttccacttctgccccttgattcctagacctgtgaatcctggctatgggagaaacggtgccatatattggatgttgattcagagcatacatagccttctggagaattttgccccagccctgcaaagtattgtcccctagttggcattgtaattgtgacttcaaaaggccattccaccgttctatcaatacagctgcttcaggatgacgggaaacaatgttgtacattagatcctccaacttattcacactgcataattggaactttggaccttttgaccaaaaccaccccatagctggcactccccatactctggctaccaccattctactctctgttagcatgactttgacttttttagattctgcatgtagttgtaagtgcctctcttcagatgatcatatgatttttatccttcattttgtgaatgtggtatatagcatttattgagttgcatatgttgaaccatccttgcatcctaggctcagttgatcatgatccttttaatgtgttgttgaatttagtctggctaatattttcttcaggatttctggatctatgttcatcaggaatattgatctataattttaattttattttattgtgatgtccttgtttggctctgctatcaaagtaatgctggcctcattaaatgagattggaagtgtttcctccttttcaattatttgaaagagtttgagaaggattggtgttaattctttaaatgtttatagacttcaccaatgaagacatcaggtgctgagcttttcttagttgagagtttttatttctgattcaacctccttactcattattggtttgttcagattttctatttcttcctgattcagtcttggtaggttgtatgttcctaggaatttatctatttcttctacattatttaattagttgatgtactgtttttcatagtagtctcatgattttctgtatttctgtggtatccattgtaatctttcctccttcatttataattttatttgagttttttttctttttctcctaattaggctaaagatttcttgatttatctttttaaaaacaataacagtgtcattgaccttttctgttgtttttctagtctctatttcatttatctctgctctgatctttattattttctttcttcctctgtctttgggcttagttttttttttttactttcttattgcttcaggtgtaaagttaggatatttcagatctttccattttcttaaggtaggtatttatcgctataaacttccttcttagaactgcttttgctgcatcccataaattttcaatgccacaaattttgtttctcttttcatttttctcaagacattttttgattttccttttgatttcttctttgactcattggttgttcaggagtatgttaattttcatgtatttgtgaattttccatttttccttctgttactgagttctacttttatgccattatggttggaaaagatacttgatatgatttcaatccttaaatttgttaagatgttttccatggcctaacatataacctatcctggagagtgttctgtgtgcacttaaaaagaatgtgcattctgctgcttttgaaaggaatgttctgcacatgtccgttaggtctattggtttatagcattttgaaatccacagtttccttgttgattttctgtccaggtgatctattcattgttgaaagcatgttgctatttatttctcctttagttatgttaatatttgctttatagatttagatgcactgattttgggtacatgtgtatttacaattgttatatcctcttaatgaattcacccttttaccattatataatgaccttctctgtctcttgtgacagtatttgacttaaactctatctcatctgttataaggatagccacctctgctttcgtttggttatcatgtgaatgcaatctctttttcatcccttcacttccagcttatgtctgtccttaaagctaaagttagtctcttacaggcagcatatagttagatcttgttttttattcactcatccactctctcttttgattggataatttaatacatttacatctaaagtaattattggtaggtaaaggcttactactatcatgttgttaattgttttctgattgttttgtagttcctttgttgcttctttttgtctcactgtcttcctttgtgacttaataacttttttggagcaatttgctttggttcctttctctttatgttttgtatatctactacagactttttctttgtggttatcatgaggtttacataaaatatttcatagttataaccatccattttaatctggtaacaactttgactgcatttaaaaatactgtattttaacttctcctcctcccacattttattattcatgccatagtttatatcttttgtatgttgtgtattcattagcaaattgttgtagttatagttatttgttaatacttttgttttttaacttttatactagagttaaaagtgactgttgcacaataacagtattggagtattctgtatttgactgtataagaatacctttaatagagttttattctttcatttgttttcatgttagttagtgtccttttgtttaaacttgagaattccctttagcattttttgtaaggcaggtttaatggtgttgaaatcccacagcttttatttgtctggtgatatgatttgttcctgaacttccacccaaatctcatctcgaattgcaatccccaggtgtcaaaggagggacctgttgggagatgattggatcacgaggtgttttcccccattatgttctcatgatagtgagggtgttctcatgagatctgatggtttaaaagtggtggttacccgtgcgcacatgctctctctctctcctgctgccttgtgaagaaggtacctgcttccccttcaccttccaccataattgtaagtttcctgaggcctccccagccatgaggaactgtgagtcatttagacctcttttgtttataaattacccagtctcaggtgatatcttttagcagtgtgaaaataaacaatacagagaattggtactggcagagtgaggtactgctataaagacaacctgaaaatgtgaaggcaactttgaaactgggtaacaggcagaggttggaacagtttggagggcttagaagataggaagatgtgggaaagtttgaaacttcctagagacttgttgaatggttttgaccaaaatgctgatagtcgtattgacaatgaagtccaggctgagatggtctcagatggagacgagaaactattgggaactggagcaaaggccattcttgctatgctttagcagagactggcagcattttgcccctgccctagagatctgtggagctttgaacttgagagagatgatttagggtatctgtcagaataaatttctaagcagaaaagcattcaaatataacctggctttttctgaaagcatacagtcaagtcatatgcgttcacaaagagatggtatgaaattggaacttatgtttaaaagggaagcaaagcataaaagtttggaaattttgcagcctgaccatgtggtagaaaagaaaaaccaattttctgaggaggaattcaagccggctgcagaaatttacataagtaatcaggagctgaatgttaattgccaaacaatggggaaatgtctccagggcatttcagaggtcttcaaggcagcccctcccattacaagcccagaggcctaggagggaaaaatggtttcatgggccctgctgctctgtgcagccttgggacttggtgccctgtgccccagccactccagctccagctgtgactaaaagggtccatagctcaggctgtcgcttcaagggtgcaagccccaagccttggtggcttccacgtgctcttgggtctgcgagttcacagaaaacaagagctgagctttgagagcctctgcctagatttcacaggatgtgtggaaacacctggctgtccaggcagaagcctgctgcagggacccagccctcatggagaacctctattagggcagtgcagaggtgaactgtggggttggagcccacacacagagaccccactggagcactgcccagtggagctgtgaaaagagttcccccatcttccagatgccagaatggtagatccactgactggaaagttgcaggcactcagtgccggcccatgaaggcagccgtaggggctgtaccctgcaaagccacagggacagagctgcccaaggccttaacagcccacaccttgcatcagcatgccctgggtgtgagacaggggctccaaggagattattttggagctttaaaatttaatgacttccctgctaggttttgcatatgcttgggacctgtggcccctttattttggccaatttctcccatttggaatgggaacatttacccaattcctgtacccacattgtgttttggaagtaactaacttgttttttattttaaaggctcattgagggaagggacttgccttgtctcaaatgagactttggactcggacttttgggttactgtggaatgagttaagactttgggggactgttggaaagacatcattggttttgaaatctgaaaaggacatgagatttgggaaaggccaggggaagaatgatatggtttggctctgtgtcctcatccaaatctcgtcttgaattgtaatccccacatgggattacatgggaggggcctggtgagaggtgattggatcatggaggtggtttcccctgtgctgtgatctcatgatagtgagggatttaaaagtgacagtttcccctgcacatacacactctctctctcgtatcaccttgtgaagaaggtgtctgcttcccctctgccttccatcgtgattataagtttcctgaggcctccccagccatgggtaactgtgagtcagttaaacctcttttgtttataaattacccagtctcaggtagtatctttacagcagtgtgaaactggactaatacatctgggaaattctttttgtctccttcctttctgaaggacagctttgcctgatattatattcttggttgccaggttttgtactttcaatactttgaatatatcatcccactctctcttggcctacatgatttctgctgagaaatccaccaataatcttatgaagcttcccttgtatgtgaagaattgcttttctcttgcttctttgaaaattctctctttgtcatggtgaggatttcttttttttttttttttttttagatggagtctagctctgttgtccaggctggagtgcagtgtgcagtggcgcaatctcggctcactgcaagctccgtctcctgggttcacaccattttcctgtctcagcctctggagtagctgagactacaggtgcccaccaccacgcctggctaaattttttttgtatttttagtagagatggggtttcactgtgttagccaggatggtctcgatctcctgacctcatgatccacccatcttggcctcccaaagtgctgggattacaggcatgagccactgcacctggccgaggatctctttatatttaatctatttggagttcttttgggcttcataaatctggatgtttatttcatttatgtctccaaattttgagagttttctattcttatttttttaaataagtttctgcaactttctctttctctacttcttctggaactcttctaatgcatattaattttcttaacagtgtcctataagtcttgtcagctttctgcaatttttatcattccttttattactctgactgggtaatttcaaatgacctgtatctgagcatgctgattctttctcctgcttgatctagtctgctgctgaagctgtttgtgaattttttcaattcagtcattttgttctttagctccagaatttctgtttcattcttttttatggttcctatctatctttttgttgaacttctaattttgctcatgtattgttttcctgattttgtttactgtctatctatattgttttgtagcttattgagctttcttaaggcaattatttttagctcttgtcatgcagtaaagatctccatttctttagggtcacctcctgctgctttatttccttcctttggtggtttcttgtttccccgattatttgtgatcagtgtggccttgcactgaagtaggcacctatttcagtctttacatactagcttcagcagagaaagccattcactagtcagattgaccagagattgttggtgggctgtctgttggggtctatgcacaggatttctgctggagttctaaggtgggaagggctggattctgggttcattcactgtggttgtctgtattctgtgcacaaggactggcttgaagcatggatccttgggggctgacttggcactgaaatgagccttaagcctgcgtctgcaggggccagcctaacatggggatcacctggcacctgagttcatggggataggcctgttcctgagtttattcaggctgtcctgggaacaaggtccactggggtgagcccagcatctgggtccacatggcccagcatggagccaagatctctggaggctgacctggtgctggatctgcaggggatggcctggattctaggcccatgggtgccaacttggagcctggggttgctggggctaacgtggaggctagatagagtcttgggggccaggctagagctggagcaggcctgaagtctaggttttgtgtggccatcttggagcctgaagccccaggggctgacctggtctggggtgagcatggggctgaggccacagaggctggtctggcctgtggcaggcctgaatcctggtgctggggtttactggagtgggcttggtgcttgggatctgtggtgaagttaggttctatcttaactgtccctcctccatgcaagagggcatctctctccatactgtgctgcccaggcttgaaggtgagatgacaccggtaatgtgaaattgtccttcctatacacttctatgtgtcttttcttatttctgtgctgcaaccaggtggcataacctctcacctgattccttagctctagtgaagttattttcgtgcatggatacttgttcgaattgatgtttctgcaagggatgagcgctagaaactcctgttctgacaaactcctattcctattcttgctgacatcactccctgaaatagttaatatacttaacagctgaacacggataggatgttcatggaatatgttgacaggacaaaaagttgaaactgttggcagaaacccaaagtcaatattgaagccaagcaaaatattgcctgcagtgccacattagaacagcttgaagaccgttcatttttaagtgacaagagactcacctccaagaagcaattgtgttttcaggtagcaaatttttattattctgattgtttccaaataaactataatttttaagtataattttttactttatgagaaaattaatcatttatattctaatttcctgagtatgtagagagtatagataatgttcctttatgtagaaatatttaaatgtaagatgattttaaatcagaaagaatatttgattgatttaaaatttttaaatgggctttaatattttcagaggttttctttacttagggatttttggactgacattattgccattatttattaattttgtttttgcccaaatcaagaggtttcataattgtttactctctctctaccaattccctttccaacattactagccacagagttggccaatgaacaataaacacaacagtagtctggaggtctcaatttgtatcttgggaagcattataaattttccaactccctagacacaaatgtaccaaaaaaaaacccttgttttctataccagtaattgtgtgctttgtcttgcaattcagacatttacaagaaaatctaaatcaccttaaattaagatttatgttaaatgtggtctaaaaccagcagagttatgtattgttttcttttttagaatgattttattcaagcaagcaacttatttcatttccttgtttgctacagtttcctgtggtaagtgaattatctataaaacatggaattcaggctaagacaggagtagccaagcaagtggcaccacccctggagaaagctattgaacatacagcttcgggggtggagattgtccctgatgattcaggacacgtgtctatttaatgttccacaacaaggaccacttgtcaggtatattgctgtagacatatgttgcagaccagaggaaggagctcagaagtaggaatgtcttgggacttgtgttaacaaaaacttctgttcgcagatgacactctgcaaagcaaaacttgaaacaaaaaaaaattagtcctctatttttattatcaacagtaaaaaattaaactttatctgaaaattcaaaagagtgctaggcattttatagtgtctgggtccaatccaagtatctgttaggaacaccatacatagttttactctggaccgctagggaaccatttcaaaaatgaaagtaactggtttaaatttaacttagcaaaccatgcatttggatagttctaggtgaatagctttcaacaccagatttagatctcatttctctattaatttcattaatttttggagaataaaaatgattctggacatttcattaatcattacagagggagttttctctgtgtccccacaaggcatgattctgggtctatggtgacttaagagggccacacaacaatgagtatttaattttcctcagatgtatggctacaataaacatctataggtaaggtttacattcataaagagacctttttttttccaggaaaaaagacttttattccccctaaatcacaactcccctgtgtctgtccctcaaccctgatttctcttctaaaccgtaatttacaaacccatgtgcaaacccactgaaaggtgagaaggagcataagccagagacactgggaaccacagccaactacagggggtttttcatttttttgttttgttttgttttttggcaaaataaatcatgattatggctaggaaaatcagggatgtaagtaagcaaaaatttagaaactacatattgcatgtagtccccaaattcagaaacagtcatcgttaaacatcttttatttagtctttcagatatttttctacatatacctatttgcacatttcacaaaaaagagttattaactgtggacactctttgacttgcattttccacttatagctatcttttggtgcaaataagtaatatattttggagcttgctattcttctctttttatggtatttttgtgtgcacattcttatgctcttattcagttatttctgtagaatacaatttttgaaataaaaatactagattcaaaggtgtgaatatttttgaaggttttgtggtgtggtatcatgaaattaggtttcagaaagtttactccatagttgactttttctaccagctaataagagtgctcatttaccccacttaggccaactctaacaggcttctgttgctttgcatcctgacatatttatctttctggaaacagtgtcctaatttatttctgcagagctactgcctctcagttttggtccatgtggttctggtgaccctgattcttctgctgaaccagaaagtgcacacatcctcctggctgtggtgacccaatcagagccaacgtcttgcaatgaagcttttctttagacatctagaaataagactcttatgttttttttttccaatttgacttgaaacttaagacaatacacaggcctgagttgttggtactattttgctactacgtggagcttgagagtaatggtaacaccaagactggagcaagtggaaggagacatattgtccactgatgctatcagttgagcacaatgtgcagttactttttaagccagattcaccatgggctttttggctcctgaaccaatagatttcatttgttttcaagccactttgtactaggttttccatcatttgcaatcaaaaccagtatacaaacactggttatttaatttttcatttttgctaatctcagggataaaatggcttctagttgttttaacttggctatatttgtgattcttcccattttcatatacttactaatcacttctatttcttttgtaaattatcttttcatatttgttatctaattctttaaaatttgagtactttaattctcattattgtttgtggaattgttaaacaagactgaataatctgcccaaagtccatggacatgggggcccatgtaaaagctttgaaagccaccatcattatgagataaattatataatagtactttacataggctccaaaatacagcacagacacagctatcattgtcatggtcatcattatcatcatgatcaccaacttatgaggataagcaagaacacctactagaagtttctttccattcagcaacaaaattggtgtctttctagtcactcccttccctgactgtcacatagcagttcacagaggctcagttgcagaatgagaagctctgggccaggacctgccattgtatgcatccttgcatgggaactgggggctggaagaggagtgactgcttgataattatgagtcagtcaaaaccaccaactgtctgaaaaaaataggcctttttgtaactagtattgtcactaaaccaactcctccatgttttgtgcatacatgaaatctaggcaatacacttgtattcccaaaagcttccacttgaagagatctgtgctctttccaaatataaaccttacccgagaggtggtcatcttggccacacctcagagagggagagaggcagtcttgttgggttgggtggtcataatggggctcagggccaaatccccagggggtaggatagtgcagagaagatggcactctccagtgcttaataaaatgcacgtggtctaagctgcccactccctcaaaggcaataaaaaataggtactatttaaattgaagagtaactactgccccagggaatggacaggttgtcattggaatagccatggttaatggtcccagttgacaactgaaatgaatgtgctacctgaacaggaaagcttattaaccagatttcaaagacagtctttcccggtaaatccaaatttacaaattaaagccagtaaagacaccgaattctctaataatatgtggggtgcagtatattttagagctgggaataattccaaacagcaaatagttcaaaatttattttcaatttagcatatgcatgcatttgcttaaactgtcttaaaaatgagtaaaaaatactgtcagtttgtttcaatcatactgagatgaggaacaatgtttagcattgcatgctagaaaaggacacaggattgggagtcagggctgggtgaccgtcacaggactttcactaactgtgtggatcttgggcaagtctgtgtgccctgagactcagttatttaactttcttttaaaaaacatagtccagatgcagataacaaagcctgcctctaatttcccttacagaattgtgagaagctggtggagatgtttgttacaaaagtgttttgaaaatagagcaaatattattctttttaaggcatgatgttttcatagcatgtcaggcaacaggaaaaaactaagttaggattttattttattgtggggaatttatgtgcaaattattgtgcaatttaatgaaaataagccaatgttttatacagaagtacccagaaaattaaataacactatacattgttcaaatagttgccttaatatattttattttctcagcataattagagttgtattatacaggtctttgagtagtcagtcagtgggagaagttaagacaacagatatctttttattaaaattattatatgaattatcgcaaattaatttttatggttctgtcacaggatgtctgactcaactctatgaaaacgccttcttcagaggtggggatgtagcttccatgtacaccccaaatgcccaatactgccagatgaggtgcacattccacccaaggtgtttgctattcagttttcttccagcaagttcaatcaatgacatggagaaaaggtaaaagttggtatttcattattggagaagctgtttttcaaaactgaatcagttttgtgcagaaaggtgtagtataactgagagttcttcctcacacggggttcaaggaccagcttcagcaaaatcccgtcaagtggttcttacaaatgcagattcctaggccacaacccagatctgctgaaccaaagtttcttgtgaccaggaatctgcattttaaacaatcactgtgtttctttaaagtagtagaagctagtcattttctattcaaagcctcaaaatgcttgaatatcattgggctaagggattgtctcaagaaagagtctaacaggtgcacatttcatctgaataaagaaacagatttaactgtgtgacccatgatcacattagcggatagcacagtccaaagaaaataacataagacaagcattttgctgagaatgtaattgagaaagatctagaacttgtgattttgggacagggcagttctaaatggggcctatagtgagccagtttgggcacctgtggcatgatgctatgtatggtgtgtgtgtgtatgtgtgcttgtgcttgtgtgaatatgtattattaactggaaatttgtaaaagtattggaaaaatagtacttacgattttgtgtgtgtgtgtgatggagtctcgctttgtagcccaggctggagtgcagtggcgtgatctcggctcactgcaacttccacctcccaggttcaagcgattctcctgcctcagcctcccaagtagctgggattacaggcacgcaccaccacgtccagctaatttttgtagttttagtagagacggggtttcaccacattggccaggctggccttgaactcctgacctcgtgatccacctgcctctacctcctaatgtgctgggattacaggcatgagccaccgcacccagcggtaattacaatttttattaggtcagagagatgcttattaatcacgagccacagtttcatcttaatgatttttccttttgattaatatccagagtaagcttttctttgttgttcccatttccatgttcataactctttactcatcttcactctatgtgagtttaccaactagaaattggatagtcattctctgatcccacatgttaaacttgtagagaaaactcagattgtatgtgaggatcatcatattaaaagtggaggaaggttctagaattcttataaataatgaaattaacatgaaggtggacatctaagacagagggaagtcttccattaagtgcagactacaaggagttaataagcaagatgaacacgatatacaaatccagctcttatcactaagttaactttttaagtaaatgaaagtatttgcaaaaataattaccaattgagaacatagttgcctgaaagtttaagaacacaggaaaaatcattaactctttaatatggttgatttcctgtacttaaaaaatgtgagtgtaaagaaaacgcagtgatggagttagatattatggggtgttataaaattagctctaagagtgttctttccagcaagtattggggaagctatattattttccttattcctggttttatttgttagtgtgtagaaaatgctagacatttcctcaatgtatgtttattattctacttcctaagtaaagctacttttaaaataggtttggttgcttcttgaaagatagtgttacaggaaccctgccaaaagtacatcgaacaggtgcagtttctggacattccttgaagcaatgtggtcatcaaataagtggtaagttgtgaatttcttagctacatttgagttaatattggatctcgcttagaacagcttttgctcaaagtttgtactgctacagctttttggaaggcatcactcataaagataggagatggggcagtattctggacacaaaagagggacccatattcatctggacacttctattgtctttataaatcaacacatacttaatgagcctctattatttatgaggttagcgctcaagtgtaagatttgcagaaaatgaatccaaataattgtgtctcgtttccagataagaatttttaagaaaacacaagggaacatctctctcaagttcacttgagggtaatttttacatcagtgattctcaaccagcagtgattttgtctcttccactggggacatttgacaatgtctggagacatttttggtggctacaactagggaggatgctattagcatttactaagtagaggccagaatgtttgaatgctgaccaacattctacaaggcacagggcagtcgtccacagcaaataattttctggcccaaaacgtcaacagtgctgacatcaagaaactctgtgatataccactaggcccaaattgaagaactgagttctgcaaatcttgctaagaataatacttcctaaaggaaacttgaggactaggatgctagagaactttgattctgacatctgaagctactgatgtcttgggaaacagtttccaatgctatcctaataaatttaagacaaatgaactatttctcaaacatgactgggactgataagaaagtgaaaagtgctgaaaagattcaactgatgggttgtcagaatcttaaaataactgctgttattctatgtatgactatatatcattactattttattttcattatgcacaattaattttgtaggttcaaatttcagatgtttttaaatttgtcatcctttcctccctcattgatatcacctcttcaatacgtacacactttgagcctgctgtttgcattttaaccagttatcaaaggatggcaatgccttcattataaatgtgggcctgacttagccagtataataggtgtagtctacgtgaggtggagtacatttcctattttaaaagatcaatttttatgttaatccaatttggtataaattattcgagtaagtgctatttctgattgttgtatcttgtagcaaaatttaaagaaaaagtaatttgtgcctttctcaatattcctgttattgttcatgtattctaaaactcactgttactcacttagcttgcttttaatgttttttaaagtgaaaaattgttcccaagtacataaaatctctacactcaagaacaattctagtcaaaagcatttagagcttccgtatgaacacttaaagagtttttatttgtaagagtcgcatcccaactcttagcctgttcttttctcacatgcagaaaaataggaaagagacttcgtttccacagtctgcaaattcctgtgtttaagaaccacagtgaataatccacctccctgcccaactcatcgtactgtcatatagttttcctgacagtttgtgtattttctgtctttcccacccttaaatttagttttatgacttcaaccatacttcttaggagtggaaaggtatctgtagtagattatggtttattccacataatcttggggaataaaactttaaaaaagtatacagtttatacttctggttacattacttccttaaccaaaagtctaaccaagaaatttgaatctttaaaaaaaaaagaggccgggcgcggtggctcacgcctgtaatcccagcactttgggaggccgagacgggcggatcacgaggtcaggagatcgagaccatcctggctgacacggtgaaaccccgtctctactaaaaatacaaaaattagccgggcgtggtggcgcgcgcctgtagtcccagctactcgggaggctgaggcaggagaatggcgtgaacccgggaggcggagcttgcagtgagtcgagatcgcgccactgcgctccagcctgggcgacagagcgagactccgtctcaaaaaaaaaaaaaaaaaaaagagcctaattttgcttcactgtctgtgaaaagaattatctgtatcttttgcatgtaagacaaatctcaatgaaaagggtgcttaaatagaagttaacactattttaaagcaagaatggaagtggtttcatcatgcgtaaacaacaactctccacattttgtaatgattgatctggatgcaatttgtcatcagacaggagaagtcgaaagcaaagaaataacactgggagatagagaagctctttcattcaatgcgaaaggtcaaaggcacatcagtttctttaataatgcaaacctcagcacacattatcagtgtcctcattattattgccttgtttatttcccactgctcattgataatttcaacgtgaaatttacctgtattgctgcatgcatcttgcagtttaagaagtgaagtaacccaatttcaaagctagtgctttagggaaaatattggattgtatttacttcaagcagagttcgataatttatgtacataataaaaattttaaatcccttagttaatatagcagttgccaaaactgggctattatcattctaaactaccaacccaaatggtagtgggtatctaatctacctctagaaagaaaatggactgtatttgctctatgtatttttcttgtacagcttgccatcgagacatttataaaggagttgatatgagaggagtcaattttaatgtgtctaaggttagcagtgttgaagaatgccaaaaaaggtgcaccagtaacattcgctgccagtttttttcatatgccacgcaaacatttcacaaggcagagtaccggtgagtacaattcaaggtgtgtgttctttgtattggtgcctccaggatttcactgtattcttcttaacctcttttgttcccaaactaaaaaccaaacagggcttttattctaaccactttcctcatttacttactctattttatttttttatcttttatttatttatttatttattgagatggagtcgcgctctgtcgcccaggctagagtgcagtggcgtaatctcgactcactacaacctccgcttcccgggttcaagcgattctcctgcctcagcctcccgagtagctgggattacaggcgtccgccaccatgcctggctaatttttgtatttttagtagagtcggggttttactatgttggtcaggctggtctcgaactcctgatcttgtgatccacccacctcagcctcccaaagcgctgggattacaggcatgagccactgcgcctcgcccttcattttttaattaaataattcatttaatttcatttgtttctctactcttttcccctggcatgtaattgtaccgcatcttcaaagcctgacatcctcttcccctacttctccaaagctgattcttgcaggtctttcctcaaataccgtcccctccaaaagcccatttctgagcattctcttttaagtcacactcagctctgtttatttcattcatagagctaatcacaatttgatattaacttgtgatttttttccttatttttaaatcttatttttatttgcatagatgtatggggtacaagtgtaattttgttactttgatgtattttacagtggtaaagtctgggcttttggtatatccatcactggagtcatgtacattgtacccactaagctatttttcaacgcccgcccccttcccacctctctgtcaccttcccagtctctactgtctatcgctccatgctctactcaattttggtgtcattttttcctgaagcaaaattttggtgtcattttttctgaagtcattttctgaagtctgtgtcatttttcgctttcctgaagcgaattttggtgtcatttttcctgaagttccgtttgccccacacataggccttgcttatagaatgagggtttagtgtcacggagtctcctgcctcattctcaccctaacttttcctttacccctttgcgaggggaaggatgtccattaggttaataatgcagacccctaacccactcattatcagggtcattgtttttccactgtgcattttaatactaactgttacctgcactgctccctgcccctcaaagtgcagaaagcaaagtaacctcttttcttcccattcaggaacaattgcctattaaagtacagtcccggaggaacacctaccgctataaaggtgctgagtaacgtggaatctggattctcactgaagccctgtgccctttcagaaattggtaattgtaggactacttcactttgtgattgtggtaggtggaataggagcccccagagacgtccctgtgctgagccctgggacctgtgcgtgtgttcccatagctggcaaaagcgtttctgtcaatggcatgcagttacgggcttcgagatggggagtttactctggattttctgaatgggcccaatgtactcacagggttgagtgctcacaaggctcataagaaaaagagagaggcggaaggctcagagccagagagagaggtttgaaggtattacactgctggctttgaagatgaaggtccgtgagccaaggaatgcaggcggcctctagaagttgaaaagggcgaggaaagagtttccctgtggagcgtcctggaggaagaagccctgctgatgtcttgattttagcccagtaagacccaatctctagaacagtaagataattaatttgtgttgtttttaaccactaagtttgtggttatgcccctagagcagcagttataggaaactagtacagtgatactgttagagttataggacagtgatataggacagtgatactgttatagttataggaaactagtacagtgatactgttagagttataggacagtgatataggacagtgatattgttatagttataggaaactagtacagtgatactgttagagttataggtacagtgatattgttatagttataggaaactagtacagtgatactgttacaggtacagtgatataggacagtgatactgttataggaaactagtacagtgatactgttagagttataggtacagtgacataggacagtgatactgttatagttataggaaactagtacagtgatactgttagagttataggtagagtgatataggacagtgatactgttatagttatagaaaactagtacagtgatactgttatagttataggacagtgatataggacagtgatattgttatagttataggaaactagtacagtgatactgttagagttataggtacagtgatataggacagtgatattgttatagttataggaaactagtacagtgatactgttagagttataggtacagtgatattgttatagttataggaaactagtacagtgatactgttataggtacagtgatataggacagtgatactgttataggaaactagtacagtgatactgttagagttataggtacagtgacataggacagtgatactgttatagttataggaaactagtacagtgatactgttagagttataggtacagtgatataggacagtgatactgttatagttataggaaactagtacagtgatactgttatagttataggacagtgatattgttatagttataggaaactagtacagtgatactgttagagttataggtacagtgatataggacagtgatattgttatagttataggaaactagtacagtgatactgttatagttataggacagtgatataggacagtgatattgttatagttataggaaactagtacggtgatactgttatagttataggtacagtgatattgttatagttataggaaactagtacagtgatactgttagagttataggtacagtgatataggacagtgatattgttatagttataggaaactagtacagtgatactgttatagttgtaggacagtgatattgttatagttataggaaactagtacagtgatactgttagagttataggtacagtgatataggacagtgatactgttatagttataggacagtgatattcttatagttaccgtggtatagttatagttaaaggtacagtgatattgttatagttataggacagtgatattgttatagttataggacagtgatgtagttacagtgatataggtacagtgatattgttatagttataggacagtgatatagttataggacagtgatattgttacagttataggtacagtgacgttgtaatagttataggacagtgatattgttatagttataggtacagtgatgttgtagcaaaactgtaaggtcattccttggttgtgtccctatctagtgaaatgactctaccaggggtagggaaataaaactctgtcgtttcacacataaaggtaatttcaatggaattatccagaaaattgccatgacattccacctcatttagcatgtcaggatgttaatgacaagatgttactaaaagcaaatcccttacggccagttttccgcagtactgggtgctggctctgtgcctggccctgtattgggtgctgggctaggatttccctgtggaagattgggaaggttggttacaaggtggctattttcctgtctcctctttgcgacagcacaccttctccatggtgtgtgccaggttcacgtgtactggtgatttaattttaacgttcatattatttttttctgggagagtttttgaaggctgccaggaggcaggactcgatgcaaacatgctccattctgtacccagccctgttgctggaaggatttgctgcacttacccagggaacaggcaagctcgtgctgtggctctgggctgtcacagctgctgtccacacctgggagagcaccctggatggctcatctgtgtacttgctttcttgttaaattgcagtgagttcacatgtgatttaatcggatcaaatggcctttacagactgataaaaatatggctgtttcaggtggtgttttgagctgctaagggcgtggcttttcactgagtacgtggtccccgttcctcagggaacacccagtagccacatgcctcctaaacctagagtagggctgtctcctggcctaactgcccaaatgagattcataagttagggatgatctgtagttatcactacagatttgtccttggtttcaccaaggattttcctaattttacaaacaaaacccctaaggctcctggaaggagggtagaagtgaaggtgctccgggggcaacacagctgatgagctgaaccagaactcgacccttgggtcacacacatttcacagtgctcactccaccttttgtttttttaatggatttaatggtgttttaaagcctcctgcctctcaacacatatgaattcattatatttacagatttccttctcttgtggtccatcttcctgcatagatcttgagagatgtcaggctaaccacgtttcctcagttaatttaacaaaaccatttgcaactctgacatggaaaattcctaccatgtgacttattaatttatcaattgagatggtacacatattttcaagccaaaaggaggaaaacataaattggaaaaaaaaggtttttttatttttatcacctctggggaagaaagtctgataaacgaagctggttgataaaattgcaattaggggaagcaacatcatggtttctgttcggaggctaaccagatggcatacttgaaatagagaatgtcctagaaatcaactggttgcttggccaaaatatctataaatagtgcccaacatattagataggaaaagcaaagtaaaaacaattttaacaggttaggacattgggctgaagtattgcatatatttaatgtcatgtgcgtccgtgtgaagagaccactaaacaggctttgtgtgagcaagaaagctttttaatcacctgggtgcaggcaggctgagtccgaaaagagagtcagtgaagggagatggggtggggacgttttataggatttgggtaggtagtggaaaattacagtcaaagggggttgttctctggcgggcagcggtggggggtcacaaggtgctcagtgggggagcttctgagccaggagaaggaatttcacaaggtaacgtcatcagttaaggcaggaaccggccattttcacttcttttgtctttcttcagttacttcaggtcatctagatgtatacgtgcaggcctgggcccagaggcctgacattcctgtcttcttatattaataagaaaaagaaaacgaaatagtggtaaagtgttggggtggcgaaagtttttgggggtggtatggagagataatgggcgatgtttctcagggctgcttcgagcgggattaggggcggcgtgggaacctacagtgggagagatgaagctgaaggaatattttatggtaaggggtgatattgtggggttgttagaagcagcatttgtcatatagaatgattggtgatggcctggatatggttttgtgtgaaatgagaaactaaatggaagacacaaggtctgaataagagaaggagaaaaacaggtgttaaaggactaagaattgggaggacccaggacatctaattagagagtgcctaagggggttcagtgtaattacttgcttggttggtgagtttttgggctctatccttgacagagtcctcctttttaagttggaggctgagcttggtgaggtgtgtttttaaaagaccattagtctgttctacctttcctgaagattgaggatggtgaggggtatgaaggttttactgaataccaagagcctgagaaactgcttgggtgatttgactaataaaggccggtctgttatcggattgtatagagatggaaaggccaaactgaggaattatgtctgacagaagggaagaaatgaccacggtggccttctcagaccctgtgggaaaggcctctacccatccagtgaaagtgtctacccagaccaagaggtattttagtttcctgactccgggtatgtgagtaaagtcaatctgccagtcctgggcgggggcaaatccccgagcttgatgtgtagggaagggagggggcctgagcaatccctgaggaggagtggagtagcagatggaacactgagcagttattttttgaggatagatttttacgacggaaaggaaaagtgaggttttaagaggtgggttagtggcttgtaacttacatggaagagtttatgaaatgatgacagaatagaatgggcctgtgaggctggaggagatattttccttggtccaagaattatttgccttgtgtgggaagagattgataggtggaagtttcaatgggggagtagatgggagtgacagatgaggaagaaaaaaactggctgtgagggatagaagttggaatgctcgctgcttttttagctaccttatcagcataggcattgtcctgagcagtgggatctgatgccttttggtggcccttgcagtgaatggcttcagcttcctttggaagtaaagtggccttgagaggagtttttattaaagaggcattaagatggagaacccttgtgtagtgaggaaacctccttcagcccatataaccgcatggtggtgcagaatatggaaggcatatttagagtcagtataaatattgacacgtagtccctttgcaagagtgagggcctgagttaaggcaatgagttcagcttgctgagaggtagtggagcggggcagagcagtagcctcagtgatagatgtggaagatactacagcatagcctgcctttgctggtgagtggtgattaggcctggtggaactgccatcaataaaccaagtgtgatcagggtaaggaacaggaaagaaggaaatatggggaaatggagtggatgtcaggtggatcagagagatacagtcatgggggtgggggccagcctaaaacagtaaggtcaagttgtttgaacagaaaggctacagggcgtggtcctggctcttgtgtaagaattttgactgcgcagccctgcacttcggctgtgtgtaatgaaaagggttgggatgagttagggagagctagtgtgggagcagtttctagggctgtttttaaggaatggcaagaggagtggctaaaggatttaggatctttggggtcagctagctttgcttttgtgagtttatataatggtttagtcaggatggtaaaacttagtatccaaaggcggaagtacttaaccatacctaggaagaaaaggagttgttttgtagaaggggttggggtttgggagatgagccagacacaatcagcagggagagcacatgtgttttcatgaagaattatgccgagataggtaatggatgaggaagaaatttgggcttgactgaagtaatgggggctgtcctcgaagccttgtggcagtacagcccaagtaagttgctgaggctgacgggtgtcagggtcagtccaagtgaaagcgaagagaggctgggatgaagggtgcaaaggaatagtaaagaaagcatgtttgagatccagaacagaataatgggttgtggagggaggtattgaggataggagagtatatggctttggtaccatggggtgaataggcaagacaatttggttaatgaggcacagatcctgaactaacctgtaaggcttgtccggtttttggacaggtaaaatgggggaattgtaaggagagtttataggcttcaaaaggccacgctgtaacaggtgagtgataacaggctttaatccttttaaagcatgctgtgggatgggatattggcattgagcggggtaagtgtgattaggttttaatgggatggtaaggggtgcacgataggttgccaaggagggagcagaggtgtcctatacttgtggattaaggtggggacacacaaggggaggatgtgaaggaggctttgaactggggaaagggtggcattgaggtgtggctgtggcctaagaacagtcagggaagcggataattgagttaaaatgcctcgacctagtaagggagctgggcaggtggtgataactaaaaaggagtgcataaaagaatgttgtccaagttggcaccagagttggggagttttaagaggtttagaagcctggcggtcaatacctacaacagttatggaggcaagggaaacaggcccttgaaaagaacgtaatgtggagtgggtagcctctgtattaattaagaaggggatggatttaccctccactgtaagagttacctaaagcatctgtgatggtccaggaggcttctaaggtgatcgggcagcgtcagtcttcagccgctaagccaagaagatctgggaagcagtcagtcagagagccttgggccagagttccaggggctctgggagtggcagccaggccagttagacagtccgatttctagtggggtcccacacagatgagacacagcttaggaggaatcccaggctgcgggcattccttggcccattggccagatttctggcacttgaaacaagatcctgatggaggaggtcctgtaggaatgcttgaccactgcagtttaggcattttgaagtttttgtgtgtgctggagatgtggctgggttttgtctcacagcagaggcaaggaatcgcaactcagaaatacattgctacttggctgcctctattattgtacatcttgaaggcgaggttaattaagtcctcttgtggggtttgagggctggaatctaatttttggagtttttttttgtttgttttttggttttttttttttaatgtcaggagctgactgggtgataaaatgcatattgagaataagaggccttctgacccttctgggtctagggctgtaaagcgtctcagggttgctgccaaacgggccatgaactgggctgggtttttcatatttgatgaaaaagagcctaaacgctaactgatttgggagaggtcggataaataaaaaggaacattaatcttgactatgcctttagctccaaccacctctttaagaggaaattgttgggcaggtgggggagggctagtcgtggaatgaaactgtaagctggaccgggtgtgaggaggggaggtgatagaaggattatagggtggaggagcagaggctgaggaagaattgggatctggcttggcctggcaaggagcagcctggggaggaggggagaggtcagatgggtccatagaaaaggaggattggaaagactcagcaacacttggggttgggattgagaggacagatgggttgggattgaggggacagatgggagggaaagaaggaagatttgggacaagttgcattgggaacagagactagggagggaccaatgtgtaaaagaatgcctggacgtcaggcacctcagaccgtttgcccattttatgacaagaattatctagatcttgtaggatggaaaaatcgaaagtgccgttttctggctatttggaaccattgtcgagtttgtattggggttaagcagcattgcagaagaaaataaggcatttaggttttaggtcaggtgtgagttgaagaggttttaagttcttgagaacataggctaagggagaagaaggaggaatggagggtggaaagttgcctatagtgaaggaggcaagcccagagaaaagagagggtagagacatggagagaaggggtgggggggtgcttgcccccaggaaagtggttcttgccactaagggtgaaggatcaaggcaggcattcgcgcggtgatcagatacctctgaaacgtgggtgaataatcaagcaggtgtccctgcagtgattaaacagcaaggaaagactatcttcccaagtccatgaccagtgccagagttttgggttcatggataaaacgcgtctcctctgtctctaccagaaaatgaaaggaattgaaattaagagaagggagagattgaaggatggcgccaagattgaaaggaaaaagaggttgagggatagggagagaggttggataagagagtaaaaagaggctgcttacccaatttaaaatcggtgagatgttccttgggcttgttggtctgaggaccagaggtcatgggtggatctttctcatggagcaaagagcagggggacaggggattgatttcccaagggaggtcccctgatctgagtcacagcaccaaatatcacgtgtgtccatgcgaagagaccaccaaacaggctttgtgtgagcaagaaagctttttaatcacctgggtgcaggcgggctgagtccaaaaagagagtcagtgaagggagataggggtggggacgttttataggatttgggtaggtagtggaaaattacagtcaaagggggttgttctctggcgggcaggggtggggggtcacaaggtgctcagtgggggagcttctgagccaggagaaggaatttcacaaggtaacgtcatcagttaaggcaggaaccggccattttcacttcttttgtcattcttcagttacttcaggccatctggatgtatgcatgtaggcttgggcccagaggcctgacatttaacatggataaatgtaaagttcttagaatcatacatacactttggaaaagatggggcttaatcgcactttataagacttgaaggatgtttgagaatcactatgaaactgctgaaaataccaagaaaatttaattcttatgtatataaataatgtgtctgttttacatgaatcccttctacaagcttggtatttaatatggcatatattgttttttcatagtagatttaaaatttttgatatctaatttagataacataaaattaaccctttgaaagtgtacaactccgtggtttttagtatatccacctgattgcacaacgatcaccactgtctagttccagaacatttttatcaccacaaaagaaaggctgtatccaggccgggcacggtggctcacgcctgtaatcccagcactttgggaggccgaggcgggcggatcacggggtcaggagattgaaaccatcctgggtaacacggtgaagccctatctgtactaaagatacaaaaaaattagctgggcatgatggcagatgcctgtagtcccagctactcaggaggctgaggcaggagaatggcctgaacccaggaagcggagcttgcagtgagccaagattgcgccactgcactccagcctgggcgacagagcaagactccatctcacaaaaaaataataaaaataaaataaaaaaaaaaaagaaaggctgtctttctcctttcccattggccgtctttctccattccctactcctccaatcccctggcaaccactaaatctactttccatgtctgtggacttgactcttcgggacattttacataaatggaatcatgcaatgcagcacattttgcatctggcttttttcacctggcgtgttttcaaggctcattcgtattctagcatatatcaatactttgttcctatttaggactaaataagattctattgtatgaataaaacatattttgtttatatacttagtttgatgaacatttgagttgtttctggatttttttttttttttttttgcctcttatgaataatgctgctatggacaacagtttttgggtaggcatgcattttaaattctcttatgtatatacttaggattaaaattgctggatcacagagtaactccatgtttaactttttgatgaattgccaaactgtttttgagagcagctacacaatgttacattcttaccagcaacaattgagggcttcagtctctctacaaccttaacaacacttgttattgtctttgtaattattgcctttctaggcagtgtgaagtggtgtctcactgtggttttgatatgcatttccctaatgactaacaatgttgtgtatcttttcgtgtgctcattttcaatttgaatacattctttgggaaaatctctgtttaaatcttttggccattaaaaataattgggttattttcattgttgagttgtatgaactctttatatactctggatactacactcttatgacatatattattttcaaaaattttctgtgcatctgcaggtcatcttttcactttactgatggtgttctttgaagcaccaaagtttttaaacttgatgaaatccagtctggctttattcttgcacgtgctttacctaaaacgccaaaacctaattcatggttttgaagatttttgcttatgatttgttcttagaggtttatagttttagctcttacatttaggcatttgatgcattttaaattaaattttgtatatggtgtaaagtagcaatccaacttaattcttgcatgtgggtattcagttattccattgtcttgaaacccttttcaaaatcaattgtctataaatgtaagagtttatttttggaccatcagttctatcctgttgacctatatatgcctatcctaatgccagttacacacagtcttgattaccataactttgcagtaagttttgaactcagacagtctgagtgcttttattttgtcctttttcaagattaatttggttattccggatcttttgcatttccatatgaattttaggatggttgtcaatttctgcaatagaaaagcagcaggattttgatagagagtgcattgaatctgtagaccaatgagtatcaatggaattatgtgttatcaaatttagtaaactacataaacgatatgtacacaactaaaacaaaactaagatataagatcatattaatgtaatgataataaaagtggattgtctcctgttctaattttaataggcacaaggcatttttgttaatcacttcttattaaagaattttttataatattcaggaaaatacaacaaaaaaacccttacattcctaaggcctcagagtcagagtaatataaaggaaatgtaaacacatgctgagtaatgcaagcatttggcaatggtggtgactggagctgggagcacagcttttatttctctgaaataggaatttgccccttagagttagaccaattttgccttcctctaaatggcaaacagtttggagatactttaaaggacattttttcacttaggatgtttagtactatgaataataaatagtcacaatttccttaactatggtgacaaaatacaagcaaatttagcctcatgtcatttcctaaggaacatcttctctctgtgagttcacaggttgccacatgaacatcttccagcatcttgcgttctcagatgtggatgttgccagggttctcactccagatgcttttgtgtgtcggaccatctgcacctatcaccccaactgcctcttctttacattctatacaaatgtatggaaaatcgagtcacaaaggcgagtatgcatggaaaatcgcatcacaaaggcgagtatgcatggggagcacttgctgctgtactttcatcacttttatagtctgagttcttaaaagtttcgttcatttccctcaaaacacttgaacctgcagtttcagtaggtactgttctgccaggtgcagattagttaagagattagcagacttctctgcctatcttctcttactttaaaacaaatgttaccattgaatcaaggaagcaatagccatgagaaaaaagaaggatctgacgcctttgaatgaagattcaaaacatgatcttcatgttttgtattagcttggagtaaaatccacttgctggcaatatagcccttaagcttgttgcctcttctctttgtttcagaaactagagccctgtttattctgatcaaggctctggcccactgtctttatctcagataacccaccctcttctgcacacagcatggagctaagagaagggtgtctagttatgtaatatcatcggcagcataaattcccagaatttgttctttgatttttttgtttgtttttccagttagaaggtggaacttcatcattgtcctcttttcaggttgtctgtgcctattagttttctccagagggagaggtggcttgatttacatttaatctctgcaatttattagagtcctgtagttggatttactttgaagagagtttcccagaagaataaaatttgctgcgttgctttttgggtgtgagctgcttttgtatttgcctaatgcctttaatgcaaatttctttctttctctcttgcttttttttaaaaaaaatagaaatgtttgtcttcttaaaacatctgaaagtggcacaccaagttcctctactcctcaagaaaacaccatatctggatatagccttttaacctgcaaaagaactttacctggtaatgtgatttgataataatattacataaaatgtaacctatttcatgacttttaacagcaacagtgatgaaacaatcctcaaggtaacagaaacttgtgtaaatgtcgttcattgcttttcccatctgatatctttttgtgtttataattgacacagaaccctgccattctaaaatttacccgggagttgactttggaggagaagaattgaatgtgacttttgttaaaggagtgaatgtttgccaagagacttgcacaaagatgattcgctgtcagtttttcacttattctttactcccagaagactgtaaggaagagaagtaaaggaaattttatttttcaaagacagttgacatgaccatttcatattctctttccccctgtgaaggcttactctttctactgttcatttcatctaggtgtaagtgtttcttaagattatctatggatggttctccaactaggattgcgtatgggacacaagggagctctggttactctttgagattgtgtaacactggggacaactctggtgagtaacctcactttttcgtggacctgtcagggatgtctgtcatgttgatagtttgcttagtcttaaggaattatgtgtcttgttctccttggttagaagggactttgattcacttctaattccaaccattagcgtcaacgctctcttttcagtctgcacaacaaaaacaagcacacgcattgttggaggaacaaactcttcttggggagagtggccctggcaggtgagcctgcaggtgaagctgacagctcagaggcacctgtgtggagggtcactcataggacaccagtgggtcctcactgctgcccactgctttgatgggtaagtgttggatgcatctcatccagagtcttatcttggcttttcattttgaaggatctatgatcagctgcttcaccgccatgtgactttatgaatagagacgtgttaaagcggggatggtattcacaacatttaacttatagggtccaagcactgaccaacctgaccattagaacagagtgtggtctctgtacagggcagatggcgctgagtgggtattctccacagaaagagaaacgaagacagtaccccactcctccaacccaccacccaccaccaatcccaccaccaattccaccaccaatcctgccacccaccaccaatctcaccaccaatcccaccaccaatcctaccacccaccatcaatctcagcaccaatcccaccaccaatcccaccaccaatcccaccacctaccccaccaccaatcccgccacccacgaccaatcccaccaccgatcccgccaccaatcccaccaccaatcccaccacctaccccaccaccaatcccgccacccacgaccaatcccaccaccgatcccgccaccaaccaccaatcccaccaccaatcccaccaccaatccctgatgtgttcttcaaagacttatttgtcaggcccatagaaatgttacttcttgctctttgattcataaatatactaagtcataataatttttaaaagtgagagtttcgtactctgtatatttcaatgtatataatttgatctatttcaatttattggtcaaatagtagacatgttaggtaagtcttaaaatactgaggctttggagttagacagaacatggcttaagtgacagctttgctgcttattagaggtgtggccctagaagatttgtaaatccctctgagctttatttgatctaaaatatgaatagtaatagtcccgaatttgtaacgttgttgggaagattaagtgacacatttaaaatgcttagtactgtgtgtagaacataaacacttcaaaaaatgtaaactgtgatttctatattcaataagaaatgtagaaatggacaaagcatataaaaagcaaaagaaatactagaagacacttgatttttctcaaaaataaacacaccaagtatttttgttttagtgaaattcatgcttacatgctgtatactaggattgaacatactgccaccaaaatatagcagtcggtggtacatgtgggtggagcaagacccctccaccttgtcatcgtgtgaaggggctctgccatacatgaccttgcatgtgactttaaggtggttggcctggaagaaaagtcccaagatgggaaatagtaggtgtcttttttactaaatgcactccaatttgggaccaaaaattttcattcttgaaggctcagtattgtgagtttataagagataatagacataaaagtgtaatgatttcattgcaaataaaaaaaggcccctttgcacctgatatctccatcatttttctagaattttgtgcacacatgccttgcactacttggtgatgataaagatttccagatctttgcacagaataaggctttgctttagatcagaattttggatgtacttagtatacattcatcttttaaataatctatttacattttcatactttccaaaatacagatatattttattttatttatatatttatttaatttattttttgagatggagtctctctctgttgcccagagtagagtgcagtggcacaatcttggttcactgcagcctctgcctcccgggttcaagcgattctcctgcctcagcctcctgagtagctgggattacaggcgcgcgccacacctggctaatttttgtatttttagtagagacgaggtttcatcatgttggtcaggctggtctcgaactcctggcctcaagggatccacccacctcggcctcccgaagtgctgggattacaggtgtgggccactgtgcccagctgtatagagatattttaaacaacactaaagtcctcctactttgactaattagaagagcattagaagatcagcctgacttcttgacagttctgaatttagtggagcaatgaggttcagctttggtgaatgagcttaatttttccatgataaactgctagtttcttcccactacagtgtctctcaaaaatgggacagcaacattctttttgttttcacttgcagtaagcatgatgcaattacataaatgtacacttttcaatttgttaaatagaatcttcagagattcactactgccgctattggtgatgaaaaattaccagaaggaggaattaggtaggagaaaatgtgtcctatgtatttccttcccagttctttgaaagagagtgataggaaaaaggaacactattgaaggaaggactgcccagtttcaaacaggtatttatttttctctcctaggcttcccctgcaggatgtttggcgcatctatagtggcattttaaatctgtcagacattacaaaagatacacctttctcacaaataaaagagattattattcaccaaaactataaagtctcagaagggaatcatgatatcgccttgataaaactccaggctcctttgaattacactggtatgtagcatatgtaagaaggtggagagcagaattgcgctggttgatattttcatatcagtttgaacaagagggcagacctagagagactgtcgtcgttttctgactggtggagttgagggaaacgtgagggttgctgggaagtgaagaccccgcgacttgccgtgaaatctcttctacttaaagagcaagacatgtgaattaattctttcagggagggatacaactgcatgcaggtgatggaaataatgggcgtgggaaatgtctgtgccgtctgagaggcactgggcttgctttgacaagagtagcagaactgtcattgctttgggcttagggatattcgaatgtgtgagggcaagtgggatcagatatctacttccaggtataatttgggtaggaaagagactcatgcagaaagaagccctggaaggccagagcatcgtggtcagaggtgttgcctttggagggtcattgctgccaggagccgaatacccactgtatccaataacattcatggtcaggaatggtggctcacacctgtaatcccaacactttgggatgcccaggtgggaggattgcttgaggccaggagtttgagaccagcctgggcaacacagtgagaccccgtctctacataaaattagaaaaaaacaattaactgggtgtggtggtgtgcacctgtagtcccagctagtcaagaggctgagacaagaggatctcttgagcccaggagctcaaggctgtagtgagccaagatcgtgccactgcacacaaacaattatgtgacctcgggcaagttgctttacctctttacacctcttaatttccttatctgtaaaatgaggatgataatttcttcctgggtctgttgtaataattaatacatcaaagcacttcatgtctggaacagtgaagataccctgctatgactattaaggatagtatacatggaataagacacaggaacttctaaatgcttttgaccatagatttaggttctgagttttaagaatttaactcaggaaattgtaacaccaaaaatgtcatgtgaaaaatggtggtgacaaattttcttgaatcattagccttagaggttgggcagaaagcaaaaaattattcttgatgctactctatagaaagagaagacagaaaaagagaaagatgtatttttaaagtctatatccataactttatttgaccaaactctaatttaaaaattatgtttcagaattccaaaaaccaatatgcctaccttccaaaggtgacacaagcacaatttataccaactgttgggtaaccggatggggcttctcgaaggagaaaggtaagcatgacgctttaaatattgcttctagagtaagtctcacatgttgaaatacatggagtgggtcgttttaatcggtttctgtctgaaattatatctaaactctttatctttcctatctatttattcccaaatatttattcagttattcttaaaaaatgtatttttgctttggcttgaaaaaaaattttagggagacttttaagcatcttacttcattataaagatcagttgcttgactttgcatgaagcagattgggcccttctagggctgacaagcccgtgcaagaccacccgctcctcagtgttagtagcgttcccgtctcccaaaaccatgttctcccttgatgctaatggccgggagcacaggcaggtgtgtcgtctcactatggagaataatatttgtgtcattctttacagaagaaggtagcttgccaaactgtctccatctttcccgattcagtcttttgttcaagtaattcacatttttagattttttattggtaatctgagacaagaagaaatttaaagtaatcttcactaagccatgaaagctcccaacattgttctccatgagagatgctggcctgcatttattcaaaaacaaaagacccctctgttgccaaagctcggagggcttttcagaaacgatatagttgtaaattataattttgaatatataaagcaaaaaaatgaaaagtgagaacttccaggctttggattgttgtaggtgataaatataaaatgggatttctggggggctgctactgagatgaggggatggcagaaaacatggaagcaaggtctctggtcagcccagggtgctgggcttgtcccaacaccacgtaggcaataagaggacagtacagggtgccgtctctctccctcttcctctctctgtctctctctctctgtgtgtgtgtgtgtgtgtgtgtgtaacactaccttcccaatttttactgtctatttgtattcaaagataaggtccttatgaaaaatacactgctctgattcactttaaaacttatttccatatttattatttattgtgggaataataatattcccaatattattatttattatttaagttattattattaacttccctctgaggttatatattggttactcacaggtgaaatccaaaatattctacaaaaggtaaatattcctttggtaacaaatgaagaatgccagaaaagatatcaagattataaaataacccaacggatggtctgtgctggctataaagaagggggaaaagatgcttgtaaggtaactcatgagattatgaaaaacacaataggctgcttgagaaaattcatttcaaaatatattttccaatagcataattcaatcatagtttttaaaaaaattcagagacaaatgatctgataaattgataagcaacttttaacaaattgaatatacataatatatatttatattatttatgatatatgtcacaatctatgcatgtgctatttaagaggggcaaatatacatgcaataattgtgctagaatataaaaacattagacttcatcattgggatgatgatatcaagatttctttgttagatttatttcagatagaaaaggggatacgaaaaatgcaggcacatgagatacttggagaactttaagaaagagtgagtgtgtgtgtgtgtgtgtgtgtgtgtgtgtgtgtgtctggcaagcaaggtcttgcacacacacagcactttgggaggccaatgcaggtggatcacttgagcctaggaatttgagaccagtctgggcaatgtgatgaaacccatctctacaaaaaaatatgaaagtatctgtgtgtgtgtgttgctgtgtagtggactacagaactttagaggcagtcacttatttgaatcccattgtcgtaactttctactattttatttttccactgtgactcagggagattcaggtggtcccttagtttgcaaacacaatggaatgtggcgtttggtgggcatcaccagctggggtgaaggctgtgcccgcagggagcaacctggtgtctacaccaaagtcgctgagtacatggactggattttagagaaaacacagagcagtgatggaaaagctcagatgcagtcaccagcatgagaagcagtccagagtctaggcaatttttacaacctgagttcaagtcaaattctgagcctggggggtcctcatctgcaaagcatggagagtggcatcttctttgcatcctaaggacgaaaaacacagtgcactcagagctgctgaggacaatgtctggctgaagcccgctttcagcacgccgtaaccaggggctgacaatgcgaggtcgcaactgagatctccatgactgtgtgttgtgaaataaaatggtgaaagat

SEQ ID NO: 15645 - DNA, 30953 bp, Homo sapiens
agaacagcttgaagaccgttcatttttaagtgacaagagactcacctccaagaagcaattgtgttttcaggtagcaaatttttattattctgattgtttccaaataaactataatttttaagtataattttttactttatgagaaaattaatcatttatattctaatttcctgagtatgtagagagtatagataatgttcctttatgtagaaatatttaaatgtaagatgattttaaatcagaaagaatatttgattgatttaaaatttttaaatgggctttaatattttcagaggttttctttacttagggatttttggactgacattattgccattatttattaattttgtttttgcccaaatcaagaggtttcataattgtttactctctctctaccaattccctttccaacattactagccacagagttggccaatgaacaataaacacaacagtagtctggaggtctcaatttgtatcttgggaagcattataaattttccaactccctagacacaaatgtaccaaaaaaaaacccttgttttctataccagtaattgtgtgctttgtcttgcaattcagacatttacaagaaaatctaaatcaccttaaattaagatttatgttaaatgtggtctaaaaccagcagagttatgtattgttttcttttttagaatgattttattcaagcaagcaacttatttcatttccttgtttgctacagtttcctgtggtaagtgaattatctataaaacatggaattcaggctaagacaggagtagccaagcaagtggcaccacccctggagaaagctattgaacatacagcttcgggggtggagattgtccctgatgattcaggacacgtgtctatttaatgttccacaacaaggaccacttgtcaggtatattgctgtagacatatgttgcagaccagaggaaggagctcagaagtaggaatgtcttgggacttgtgttaacaaaaacttctgttcgcagatgacactctgcaaagcaaaacttgaaacaaaaaaaaattagtcctctatttttattatcaacagtaaaaaattaaactttatctgaaaattcaaaagagtgctaggcattttatagtgtctgggtccaatccaagtatctgttaggaacaccatacatagttttactctggaccgctagggaaccatttcaaaaatgaaagtaactggtttaaatttaacttagcaaaccatgcatttggatagttctaggtgaatagctttcaacaccagatttagatctcatttctctattaatttcattaatttttggagaataaaaatgattctggacatttcattaatcattacagagggagttttctctgtgtccccacaaggcatgattctgggtctatggtgacttaagagggccacacaacaatgagtatttaattttcctcagatgtatggctacaataaacatctataggtaaggtttacattcataaagagacctttttttttccaggaaaaaagacttttattccccctaaatcacaactcccctgtgtctgtccctcaaccctgatttctcttctaaaccgtaatttacaaacccatgtgcaaacccactgaaaggtgagaaggagcataagccagagacactgggaaccacagccaactacagggggtttttcatttttttgttttgttttgttttttggcaaaataaatcatgattatggctaggaaaatcagggatgtaagtaagcaaaaatttagaaactacatattgcatgtagtccccaaattcagaaacagtcatcgttaaacatcttttatttagtctttcagatatttttctacatatacctatttgcacatttcacaaaaaagagttattaactgtggacactctttgacttgcattttccacttatagctatcttttggtgcaaataagtaatatattttggagcttgctattcttctctttttatggtatttttgtgtgcacattcttatgctcttattcagttatttctgtagaatacaatttttgaaataaaaatactagattcaaaggtgtgaatatttttgaaggttttgtggtgtggtatcatgaaattaggtttcagaaagtttactccatagttgactttttctaccagctaataagagtgctcatttaccccacttaggccaactctaacaggcttctgttgctttgcatcctgacatatttatctttctggaaacagtgtcctaatttatttctgcagagctactgcctctcagttttggtccatgtggttctggtgaccctgattcttctgctgaaccagaaagtgcacacatcctcctggctgtggtgacccaatcagagccaacgtcttgcaatgaagcttttctttagacatctagaaataagactcttatgttttttttttccaatttgacttgaaacttaagacaatacacaggcctgagttgttggtactattttgctactacgtggagcttgagagtaatggtaacaccaagactggagcaagtggaaggagacatattgtccactgatgctatcagttgagcacaatgtgcagttactttttaagccagattcaccatgggctttttggctcctgaaccaatagatttcatttgttttcaagccactttgtactaggttttccatcatttgcaatcaaaaccagtatacaaacactggttatttaatttttcatttttgctaatctcagggataaaatggcttctagttgttttaacttggctatatttgtgattcttcccattttcatatacttactaatcacttctatttcttttgtaaattatcttttcatatttgttatctaattctttaaaatttgagtactttaattctcattattgtttgtggaattgttaaacaagactgaataatctgcccaaagtccatggacatgggggcccatgtaaaagctttgaaagccaccatcattatgagataaattatataatagtactttacataggctccaaaatacagcacagacacagctatcattgtcatggtcatcattatcatcatgatcaccaacttatgaggataagcaagaacacctactagaagtttctttccattcagcaacaaaattggtgtctttctagtcactcccttccctgactgtcacatagcagttcacagaggctcagttgcagaatgagaagctctgggccaggacctgccattgtatgcatccttgcatgggaactgggggctggaagaggagtgactgcttgataattatgagtcagtcaaaaccaccaactgtctgaaaaaaataggcctttttgtaactagtattgtcactaaaccaactcctccatgttttgtgcatacatgaaatctaggcaatacacttgtattcccaaaagcttccacttgaagagatctgtgctctttccaaatataaaccttacccgagaggtggtcatcttggccacacctcagagagggagagaggcagtcttgttgggttgggtggtcataatggggctcagggccaaatccccagggggtaggatagtgcagagaagatggcactctccagtgcttaataaaatgcacgtggtctaagctgcccactccctcaaaggcaataaaaaataggtactatttaaattgaagagtaactactgccccagggaatggacaggttgtcattggaatagccatggttaatggtcccagttgacaactgaaatgaatgtgctacctgaacaggaaagcttattaaccagatttcaaagacagtctttcccggtaaatccaaatttacaaattaaagccagtaaagacaccgaattctctaataatatgtggggtgcagtatattttagagctgggaataattccaaacagcaaatagttcaaaatttattttcaatttagcatatgcatgcatttgcttaaactgtcttaaaaatgagtaaaaaatactgtcagtttgtttcaatcatactgagatgaggaacaatgtttagcattgcatgctagaaaaggacacaggattgggagtcagggctgggtgaccgtcacaggactttcactaactgtgtggatcttgggcaagtctgtgtgccctgagactcagttatttaactttcttttaaaaaacatagtccagatgcagataacaaagcctgcctctaatttcccttacagaattgtgagaagctggtggagatgtttgttacaaaagtgttttgaaaatagagcaaatattattctttttaaggcatgatgttttcatagcatgtcaggcaacaggaaaaaactaagttaggattttattttattgtggggaatttatgtgcaaattattgtgcaatttaatgaaaataagccaatgttttatacagaagtacccagaaaattaaataacactatacattgttcaaatagttgccttaatatattttattttctcagcataattagagttgtattatacaggtctttgagtagtcagtcagtgggagaagttaagacaacagatatctttttattaaaattattatatgaattatcgcaaattaatttttatggttctgtcacaggatgtctgactcaactctatgaaaacgccttcttcagaggtggggatgtagcttccatgtacaccccaaatgcccaatactgccagatgaggtgcacattccacccaaggtgtttgctattcagttttcttccagcaagttcaatcaatgacatggagaaaaggtaaaagttggtatttcattattggagaagctgtttttcaaaactgaatcagttttgtgcagaaaggtgtagtataactgagagttcttcctcacacggggttcaaggaccagcttcagcaaaatcccgtcaagtggttcttacaaatgcagattcctaggccacaacccagatctgctgaaccaaagtttcttgtgaccaggaatctgcattttaaacaatcactgtgtttctttaaagtagtagaagctagtcattttctattcaaagcctcaaaatgcttgaatatcattgggctaagggattgtctcaagaaagagtctaacaggtgcacatttcatctgaataaagaaacagatttaactgtgtgacccatgatcacattagcggatagcacagtccaaagaaaataacataagacaagcattttgctgagaatgtaattgagaaagatctagaacttgtgattttgggacagggcagttctaaatggggcctatagtgagccagtttgggcacctgtggcatgatgctatgtatggtgtgtgtgtgtatgtgtgcttgtgcttgtgtgaatatgtattattaactggaaatttgtaaaagtattggaaaaatagtacttacgattttgtgtgtgtgtgtgatggagtctcgctttgtagcccaggctggagtgcagtggcgtgatctcggctcactgcaacttccacctcccaggttcaagcgattctcctgcctcagcctcccaagtagctgggattacaggcacgcaccaccacgtccagctaatttttgtagttttagtagagacggggtttcaccacattggccaggctggccttgaactcctgacctcgtgatccacctgcctctacctcctaatgtgctgggattacaggcatgagccaccgcacccagcggtaattacaatttttattaggtcagagagatgcttattaatcacgagccacagtttcatcttaatgatttttccttttgattaatatccagagtaagcttttctttgttgttcccatttccatgttcataactctttactcatcttcactctatgtgagtttaccaactagaaattggatagtcattctctgatcccacatgttaaacttgtagagaaaactcagattgtatgtgaggatcatcatattaaaagtggaggaaggttctagaattcttataaataatgaaattaacatgaaggtggacatctaagacagagggaagtcttccattaagtgcagactacaaggagttaataagcaagatgaacacgatatacaaatccagctcttatcactaagttaactttttaagtaaatgaaagtatttgcaaaaataattaccaattgagaacatagttgcctgaaagtttaagaacacaggaaaaatcattaactctttaatatggttgatttcctgtacttaaaaaatgtgagtgtaaagaaaacgcagtgatggagttagatattatggggtgttataaaattagctctaagagtgttctttccagcaagtattggggaagctatattattttccttattcctggttttatttgttagtgtgtagaaaatgctagacatttcctcaatgtatgtttattattctacttcctaagtaaagctacttttaaaataggtttggttgcttcttgaaagatagtgttacaggaaccctgccaaaagtacatcgaacaggtgcagtttctggacattccttgaagcaatgtggtcatcaaataagtggtaagttgtgaatttcttagctacatttgagttaatattggatctcgcttagaacagcttttgctcaaagtttgtactgctacagctttttggaaggcatcactcataaagataggagatggggcagtattctggacacaaaagagggacccatattcatctggacacttctattgtctttataaatcaacacatacttaatgagcctctattatttatgaggttagcgctcaagtgtaagatttgcagaaaatgaatccaaataattgtgtctcgtttccagataagaatttttaagaaaacacaagggaacatctctctcaagttcacttgagggtaatttttacatcagtgattctcaaccagcagtgattttgtctcttccactggggacatttgacaatgtctggagacatttttggtggctacaactagggaggatgctattagcatttactaagtagaggccagaatgtttgaatgctgaccaacattctacaaggcacagggcagtcgtccacagcaaataattttctggcccaaaacgtcaacagtgctgacatcaagaaactctgtgatataccactaggcccaaattgaagaactgagttctgcaaatcttgctaagaataatacttcctaaaggaaacttgaggactaggatgctagagaactttgattctgacatctgaagctactgatgtcttgggaaacagtttccaatgctatcctaataaatttaagacaaatgaactatttctcaaacatgactgggactgataagaaagtgaaaagtgctgaaaagattcaactgatgggttgtcagaatcttaaaataactgctgttattctatgtatgactatatatcattactattttattttcattatgcacaattaattttgtaggttcaaatttcagatgtttttaaatttgtcatcctttcctccctcattgatatcacctcttcaatacgtacacactttgagcctgctgtttgcattttaaccagttatcaaaggatggcaatgccttcattataaatgtgggcctgacttagccagtataataggtgtagtctacgtgaggtggagtacatttcctattttaaaagatcaatttttatgttaatccaatttggtataaattattcgagtaagtgctatttctgattgttgtatcttgtagcaaaatttaaagaaaaagtaatttgtgcctttctcaatattcctgttattgttcatgtattctaaaactcactgttactcacttagcttgcttttaatgttttttaaagtgaaaaattgttcccaagtacataaaatctctacactcaagaacaattctagtcaaaagcatttagagcttccgtatgaacacttaaagagtttttatttgtaagagtcgcatcccaactcttagcctgttcttttctcacatgcagaaaaataggaaagagacttcgtttccacagtctgcaaattcctgtgtttaagaaccacagtgaataatccacctccctgcccaactcatcgtactgtcatatagttttcctgacagtttgtgtattttctgtctttcccacccttaaatttagttttatgacttcaaccatacttcttaggagtggaaaggtatctgtagtagattatggtttattccacataatcttggggaataaaactttaaaaaagtatacagtttatacttctggttacattacttccttaaccaaaagtctaaccaagaaatttgaatctttaaaaaaaaaagaggccgggcgcggtggctcacgcctgtaatcccagcactttgggaggccgagacgggcggatcacgaggtcaggagatcgagaccatcctggctgacacggtgaaaccccgtctctactaaaaatacaaaaattagccgggcgtggtggcgcgcgcctgtagtcccagctactcgggaggctgaggcaggagaatggcgtgaacccgggaggcggagcttgcagtgagtcgagatcgcgccactgcgctccagcctgggcgacagagcgagactccgtctcaaaaaaaaaaaaaaaaaaaagagcctaattttgcttcactgtctgtgaaaagaattatctgtatcttttgcatgtaagacaaatctcaatgaaaagggtgcttaaatagaagttaacactattttaaagcaagaatggaagtggtttcatcatgcgtaaacaacaactctccacattttgtaatgattgatctggatgcaatttgtcatcagacaggagaagtcgaaagcaaagaaataacactgggagatagagaagctctttcattcaatgcgaaaggtcaaaggcacatcagtttctttaataatgcaaacctcagcacacattatcagtgtcctcattattattgccttgtttatttcccactgctcattgataatttcaacgtgaaatttacctgtattgctgcatgcatcttgcagtttaagaagtgaagtaacccaatttcaaagctagtgctttagggaaaatattggattgtatttacttcaagcagagttcgataatttatgtacataataaaaattttaaatcccttagttaatatagcagttgccaaaactgggctattatcattctaaactaccaacccaaatggtagtgggtatctaatctacctctagaaagaaaatggactgtatttgctctatgtatttttcttgtacagcttgccatcgagacatttataaaggagttgatatgagaggagtcaattttaatgtgtctaaggttagcagtgttgaagaatgccaaaaaaggtgcaccagtaacattcgctgccagtttttttcatatgccacgcaaacatttcacaaggcagagtaccggtgagtacaattcaaggtgtgtgttctttgtattggtgcctccaggatttcactgtattcttcttaacctcttttgttcccaaactaaaaaccaaacagggcttttattctaaccactttcctcatttacttactctattttatttttttatcttttatttatttatttatttattgagatggagtcgcgctctgtcgcccaggctagagtgcagtggcgtaatctcgactcactacaacctccgcttcccgggttcaagcgattctcctgcctcagcctcccgagtagctgggattacaggcgtccgccaccatgcctggctaatttttgtatttttagtagagtcggggttttactatgttggtcaggctggtctcgaactcctgatcttgtgatccacccacctcagcctcccaaagcgctgggattacaggcatgagccactgcgcctcgcccttcattttttaattaaataattcatttaatttcatttgtttctctactcttttcccctggcatgtaattgtaccgcatcttcaaagcctgacatcctcttcccctacttctccaaagctgattcttgcaggtctttcctcaaataccgtcccctccaaaagcccatttctgagcattctcttttaagtcacactcagctctgtttatttcattcatagagctaatcacaatttgatattaacttgtgatttttttccttatttttaaatcttatttttatttgcatagatgtatggggtacaagtgtaattttgttactttgatgtattttacagtggtaaagtctgggcttttggtatatccatcactggagtcatgtacattgtacccactaagctatttttcaacgcccgcccccttcccacctctctgtcaccttcccagtctctactgtctatcgctccatgctctactcaattttggtgtcattttttcctgaagcaaaattttggtgtcattttttctgaagtcattttctgaagtctgtgtcatttttcgctttcctgaagcgaattttggtgtcatttttcctgaagttccgtttgccccacacataggccttgcttatagaatgagggtttagtgtcacggagtctcctgcctcattctcaccctaacttttcctttacccctttgcgaggggaaggatgtccattaggttaataatgcagacccctaacccactcattatcagggtcattgtttttccactgtgcattttaatactaactgttacctgcactgctccctgcccctcaaagtgcagaaagcaaagtaacctcttttcttcccattcaggaacaattgcctattaaagtacagtcccggaggaacacctaccgctataaaggtgctgagtaacgtggaatctggattctcactgaagccctgtgccctttcagaaattggtaattgtaggactacttcactttgtgattgtggtaggtggaataggagcccccagagacgtccctgtgctgagccctgggacctgtgcgtgtgttcccatagctggcaaaagcgtttctgtcaatggcatgcagttacgggcttcgagatggggagtttactctggattttctgaatgggcccaatgtactcacagggttgagtgctcacaaggctcataagaaaaagagagaggcggaaggctcagagccagagagagaggtttgaaggtattacactgctggctttgaagatgaaggtccgtgagccaaggaatgcaggcggcctctagaagttgaaaagggcgaggaaagagtttccctgtggagcgtcctggaggaagaagccctgctgatgtcttgattttagcccagtaagacccaatctctagaacagtaagataattaatttgtgttgtttttaaccactaagtttgtggttatgcccctagagcagcagttataggaaactagtacagtgatactgttagagttataggacagtgatataggacagtgatactgttatagttataggaaactagtacagtgatactgttagagttataggacagtgatataggacagtgatattgttatagttataggaaactagtacagtgatactgttagagttataggtacagtgatattgttatagttataggaaactagtacagtgatactgttacaggtacagtgatataggacagtgatactgttataggaaactagtacagtgatactgttagagttataggtacagtgacataggacagtgatactgttatagttataggaaactagtacagtgatactgttagagttataggtagagtgatataggacagtgatactgttatagttatagaaaactagtacagtgatactgttatagttataggacagtgatataggacagtgatattgttatagttataggaaactagtacagtgatactgttagagttataggtacagtgatataggacagtgatattgttatagttataggaaactagtacagtgatactgttagagttataggtacagtgatattgttatagttataggaaactagtacagtgatactgttataggtacagtgatataggacagtgatactgttataggaaactagtacagtgatactgttagagttataggtacagtgacataggacagtgatactgttatagttataggaaactagtacagtgatactgttagagttataggtacagtgatataggacagtgatactgttatagttataggaaactagtacagtgatactgttatagttataggacagtgatattgttatagttataggaaactagtacagtgatactgttagagttataggtacagtgatataggacagtgatattgttatagttataggaaactagtacagtgatactgttatagttataggacagtgatataggacagtgatattgttatagttataggaaactagtacggtgatactgttatagttataggtacagtgatattgttatagttataggaaactagtacagtgatactgttagagttataggtacagtgatataggacagtgatattgttatagttataggaaactagtacagtgatactgttatagttgtaggacagtgatattgttatagttataggaaactagtacagtgatactgttagagttataggtacagtgatataggacagtgatactgttatagttataggacagtgatattcttatagttaccgtggtatagttatagttaaaggtacagtgatattgttatagttataggacagtgatattgttatagttataggacagtgatgtagttacagtgatataggtacagtgatattgttatagttataggacagtgatatagttataggacagtgatattgttacagttataggtacagtgacgttgtaatagttataggacagtgatattgttatagttataggtacagtgatgttgtagcaaaactgtaaggtcattccttggttgtgtccctatctagtgaaatgactctaccaggggtagggaaataaaactctgtcgtttcacacataaaggtaatttcaatggaattatccagaaaattgccatgacattccacctcatttagcatgtcaggatgttaatgacaagatgttactaaaagcaaatcccttacggccagttttccgcagtactgggtgctggctctgtgcctggccctgtattgggtgctgggctaggatttccctgtggaagattgggaaggttggttacaaggtggctattttcctgtctcctctttgcgacagcacaccttctccatggtgtgtgccaggttcacgtgtactggtgatttaattttaacgttcatattatttttttctgggagagtttttgaaggctgccaggaggcaggactcgatgcaaacatgctccattctgtacccagccctgttgctggaaggatttgctgcacttacccagggaacaggcaagctcgtgctgtggctctgggctgtcacagctgctgtccacacctgggagagcaccctggatggctcatctgtgtacttgctttcttgttaaattgcagtgagttcacatgtgatttaatcggatcaaatggcctttacagactgataaaaatatggctgtttcaggtggtgttttgagctgctaagggcgtggcttttcactgagtacgtggtccccgttcctcagggaacacccagtagccacatgcctcctaaacctagagtagggctgtctcctggcctaactgcccaaatgagattcataagttagggatgatctgtagttatcactacagatttgtccttggtttcaccaaggattttcctaattttacaaacaaaacccctaaggctcctggaaggagggtagaagtgaaggtgctccgggggcaacacagctgatgagctgaaccagaactcgacccttgggtcacacacatttcacagtgctcactccaccttttgtttttttaatggatttaatggtgttttaaagcctcctgcctctcaacacatatgaattcattatatttacagatttccttctcttgtggtccatcttcctgcatagatcttgagagatgtcaggctaaccacgtttcctcagttaatttaacaaaaccatttgcaactctgacatggaaaattcctaccatgtgacttattaatttatcaattgagatggtacacatattttcaagccaaaaggaggaaaacataaattggaaaaaaaaggtttttttatttttatcacctctggggaagaaagtctgataaacgaagctggttgataaaattgcaattaggggaagcaacatcatggtttctgttcggaggctaaccagatggcatacttgaaatagagaatgtcctagaaatcaactggttgcttggccaaaatatctataaatagtgcccaacatattagataggaaaagcaaagtaaaaacaattttaacaggttaggacattgggctgaagtattgcatatatttaatgtcatgtgcgtccgtgtgaagagaccactaaacaggctttgtgtgagcaagaaagctttttaatcacctgggtgcaggcaggctgagtccgaaaagagagtcagtgaagggagatggggtggggacgttttataggatttgggtaggtagtggaaaattacagtcaaagggggttgttctctggcgggcagcggtggggggtcacaaggtgctcagtgggggagcttctgagccaggagaaggaatttcacaaggtaacgtcatcagttaaggcaggaaccggccattttcacttcttttgtctttcttcagttacttcaggtcatctagatgtatacgtgcaggcctgggcccagaggcctgacattcctgtcttcttatattaataagaaaaagaaaacgaaatagtggtaaagtgttggggtggcgaaagtttttgggggtggtatggagagataatgggcgatgtttctcagggctgcttcgagcgggattaggggcggcgtgggaacctacagtgggagagatgaagctgaaggaatattttatggtaaggggtgatattgtggggttgttagaagcagcatttgtcatatagaatgattggtgatggcctggatatggttttgtgtgaaatgagaaactaaatggaagacacaaggtctgaataagagaaggagaaaaacaggtgttaaaggactaagaattgggaggacccaggacatctaattagagagtgcctaagggggttcagtgtaattacttgcttggttggtgagtttttgggctctatccttgacagagtcctcctttttaagttggaggctgagcttggtgaggtgtgtttttaaaagaccattagtctgttctacctttcctgaagattgaggatggtgaggggtatgaaggttttactgaataccaagagcctgagaaactgcttgggtgatttgactaataaaggccggtctgttatcggattgtatagagatggaaaggccaaactgaggaattatgtctgacagaagggaagaaatgaccacggtggccttctcagaccctgtgggaaaggcctctacccatccagtgaaagtgtctacccagaccaagaggtattttagtttcctgactccgggtatgtgagtaaagtcaatctgccagtcctgggcgggggcaaatccccgagcttgatgtgtagggaagggagggggcctgagcaatccctgaggaggagtggagtagcagatggaacactgagcagttattttttgaggatagatttttacgacggaaaggaaaagtgaggttttaagaggtgggttagtggcttgtaacttacatggaagagtttatgaaatgatgacagaatagaatgggcctgtgaggctggaggagatattttccttggtccaagaattatttgccttgtgtgggaagagattgataggtggaagtttcaatgggggagtagatgggagtgacagatgaggaagaaaaaaactggctgtgagggatagaagttggaatgctcgctgcttttttagctaccttatcagcataggcattgtcctgagcagtgggatctgatgccttttggtggcccttgcagtgaatggcttcagcttcctttggaagtaaagtggccttgagaggagtttttattaaagaggcattaagatggagaacccttgtgtagtgaggaaacctccttcagcccatataaccgcatggtggtgcagaatatggaaggcatatttagagtcagtataaatattgacacgtagtccctttgcaagagtgagggcctgagttaaggcaatgagttcagcttgctgagaggtagtggagcggggcagagcagtagcctcagtgatagatgtggaagatactacagcatagcctgcctttgctggtgagtggtgattaggcctggtggaactgccatcaataaaccaagtgtgatcagggtaaggaacaggaaagaaggaaatatggggaaatggagtggatgtcaggtggatcagagagatacagtcatgggggtgggggccagcctaaaacagtaaggtcaagttgtttgaacagaaaggctacagggcgtggtcctggctcttgtgtaagaattttgactgcgcagccctgcacttcggctgtgtgtaatgaaaagggttgggatgagttagggagagctagtgtgggagcagtttctagggctgtttttaaggaatggcaagaggagtggctaaaggatttaggatctttggggtcagctagctttgcttttgtgagtttatataatggtttagtcaggatggtaaaacttagtatccaaaggcggaagtacttaaccatacctaggaagaaaaggagttgttttgtagaaggggttggggtttgggagatgagccagacacaatcagcagggagagcacatgtgttttcatgaagaattatgccgagataggtaatggatgaggaagaaatttgggcttgactgaagtaatgggggctgtcctcgaagccttgtggcagtacagcccaagtaagttgctgaggctgacgggtgtcagggtcagtccaagtgaaagcgaagagaggctgggatgaagggtgcaaaggaatagtaaagaaagcatgtttgagatccagaacagaataatgggttgtggagggaggtattgaggataggagagtatatggctttggtaccatggggtgaataggcaagacaatttggttaatgaggcacagatcctgaactaacctgtaaggcttgtccggtttttggacaggtaaaatgggggaattgtaaggagagtttataggcttcaaaaggccacgctgtaacaggtgagtgataacaggctttaatccttttaaagcatgctgtgggatgggatattggcattgagcggggtaagtgtgattaggttttaatgggatggtaaggggtgcacgataggttgccaaggagggagcagaggtgtcctatacttgtggattaaggtggggacacacaaggggaggatgtgaaggaggctttgaactggggaaagggtggcattgaggtgtggctgtggcctaagaacagtcagggaagcggataattgagttaaaatgcctcgacctagtaagggagctgggcaggtggtgataactaaaaaggagtgcataaaagaatgttgtccaagttggcaccagagttggggagttttaagaggtttagaagcctggcggtcaatacctacaacagttatggaggcaagggaaacaggcccttgaaaagaacgtaatgtggagtgggtagcctctgtattaattaagaaggggatggatttaccctccactgtaagagttacctaaagcatctgtgatggtccaggaggcttctaaggtgatcgggcagcgtcagtcttcagccgctaagccaagaagatctgggaagcagtcagtcagagagccttgggccagagttccaggggctctgggagtggcagccaggccagttagacagtccgatttctagtggggtcccacacagatgagacacagcttaggaggaatcccaggctgcgggcattccttggcccattggccagatttctggcacttgaaacaagatcctgatggaggaggtcctgtaggaatgcttgaccactgcagtttaggcattttgaagtttttgtgtgtgctggagatgtggctgggttttgtctcacagcagaggcaaggaatcgcaactcagaaatacattgctacttggctgcctctattattgtacatcttgaaggcgaggttaattaagtcctcttgtggggtttgagggctggaatctaatttttggagtttttttttgtttgttttttggttttttttttttaatgtcaggagctgactgggtgataaaatgcatattgagaataagaggccttctgacccttctgggtctagggctgtaaagcgtctcagggttgctgccaaacgggccatgaactgggctgggtttttcatatttgatgaaaaagagcctaaacgctaactgatttgggagaggtcggataaataaaaaggaacattaatcttgactatgcctttagctccaaccacctctttaagaggaaattgttgggcaggtgggggagggctagtcgtggaatgaaactgtaagctggaccgggtgtgaggaggggaggtgatagaaggattatagggtggaggagcagaggctgaggaagaattgggatctggcttggcctggcaaggagcagcctggggaggaggggagaggtcagatgggtccatagaaaaggaggattggaaagactcagcaacacttggggttgggattgagaggacagatgggttgggattgaggggacagatgggagggaaagaaggaagatttgggacaagttgcattgggaacagagactagggagggaccaatgtgtaaaagaatgcctggacgtcaggcacctcagaccgtttgcccattttatgacaagaattatctagatcttgtaggatggaaaaatcgaaagtgccgttttctggctatttggaaccattgtcgagtttgtattggggttaagcagcattgcagaagaaaataaggcatttaggttttaggtcaggtgtgagttgaagaggttttaagttcttgagaacataggctaagggagaagaaggaggaatggagggtggaaagttgcctatagtgaaggaggcaagcccagagaaaagagagggtagagacatggagagaaggggtgggggggtgcttgcccccaggaaagtggttcttgccactaagggtgaaggatcaaggcaggcattcgcgcggtgatcagatacctctgaaacgtgggtgaataatcaagcaggtgtccctgcagtgattaaacagcaaggaaagactatcttcccaagtccatgaccagtgccagagttttgggttcatggataaaacgcgtctcctctgtctctaccagaaaatgaaaggaattgaaattaagagaagggagagattgaaggatggcgccaagattgaaaggaaaaagaggttgagggatagggagagaggttggataagagagtaaaaagaggctgcttacccaatttaaaatcggtgagatgttccttgggcttgttggtctgaggaccagaggtcatgggtggatctttctcatggagcaaagagcagggggacaggggattgatttcccaagggaggtcccctgatctgagtcacagcaccaaatatcacgtgtgtccatgcgaagagaccaccaaacaggctttgtgtgagcaagaaagctttttaatcacctgggtgcaggcgggctgagtccaaaaagagagtcagtgaagggagataggggtggggacgttttataggatttgggtaggtagtggaaaattacagtcaaagggggttgttctctggcgggcaggggtggggggtcacaaggtgctcagtgggggagcttctgagccaggagaaggaatttcacaaggtaacgtcatcagttaaggcaggaaccggccattttcacttcttttgtcattcttcagttacttcaggccatctggatgtatgcatgtaggcttgggcccagaggcctgacatttaacatggataaatgtaaagttcttagaatcatacatacactttggaaaagatggggcttaatcgcactttataagacttgaaggatgtttgagaatcactatgaaactgctgaaaataccaagaaaatttaattcttatgtatataaataatgtgtctgttttacatgaatcccttctacaagcttggtatttaatatggcatatattgttttttcatagtagatttaaaatttttgatatctaatttagataacataaaattaaccctttgaaagtgtacaactccgtggtttttagtatatccacctgattgcacaacgatcaccactgtctagttccagaacatttttatcaccacaaaagaaaggctgtatccaggccgggcacggtggctcacgcctgtaatcccagcactttgggaggccgaggcgggcggatcacggggtcaggagattgaaaccatcctgggtaacacggtgaagccctatctgtactaaagatacaaaaaaattagctgggcatgatggcagatgcctgtagtcccagctactcaggaggctgaggcaggagaatggcctgaacccaggaagcggagcttgcagtgagccaagattgcgccactgcactccagcctgggcgacagagcaagactccatctcacaaaaaaataataaaaataaaataaaaaaaaaaaagaaaggctgtctttctcctttcccattggccgtctttctccattccctactcctccaatcccctggcaaccactaaatctactttccatgtctgtggacttgactcttcgggacattttacataaatggaatcatgcaatgcagcacattttgcatctggcttttttcacctggcgtgttttcaaggctcattcgtattctagcatatatcaatactttgttcctatttaggactaaataagattctattgtatgaataaaacatattttgtttatatacttagtttgatgaacatttgagttgtttctggatttttttttttttttttttgcctcttatgaataatgctgctatggacaacagtttttgggtaggcatgcattttaaattctcttatgtatatacttaggattaaaattgctggatcacagagtaactccatgtttaactttttgatgaattgccaaactgtttttgagagcagctacacaatgttacattcttaccagcaacaattgagggcttcagtctctctacaaccttaacaacacttgttattgtctttgtaattattgcctttctaggcagtgtgaagtggtgtctcactgtggttttgatatgcatttccctaatgactaacaatgttgtgtatcttttcgtgtgctcattttcaatttgaatacattctttgggaaaatctctgtttaaatcttttggccattaaaaataattgggttattttcattgttgagttgtatgaactctttatatactctggatactacactcttatgacatatattattttcaaaaattttctgtgcatctgcaggtcatcttttcactttactgatggtgttctttgaagcaccaaagtttttaaacttgatgaaatccagtctggctttattcttgcacgtgctttacctaaaacgccaaaacctaattcatggttttgaagatttttgcttatgatttgttcttagaggtttatagttttagctcttacatttaggcatttgatgcattttaaattaaattttgtatatggtgtaaagtagcaatccaacttaattcttgcatgtgggtattcagttattccattgtcttgaaacccttttcaaaatcaattgtctataaatgtaagagtttatttttggaccatcagttctatcctgttgacctatatatgcctatcctaatgccagttacacacagtcttgattaccataactttgcagtaagttttgaactcagacagtctgagtgcttttattttgtcctttttcaagattaatttggttattccggatcttttgcatttccatatgaattttaggatggttgtcaatttctgcaatagaaaagcagcaggattttgatagagagtgcattgaatctgtagaccaatgagtatcaatggaattatgtgttatcaaatttagtaaactacataaacgatatgtacacaactaaaacaaaactaagatataagatcatattaatgtaatgataataaaagtggattgtctcctgttctaattttaataggcacaaggcatttttgttaatcacttcttattaaagaattttttataatattcaggaaaatacaacaaaaaaacccttacattcctaaggcctcagagtcagagtaatataaaggaaatgtaaacacatgctgagtaatgcaagcatttggcaatggtggtgactggagctgggagcacagcttttatttctctgaaataggaatttgccccttagagttagaccaattttgccttcctctaaatggcaaacagtttggagatactttaaaggacattttttcacttaggatgtttagtactatgaataataaatagtcacaatttccttaactatggtgacaaaatacaagcaaatttagcctcatgtcatttcctaaggaacatcttctctctgtgagttcacaggttgccacatgaacatcttccagcatcttgcgttctcagatgtggatgttgccagggttctcactccagatgcttttgtgtgtcggaccatctgcacctatcaccccaactgcctcttctttacattctatacaaatgtatggaaaatcgagtcacaaaggcgagtatgcatggaaaatcgcatcacaaaggcgagtatgcatggggagcacttgctgctgtactttcatcacttttatagtctgagttcttaaaagtttcgttcatttccctcaaaacacttgaacctgcagtttcagtaggtactgttctgccaggtgcagattagttaagagattagcagacttctctgcctatcttctcttactttaaaacaaatgttaccattgaatcaaggaagcaatagccatgagaaaaaagaaggatctgacgcctttgaatgaagattcaaaacatgatcttcatgttttgtattagcttggagtaaaatccacttgctggcaatatagcccttaagcttgttgcctcttctctttgtttcagaaactagagccctgtttattctgatcaaggctctggcccactgtctttatctcagataacccaccctcttctgcacacagcatggagctaagagaagggtgtctagttatgtaatatcatcggcagcataaattcccagaatttgttctttgatttttttgtttgtttttccagttagaaggtggaacttcatcattgtcctcttttcaggttgtctgtgcctattagttttctccagagggagaggtggcttgatttacatttaatctctgcaatttattagagtcctgtagttggatttactttgaagagagtttcccagaagaataaaatttgctgcgttgctttttgggtgtgagctgcttttgtatttgcctaatgcctttaatgcaaatttctttctttctctcttgcttttttttaaaaaaaatagaaatgtttgtcttcttaaaacatctgaaagtggcacaccaagttcctctactcctcaagaaaacaccatatctggatatagccttttaacctgcaaaagaactttacctggtaatgtgatttgataataatattacataaaatgtaacctatttcatgacttttaacagcaacagtgatgaaacaatcctcaaggtaacagaaacttgtgtaaatgtcgttcattgcttttcccatctgatatctttttgtgtttataattgacacagaaccctgccattctaaaatttacccgggagttgactttggaggagaagaattgaatgtgacttttgttaaaggagtgaatgtttgccaagagacttgcacaaagatgattcgctgtcagtttttcacttattctttactcccagaagactgtaaggaagagaagtaaaggaaattttatttttcaaagacagttgacatgaccatttcatattctctttccccctgtgaaggcttactctttctactgttcatttcatctaggtgtaagtgtttcttaagattatctatggatggttctccaactaggattgcgtatgggacacaagggagctctggttactctttgagattgtgtaacactggggacaactctggtgagtaacctcactttttcgtggacctgtcagggatgtctgtcatgttgatagtttgcttagtcttaaggaattatgtgtcttgttctccttggttagaagggactttgattcacttctaattccaaccattagcgtcaacgctctcttttcagtctgcacaacaaaaacaagcacacgcattgttggaggaacaaactcttcttggggagagtggccctggcaggtgagcctgcaggtgaagctgacagctcagaggcacctgtgtggagggtcactcataggacaccagtgggtcctcactgctgcccactgctttgatgggtaagtgttggatgcatctcatccagagtcttatcttggcttttcattttgaaggatctatgatcagctgcttcaccgccatgtgactttatgaatagagacgtgttaaagcggggatggtattcacaacatttaacttatagggtccaagcactgaccaacctgaccattagaacagagtgtggtctctgtacagggcagatggcgctgagtgggtattctccacagaaagagaaacgaagacagtaccccactcctccaacccaccacccaccaccaatcccaccaccaattccaccaccaatcctgccacccaccaccaatctcaccaccaatcccaccaccaatcctaccacccaccatcaatctcagcaccaatcccaccaccaatcccaccaccaatcccaccacctaccccaccaccaatcccgccacccacgaccaatcccaccaccgatcccgccaccaatcccaccaccaatcccaccacctaccccaccaccaatcccgccacccacgaccaatcccaccaccgatcccgccaccaaccaccaatcccaccaccaatcccaccaccaatccctgatgtgttcttcaaagacttatttgtcaggcccatagaaatgttacttcttgctctttgattcataaatatactaagtcataataatttttaaaagtgagagtttcgtactctgtatatttcaatgtatataatttgatctatttcaatttattggtcaaatagtagacatgttaggtaagtcttaaaatactgaggctttggagttagacagaacatggcttaagtgacagctttgctgcttattagaggtgtggccctagaagatttgtaaatccctctgagctttatttgatctaaaatatgaatagtaatagtcccgaatttgtaacgttgttgggaagattaagtgacacatttaaaatgcttagtactgtgtgtagaacataaacacttcaaaaaatgtaaactgtgatttctatattcaataagaaatgtagaaatggacaaagcatataaaaagcaaaagaaatactagaagacacttgatttttctcaaaaataaacacaccaagtatttttgttttagtgaaattcatgcttacatgctgtatactaggattgaacatactgccaccaaaatatagcagtcggtggtacatgtgggtggagcaagacccctccaccttgtcatcgtgtgaaggggctctgccatacatgaccttgcatgtgactttaaggtggttggcctggaagaaaagtcccaagatgggaaatagtaggtgtcttttttactaaatgcactccaatttgggaccaaaaattttcattcttgaaggctcagtattgtgagtttataagagataatagacataaaagtgtaatgatttcattgcaaataaaaaaaggcccctttgcacctgatatctccatcatttttctagaattttgtgcacacatgccttgcactacttggtgatgataaagatttccagatctttgcacagaataaggctttgctttagatcagaattttggatgtacttagtatacattcatcttttaaataatctatttacattttcatactttccaaaatacagatatattttattttatttatatatttatttaatttattttttgagatggagtctctctctgttgcccagagtagagtgcagtggcacaatcttggttcactgcagcctctgcctcccgggttcaagcgattctcctgcctcagcctcctgagtagctgggattacaggcgcgcgccacacctggctaatttttgtatttttagtagagacgaggtttcatcatgttggtcaggctggtctcgaactcctggcctcaagggatccacccacctcggcctcccgaagtgctgggattacaggtgtgggccactgtgcccagctgtatagagatattttaaacaacactaaagtcctcctactttgactaattagaagagcattagaagatcagcctgacttcttgacagttctgaatttagtggagcaatgaggttcagctttggtgaatgagcttaatttttccatgataaactgctagtttcttcccactacagtgtctctcaaaaatgggacagcaacattctttttgttttcacttgcagtaagcatgatgcaattacataaatgtacacttttcaatttgttaaatagaatcttcagagattcactactgccgctattggtgatgaaaaattaccagaaggaggaattaggtaggagaaaatgtgtcctatgtatttccttcccagttctttgaaagagagtgataggaaaaaggaacactattgaaggaaggactgcccagtttcaaacaggtatttatttttctctcctaggcttcccctgcaggatgtttggcgcatctatagtggcattttaaatctgtcagacattacaaaagatacacctttctcacaaataaaagagattattattcaccaaaactataaagtctcagaagggaatcatgatatcgccttgataaaactccaggctcctttgaattacactggtatgtagcatatgtaagaaggtggagagcagaattgcgctggttgatattttcatatcagtttgaacaagagggcagacctagagagactgtcgtcgttttctgactggtggagttgagggaaacgtgagggttgctgggaagtgaagaccccgcgacttgccgtgaaatctcttctacttaaagagcaagacatgtgaattaattctttcagggagggatacaactgcatgcaggtgatggaaataatgggcgtgggaaatgtctgtgccgtctgagaggcactgggcttgctttgacaagagtagcagaactgtcattgctttgggcttagggatattcgaatgtgtgagggcaagtgggatcagatatctacttccaggtataatttgggtaggaaagagactcatgcagaaagaagccctggaaggccagagcatcgtggtcagaggtgttgcctttggagggtcattgctgccaggagccgaatacccactgtatccaataacattcatggtcaggaatggtggctcacacctgtaatcccaacactttgggatgcccaggtgggaggattgcttgaggccaggagtttgagaccagcctgggcaacacagtgagaccccgtctctacataaaattagaaaaaaacaattaactgggtgtggtggtgtgcacctgtagtcccagctagtcaagaggctgagacaagaggatctcttgagcccaggagctcaaggctgtagtgagccaagatcgtgccactgcacacaaacaattatgtgacctcgggcaagttgctttacctctttacacctcttaatttccttatctgtaaaatgaggatgataatttcttcctgggtctgttgtaataattaatacatcaaagcacttcatgtctggaacagtgaagataccctgctatgactattaaggatagtatacatggaataagacacaggaacttctaaatgcttttgaccatagatttaggttctgagttttaagaatttaactcaggaaattgtaacaccaaaaatgtcatgtgaaaaatggtggtgacaaattttcttgaatcattagccttagaggttgggcagaaagcaaaaaattattcttgatgctactctatagaaagagaagacagaaaaagagaaagatgtatttttaaagtctatatccataactttatttgaccaaactctaatttaaaaattatgtttcagaattccaaaaaccaatatgcctaccttccaaaggtgacacaagcacaatttataccaactgttgggtaaccggatggggcttctcgaaggagaaaggtaagcatgacgctttaaatattgcttctagagtaagtctcacatgttgaaatacatggagtgggtcgttttaatcggtttctgtctgaaattatatctaaactctttatctttcctatctatttattcccaaatatttattcagttattcttaaaaaatgtatttttgctttggcttgaaaaaaaattttagggagacttttaagcatcttacttcattataaagatcagttgcttgactttgcatgaagcagattgggcccttctagggctgacaagcccgtgcaagaccacccgctcctcagtgttagtagcgttcccgtctcccaaaaccatgttctcccttgatgctaatggccgggagcacaggcaggtgtgtcgtctcactatggagaataatatttgtgtcattctttacagaagaaggtagcttgccaaactgtctccatctttcccgattcagtcttttgttcaagtaattcacatttttagattttttattggtaatctgagacaagaagaaatttaaagtaatcttcactaagccatgaaagctcccaacattgttctccatgagagatgctggcctgcatttattcaaaaacaaaagacccctctgttgccaaagctcggagggcttttcagaaacgatatagttgtaaattataattttgaatatataaagcaaaaaaatgaaaagtgagaacttccaggctttggattgttgtaggtgataaatataaaatgggatttctggggggctgctactgagatgaggggatggcagaaaacatggaagcaaggtctctggtcagcccagggtgctgggcttgtcccaacaccacgtaggcaataagaggacagtacagggtgccgtctctctccctcttcctctctctgtctctctctctctgtgtgtgtgtgtgtgtgtgtgtgtaacactaccttcccaatttttactgtctatttgtattcaaagataaggtccttatgaaaaatacactgctctgattcactttaaaacttatttccatatttattatttattgtgggaataataatattcccaatattattatttattatttaagttattattattaacttccctctgaggttatatattggttactcacaggtgaaatccaaaatattctacaaaaggtaaatattcctttggtaacaaatgaagaatgccagaaaagatatcaagattataaaataacccaacggatggtctgtgctggctataaagaagggggaaaagatgcttgtaaggtaactcatgagattatgaaaaacacaataggctgcttgagaaaattcatttcaaaatatattttccaatagcataattcaatcatagtttttaaaaaaattcagagacaaatgatctgataaattgataagcaacttttaacaaattgaatatacataatatatatttatattatttatgatatatgtcacaatctatgcatgtgctatttaagaggggcaaatatacatgcaataattgtgctagaatataaaaacattagacttcatcattgggatgatgatatcaagatttctttgttagatttatttcagatagaaaaggggatacgaaaaatgcaggcacatgagatacttggagaactttaagaaagagtgagtgtgtgtgtgtgtgtgtgtgtgtgtgtgtgtgtgtctggcaagcaaggtcttgcacacacacagcactttgggaggccaatgcaggtggatcacttgagcctaggaatttgagaccagtctgggcaatgtgatgaaacccatctctacaaaaaaatatgaaagtatctgtgtgtgtgtgttgctgtgtagtggactacagaactttagaggcagtcacttatttgaatcccattgtcgtaactttctactattttatttttccactgtgactcagggagattcaggtggtcccttagtttgcaaacacaatggaatgtggcgtttggtgggcatcaccagctggggtgaaggctgtgcccgcagggagcaacctggtgtctacaccaaagtcgctgagtacatggactggattttagagaaaacacagagcagtgatggaaaagctcagatgcagtcaccagcatgagaagcagtccagagtctaggcaatttttacaacctgagttcaagtcaaattctgagcctggggggtcctcatctgcaaagcatggagagtggcatcttctttgcatcctaaggacgaaaaacacagtgcactcagagctgctgaggacaatgtctggctgaagcccgctttcagcacgccgtaaccaggggctgacaatgcgaggtcgcaactgagatctccatgactgtgtgttgtgaaataaaatggtgaaagatc

SEQ ID NO: 15646 - DNA, 49009 bp, Homo sapiens
gctgcaacctacggggtgtacttgggaacgaggggtgaagcggcccaggtgagggtgagtagctgtgtcggagcgccacttccccaaggtcaggtgccgaggctgggagggtcggctaacggttccgagcttggttgtgctagagtgcttaatgagtttgatgctactaagtataacggagtggctgcacagaatgattgagccgcccgcgggaatcaactgcgcgtgctgctcgctgattctcgctcggacactggggctggtcctgtctgcacccaaatccccctcccacgaccgcgccggtggagatgatacccgagacaacagaattctggacagatctggggttggaattgggtccccagactccaactctgcagctccataaatcccgctgggtcctcgcaaattccctggctgataacagtaccggcaaccaaattaaaaaataatccatacagtggaatactgtgcagccattaagacgaacaatgtttaatatgcactaatgtagggtgacttctaagataccttaggttaaaaaaggaaacaacagtaaaaacagcgttgggccggttgcggtggctcacgtctgtaatcccagcactttgggaggccgaggcgggcggatcacgaggtcaggagatcgagaccatcctggctaacttggtgaaacctcatctctactaaaaatacaaaaaaatcagccgggcgtggtggtgggcgcctgtagtcccagctactctggaggctgaggcaggagaatggcatgaactcgggaggtggagcttgcagtgagccgagatcgcgccgctgcactccagcctgggcgacagagcgagactccgtctaaaaaaagaaaaaacagcgttgatgggtgctatccatctttgcgtagaaggacgcctgagggtgggcgtatctgcgggtgtgcgcgccagctgtctgataagatgcacaagaagttgttaattgcggttgtctccgacagaattggggtcttgggtacctgggccagggcgagaaatttactaccatgtgcacagatagataattaaaaataagatgatgaagatagtcgtggctcccatccatcacgtgttaagccaatgcctagtttcacttctgttgggaggtcttatttttcccttttaatagaagagaaaagaaccttagagaggttaggaaacttagcaatatcatagccagggccgggcgcggtggttcacacctgtaatcccagcactttgggaggctgaggcgggcggatcacgaggtcagtagatcgagaccatcctggctaacacggtgaaaccccgtctctactaaaaatacaaaaaaattagccgggtgtggtggcgagcgcctgtggtcccagctactcgggaggctgaggcaggagaatggcatgaacctgggaggcagagcttgcagtgagctgagattgggccactgcacttcagcctgggcaacagagcaagactccgtctaaaaaaaaaaaaaaatcatagccaggaagtggagaagctggaatttgaaccctgggagatttacactaatgcccatgatctagcttatccctcgccactgagatgctttttctgttgtcagtcacgcaacacccgtcttggggcctggcacacaacaggcatccagtaactatttattgacatgatgtgtggtgtgaaaagcaaacgttgaaggtcagagcccaggcttaaagtccagggcttgggcacctctttccaacctgtggactgtgggcctgccaggtactccgtgggcctccatgtccccgcctgtaaaatgaacaaccagaaccacagttgtagacagtgaatgttcccacgtattatactttgtattttacacgcagataagtctcattttacagataagtgaggcacagagagattaagaaagttgccagaagggggttcctacaggtctccctccctccctaggaaggctgctgggctcccaggcctctcccttagcttcccaggatcatctgtgctaatgcctgggggacctactctgtgctgggtgagctgccagaggctgaggatctggtggagaacaggtcaagcacatagttcctgtccttggagttgagcgcccccgtgctgagtactttgagggcggaagcccaggtcttgggaccacctgggaggggacatgtggcttagcctgggtggagtcagaaggggcttctccaaggaagggactttcaatgtgactggaaactaggatgtccagaaggagaaatgatgaggctggagactcaaggagagatgggctcctaccctggacttggccttggtgtccactaagaaactgagggtgaccaacaggattggagaatatacaagttagacccattcagtctggcttcagcaggaatctttcctcccggagaatgcctccattaggtgccaaccaccagaacgccacactaacctctccaagctccaaagagtagggcgcctgattttataatccaggtgggggcgataaaggaatgcaggagccttcacagccatgaggcagtcactgtaactcctgccagaacagacctggggccacatcccactcctggatggcactgccagttccctgcataattcctttttttttttttgagacggagtctcactctgtcgcccaggctggagtgcagtggtgcaatctcggctcactgcaagctccacctcccgggttcactccattctcctgcctcagcctcccaagtagctgggactacaggcacccgccaccacgcctggctaattttttgtatttttagtagagacggggtttcaccgtgttagccaggatggtctctatctcctgaccttgtgatccgcccacctcggcctcccaaagtgctgggattacaggcgtgagccaccgcgcccggcctcccggcataatttttaaaatgctcatcctatgccctcattccccagcttgcagctgggggcctcctggtgcttttctgggacttcgagtaagtcatttcccctctctaagcctcagtttccccacctgtaaagctgatgccacctcctccaaggctcccgcgaggctatctgcctatctgttgtgtgttcctttaatgtatgggagtgagattgtggtttttgaatctgggtcctgtgccaggaggaataagtggtgagatacctactgtttgtgtcactcaggtcttccaccaacccctccagcctgtaaacctgccgtctggactccagaagtcatttctctctcctctgccaattcctaagcccagggggactgtgtctgagtgacgcaattgttagatctcctcagacaggctgttctctccaggaaaacattggctcaacaaattgtcaccaaacatttgtcttcagggaattctgttttttttctatcaaaaaaaatttggattcattatataataagagatttttcattttgcttggttactaattttatggaaagcctggtaggtttaaatgttaatagcttgttgactgggtgtggtggttcatgcctataatcccagtaatttggaaggctgaggtgggactatcgcttgagctcaggagttcgagaccaacctgggcaacgtggtaaaaccccatctctatcaaaaatacaaaaattagctgggtgtggtggcacgtgcctgtggtcccagctactctggaggctgaggtacaagaatcgcttgaaactgggaggcagaggttgcagtgagccgagattgtgccactgcactccagcctgggcgatagagcaagactgtctcaaaaaaaaaaaaaagttaatagcttgttgtcattgacaagtggctgtgagccaggacccacagtatattctctgtggattcttgtcaccttcattgtacagatgaggaagctgagcccccaagaggctgcggcctggcatgaccaaggtcccatagctagtttatggtggagctgggactatttgatccaagtccaaggtttggtcttctgtggttattcatgcactagactggtcttcctgggcatggtatccccagttctgtaccctttctctagaggtgccacgatgtgtgttgtctcagtaactgggagtctcctggcattttaagcccagggatgctaaacatccttcaaggctccagatagctctccccagtgaagaactgactcatctcaaattctaagtgtgcccctattgagaagctccaaaaccgaatgtcataattgacttgagtgatgtgacgtggggccaccctgggaaggcatggtcacctcgcctgcccttgtaagcagccatgcaaggtgaagttggacaagacatggctcctgtccccaaggggctggtggtctcctgtcagccctagcacccgcctgagaggagatttcacgggacagaatttggactttggaaataggcaaaccagggtttgaatcacagctggagctctctaggctgagtgagttttccttgttctccttttgagcaaaatagagtaaataataccatcctaatcagctgtgatgaggattagagaatttagcatggggttgggggagagggtcaggcacaggtaggtgctttctgagttcagcaaagggcctgggtggacacagaagcttcagagaggaggtacaggtggggctaggccctgctagggattttggattggagggtatgccaggcaggggaaacagcttgagtgaagatgggcaacatttattcaaaagcaaagggtggctgggcacagtggttcacacctgtaattccagcaatttgggaggtcaaggcaggcagatcaccagaggccagaagttcaagaccagcctggccaacatggtgaaaccccatctctacaaaaatacaaaaattagccgagcatgatggtgggtgcctgtaatcccagctactcgggaggctgaggtgggagaatcacttgaacccgggaggcagaggttgcagtgagccgagatcgtgccattacactccagcctgggtgaaagagtgagactccatctcaaaaaaataaaaataaaaataaattagctgggcgtggtggcgtgcacctgtaatcccggctacttgggaggctgaggcaggagaatcacttgaacccggcaggtgggggttgcagtgagccaagattgtgccactgcactccagcctgggtgacagagtgaagagagaggctctatctcaagaaaaaaaaaaaaaaaaggccgggtgccgtggctcatgcctgtaatctcagcactttgggaggccgaggcaggcggatcacgaggtcaggagattgagaccatcctggctaacatggtgaaaccctgtctctactaaaaatacaaaaaaaattagcagggcgtggtggcgggcgcctgtagtcccagctactcgggaggctgaggcaggagagtggcgtgaacccgggaggtggagcttccagttagctgagatcacgccactgcactccagcctgggcgacagagccagactctgtctcaaaaacagaaaaaaaaaaaaaaaaaagaacaaaggatgactgggtgtggtgtctcatgcctataatccaagctgtaatcccaggactttaggaggccaagaccagaggatcacttgagcccaggagttcaagaccagcctgggtaacatagggagaccctgtctctatttttttttttttttaaaagcaaagaatttgagctgggggttggggcatgcacttatagtcccagatactcaggcggctgaggcaggaggatcacttgagctcaggagttcaaggctcctaggtgacaaagcgagaccctatctctaaaataaaaaaagagtaaagggagggaaggtggaggctgccaagcctggattccagccggctccaaacgccaggctgaggaggctttggactttgtccagtgtcaccacaggcttctgggcagagctggtccaatgggggttgggggacagtggcatagctgacatcagcccctgggttattgacatcagcccctggaatgcatcagtgatgcattccacgggcccaggggtcatccactgccttcgggtcaagcaaatggccagtagctgcccaggctgatagaggtgtgtgttggaggggggcacaggccactggccctcggcccctggcctggcagcagggaggcctcagatcttagatgcctgagagctaccccagaagggtcctcggcacagctatggtccccatgcctagtggtgctgggcctcctcggtgctgccagatcacctgagctgcctccattgcagcagttatcccacacatttttttttttttttgaagcggagtcttgctctgtcacctggacagctgtcaggctggagtgcagtggctcaatcttggctcacttcaacctctgcctctcaggttcaagtgattctcctgcctcagcctcccgagtagctgggactacaggtgcccaccaccacacccggctaatttttgtatttttgtagagacgcggtttcaccatgttggccaggctggtctcgaactcctgacctcaagtgatctgtctgcctcggcctcccaaagtgctgggattacaggcgtgagccaccacgccagtgagccaaggtcacacagctgcactccggcctgggcgacacagcaggactccatctcaaaaacaaaaaccaaaaaaaaaaaaaaaacaaaaaaaaacaaattgaacataaatggaataatggaagaaatagctagctgtggggatggcaactctgcagctgttcacagtttgggaaacctgagatctgcatccagagaaacttcttgaaggcaaacttatcaacataaatgaggaaagtggttctaaagaaaaagataatgacccagaggaaataataccagcaaaacttcacattaaaggaactccctgggctgagcgcagtggctcacgcctgtaatcccagcactttgggaggccgaggtgggcagatcacttgaggtcaggagttcgagaccagcctggccaacatggtgaaaccccatccctactaaaaatacaaaaataagtcgggcatggtggtgcgtgcctgtaatcccagctactcaggaggctgaggcaggagaatcgtttgaacctgggaggcagagattggagtgagccgagatcacgccactgcactccagcctgagtgacagagcgagactccgtctcaaaaaaaaaaaaaaaaaaaaggcaggattatctcaccacaaaatgtacagaacaggaactcccagagatatttcacaacattgaaaacaaaggatgactaaggatgactcgtattcatcaagacatagaagatgtcaggtgcagtggcttacacctgtaatcccagcactttgggaggctaaggcaggatgattgcttgatgccaggagttcaacatcagcctaagcaacatagtaaaacccccatctttacaaaaaaaaaaaaatagctgagcatggtggttcgtgcttattgtctcagcaactcaggagaatgaggtgggaggatttcctgagcccggtaggttgaggctgcagtgagccgagatcacaccactgcactccagccttggcaacaaacatagaagaaatgctcattctgtatcctaaattaaaccactggaagactgcagcactgttcagttcagaatattctttttttttttttggaatgaagtttcatttttgttgcccaggctggagcgcagtggcgtgatctcggctcactgcaacctctgcctcctgggttcaagcgattctcccgtctcagcctcctgagtagctgggatcacaggcgcccgccaccacgcctggctaatttttgtgtatttaatagagacggggtttcaccatgttgaccaggctggtcttgaacttctgacctcaggtgatccacccgcctcggcttcccaaagtgctggggttacaggtgtgaaccaccacgcccggcctcagaatattctttttttttttttttttgagacggagatttgctctgtcacccgggctggagtgcagtggtgcaatctctgctcactgcaacctctgcctcccaggttgaagcgattctcctgcctcagccttccgtgtagctgggattacaggtgtgcatcaccatgcccggctaattttttgtatttgtatttaattttttttttctttttgagatggagtctcgctctgtggagtgcagtgccgctcactgcaacctctatctctcgggttcaagcgattctcctgcctcagcctcccaagtagctgggatgggattacaggcacctgccactacacccagctaattttttttgtaattttagtagagacgggatttcaccatgttggccagcctggtctcaaactcctgacctcaaatgatctgcctgcctaccggcctcccaaagtgctgggattacaggagtgagccatcgcgcctggcccaagctatttgcaataaaattttttccttgataaacttttataacgaaagaaaacgtcttaattttcagtgttgctaatattaaattacagtgtactaagttcttattagttttttttttttttcattttctatacttttttatttttaaatgacagagtctcactttgttgcccaggctagtctccaattcccgggctccagtcatcctcttgccttggcctcccaaagtcctgggactacaggcatgagccaccacacctgggctacatttttaacagatggtaagagagttttaaaaggtcacagaacaattgtcttattaattattattatccaataataattttctcgattattaagttctctttgcacaatttaagtttacatggtcttttttttttttttttttttaaatggagtctcactctgtcacccaggctggagtgcagtagtgcgatcctggctcactagaatctttgcctcccgggttcaagcaattctcctgcctcagcctccgaagtagctgcgattacaggcacatgccaccatgcccggctaattttttttgtattttcagtagggacggggtttcatcatgttgaccaggctggtttcaaactcctgacctcaagtgatctgcctgcctcggcctcccaaagttctaggattacaggcctgagccaccacgtctggccaacatggtctttttttttcttttgagacggagtctcgctctgtcacccaggctagagtgcaaacggtgcgatcttggctcactgcaacctccgcctcccgagttcaagctggtctcctgtctcagcctcccgagtagccgggattacaggtgagtgccaccattcctagctactttttgtattttattagagacgggctttcaccatgttagccaggctggtctcgaactcctgacctcaggtgatccgcccacctcggcctcccaaagtgctgggattacaggcatgagccactgcgcctggcctcaacatggtctttttctgttttgctttgttttgttttttttgagtcggagtctcgctctgtcacccaggctggagtgcagtggcacaatcttggctcactgcagtctccacctcccaggttcatgccattctcctgcctcagcctcccgagtagctgggactacaggtgcacgccaccacgcctggctaattttttgtatttttagtagagacagggtttcaccgtgttagccaggatggtctcaatctcctgacctcgtgatccacccacctcagcctcccaaagtgctgggattacaggtgtgagccaccatgcccagccaattcaacatggtcttttttttttttttttttttgagacagagtttcgctcttgttgcccaggctgccgtgcagtggcacgatctcagctcactgcaacctccgcctcccagttcaagtgattctcctgccccagcctccggagtagctgggactacaggcgtgtgccactatgcccagctaatttttgtattttttttagtagagacaggctttcaccatgttggccaggatggtcttgatctcttgacctcatgatccacccgcctcagcctcccaaagtgctgggattacaggcatgagccaccacgcccagccaacatggtcatttttataatgccacactactgtggaaagtaaagactacctgaatatgtatgtgtatgtgtatatgtatatatatgtatgcatcctcacatatgtatctccacaattgattttgtttattttttgagacaggatctcactctgtcacccaggctggaatgcagtgctgtgattatggctcactgctgcctcgactgcctgggctcaagcaatactcccagctgagcctcctgagtagctgggaccacaggcatgcaccaccacacccagctaatttttaaaaaattatttgtagagacaaggtcttgttatgttgcccaggctggtctggaaatcctgagctccagtcctcctgcctcggcctctcaaagtgctgatattacaggtgtgagccacctttccaggtgtgagccaccacatccagctttctctacaattaaaaaaaatgcaaatagagttatattgttcttcaacctgccctttttgtttgtttttgtttgttttgttttgttttgttttaagacaaggtctcactctgtctcccaagctggagtacagtggcacaatcttggctcactgcagcctcaaccttctgggctcaagcaatcctcccacttcagcttcccgagtagctgggactacagacacgtaccaccgtggccagctaattttttgcattttttgtagagatgggatttcaccatgttgcccaggctgatctcgaactcctgagctcaagcaatctacccgcctttgcctcctgaagtgctgagattacaggtgtgagtcaccgcggccagcctgtctctacaatttaaaaaatgtaaatgggttatattgttcttcaacccttttaaaaaattaccatacttttttttttttttttgtaattgaggtgaaattcacctaacatacaagtaactattttaaggtatacaattcagtggcatttagtgcattcacaatgttgtacaaacattatgtcactgtagtttcaaaactttatcgttcccttaggaaaacactccgtacccatcaaatagtcactccccattacctcctccctgtcctctggttaccactcatctgctttctgtctctatagacttgttattctgaatatttcacagaaaaggaatcatagctatgtgaccttttttgtccggcttctttcacttagtgtgttttgtttgtttgtttgtgacagggtcttgctctgttgtccagactggagtgcagtgtcatgacctcagctcactgcaatctccacttcccaggctcaagcgatcctcccacctcagccatcttattatctgggactacaggcacacaccaccatgcctggctgatttttgtattttttgtagaaacaaggttttgccgtgtttcccaggctggtgtcaaacaatgatcctcccacgtcagccttccaaagtgcagagattatagtcatcagccatgtcgccctggcctcacttaatatatttttgaggttcatctaagttacagcatgtgtcagcacatatttcattccattttgtggctgaataatattccatggtacagatatgttacaatttatccattcatccattgatggacaatttgggtttttttcacctgttggctatgatgaatactgttgatataaacatttgtgtacatgtttctgtgtggacatatgttttcagttcttttgggtatatacctaggagtgaaattgctaggttgtaaggtacttctatatttggacttcataaaaattaaaaagttttgtgtaccaaagaacattatctgccgggcccgggtaattgcagcactttgggaggctgaggcggggggatcacctgaggtcaggatttcaagaccagcctggccaacatggcgaaaccctgtctccactaaaaatacaaaaattagctgggcgtagtggcgaacacctgtagtcccagctactcgggaggctgaggcaggagaatcgcttgaacccaggaggcagaggttgcagtgagctaagatcacgcctctgcactctagcctgggcaacagagtgagactctgtctcaaaaaaaaaaaaaaagtacattatcaagaatgtgatcaggctgggcacaatggctcacacctgtaatccaagcactttggaaggccgaaacgggaggattgctagaggccaggagttaaagcccagcctgggcaacgtggtgagaccccatctctgcaataaaaattttcgaagttgttggtttattttgagttaatttttgtagatggaacgaggtgaaactcctgcttcattcttttatatgtaaatatccagttgtcccagcaccctttgttgaagagactattctttcctctattaaatgggcttggtgccgggtacggtggctcacgccagtaatcccagcactttgggaggccgaggcgggcagatcatgaggtcaggagatcaagaccaccctggctaacacggtgaaaccccgtctctactaaaaatacaaaaaattagccgggcgtggtggctcgcgcctgtagtcccagctatgcaggaggctgaggcaggagaatggtgtgaacccgggaggcagagcttgcagtgagccgagattgtgccattgcactccagcctaggcaacagagcgagactccatctcaaaaaaaaacaggcttggtgcccttgtcaaaaatcaataaggccaggcgcagtggctcccacctgtaatcccagcactttgggaggccaaggcctttgtattgcgtgagtccagaaatttgagaccagcctgggcaacatagtgagacccccgtctctacaaaaaattaaaaaattggccaggcacagtggctcacacctgtaatcctaacactttgggaggccaaggtgggcagatcatgaggtcaggagatcgagaccatcctggccaacatggtgaaaccccgtctctactaaaaatacaaaacttagctgggcatggtggtgtgcgcctatagtcccagctactcaggaggctgaggcaggagaatcgcttgaatcccagaggcagaggttgtagtgagccaagatcgtgccacagcactctagcctggcaacagagcaagactccatctcaaaaaaaaaaaaaaaaaaaaattagccaggcatggtggcatgtgcctgtagtcccagctactcaggaaattgaggcaggaagattgcttgactctatgagaacaaggctgtagtgagccgtgatcgcaccactgcactccatcctgggtgacagagcgagaccctgtctcaaaaaaaaggaaaaaaagaaaaaaatgtccagctacttgggagactgaggtgagagaatcacctgagctcaggatgtcgaggctacagtgaaccgtgattgcacacaccactgttctccagcctgggctacagaatgagaccctgtctcaccaaagaaaaaaaggaaaaaaaaatcagtgggccaggctgggcatgatggctcacgcctgtaatcacagcactttgggaggccgaggtgggtggatcacctatagttccagctactcaggaggctgaggcacaagaatcggcagaggctgcagtgaatcaagatcgtgccattgcactgcagcctgggcaacagagtgagactctgactcaaaaaaaaaaaaattagtgggccatagatgtttgggtttattactgggctctcaattttattccatgggtctatgtctgtctttatggtaataccacactattctaattataagctttgcagggccaagcgcagtggctcacgcctgtaatcccagtactttgggaggccaaggcgggtggctcacgaggtcaggagatcgagaccatcctggctaacatggtgaaaccccgtctctactaaaaatacaaaaaaattagctgggcgtggtggtgggcacctgtagtcccagctactcaggaggctgaggcaggagaatggcgtgaacccgggaggcagagcttgcagtgagccaagatcgcgccactgcactccagcctgggcgacagagcgagactccgtctcaaacaaacaaacaaaaaaacctttgcaataagttttgaaatcaacctgcatttttcacataacctgaatatctttccacgtcagactgctaaaagcaatcttattccttttagtggttgcacaatggttcattctatggttaaaccacgcagtgatacagtgatattgtgatacagcgatactgaactagccccaggttgatggatatcagattgcctccagtttttttctctcatgctgagtgctgcgttaatcatccaagtgtatatttttgtatatacgtgtgaatattcctgtaagatcagcttttagggctgggtgcactggctcacacctgtaatcccagcactttgagaggtcaaggtaggagaactgcttgagcccagcagtacaagaccagcctgggcaatgtagtcagaccttgtctctactaaaaataaaaagttagcccagcatggtggcgtgcacatgtggtcccagctacttgggaagctgaggtgggaggatggcttgagccccagaggtgtaagctgcaatgagccataattgtgccactgcactccagactgagtgacagagcaagaccctgtctcaaaacaaacaaacaaaaaacttttaggagaggaagtgttgagtcaaagagtggtatgtgttattattaaattgccctccaaaacttacaccagtgaacactcttaacctagtgcttgcttttcaaatcacaaattctcaccttttagtacattgtaggatcagtttggtgggtctcaagtttgtcttggcccatctgagaggcaaaaaatagtacttcgctttcatttacgtatcactaattatgactaattttcagcatcctttcaaggttattgacttttttttttttttgagacagagtctcgctctgtcacccagactggagtgcagtggcacgatctcagttcaccacaacctccgcctcctgggctcaagcgattctcctgcctcagcctcccaagcagctgggattacaggcgcacatcacggctaatattttttatatttttagtagagacagggtttcaccatgttggccaggctggttttgaacacctggcctcaagtgatctgcccgccttagcctcctaaagtgctgggattacaggcatgagccactgcgcccggcgactattttcttttcttttcttttctttttgagacagagtctcgctctgttgcccaggctggagtgcaatggcacgatctcagctcactgcaacctccacttcccaggttcaagtgattatctcacctcagcttcccgagtagctgggattacaggtgcctgccaccacacccggctaatttttgtattttagtagagacagggtttcaccatgttggccaggctggtctcaaactcctgacctcaggtgatccgcctgcctcagcctcccaaagtgctgggattacaggcgtgagccaccacacccagcgactatttgcttttgtgaatttcccatttatatctttttcacactttttcttattgagatgctggtcttttgttgtcgatttatacaaatatttgcatattaaggctcatattatattaaaatggcccagttacttgtttgtctccttgattagattgtgcgctccttggaggaaaggaaggtatcctatcacccttgtatacatggtggctagcttagggaatgaatagcacataataggaattcactgaggagatgtacacttaccatatggcaggctctgtgcaagatgttgagaataaaaagatgaacagaagagaatctttgttctaacaaagcttacagtctggtgcaagcgatagacattcattctcattctgcaggtttattgagcagctgctctgtgccaggtgcataacgcccattggaagagccagcctattaggatgagaaaaatgtcaggactgggacttcgctaacctggtcctgggaaatctgggtgggtcagttccccatccctggttatcagtatccccatcaataaaatgtgagccactggaccaaattctctcatttcccattgagcatccatgcatctgtgctgctttggcttttggaaagtaggagtcagagtcctgagttcaaatattggctctgtgctgggtgtggtggctcacgcctgtaatcacagcactttgggaagccgaggtgggtggatcacctgacgtcaggagtttgagaccagcctggacaacgtagtgaaaccccacctctactaaaaatacaaaattagcctggtgtggtggtgcatgcctgtaatcccagctacttgggaggctgaggcacgagaatcgcttgaacccgggaggcagaggttgcagtgagccaagatcgcaccattgcactccagcctgggcaacaagagcgaaactctgtctcaaaaaaaaaaaaaaaaaaaatatatatatatatatatatatatatatatatatatatatatatatatatatgtaggctctgctacttgttagctgtggccttgggtgtgtgacttagcctttttttttttttttggtgtgggagggatgtggggagggacatggtcttgctttgtcactcaggctgcagtgcagtagtgcaattatggctcacttcagccccaacctccaggctcaagtgatcctcccacctcagcctcccgagtagctgggactacagacgtgcaccaccactcccagataatttattattttttgtagagattgagtctcactacgttgcccaggctggtctcgaactcctgggctcaagggatcctcctgccttggcctctcttgcaggcataagccactgtacctgaccacttagcctcttgaaggaatctttcttataggattaaaagtgatgggaagccaggagcagtgactcacacctctaatcccagcactttgggaggcctaggcaggcggatcacttgaggtcaggagttctagaccagcctggtcaacatggtgaaaccctgtctctactaaaaatacaaagattagctggacatggtggtgcacaactgtagtcccagctactcgggaggctgaggcacaagaatcacttgaacatgggaggcggaggttgcagagagctgagatcgcgctgctgcacttcagcctgggcgacagagcacgactttgtcccccaaaaaataagtaaataaataataaaagtgatgggacctgatttcaagtagtcaaaatcgcagagacagcaaatgggctgggctatgggccagagggtaaagggatgtaattgtttaatgggtacagagttgtcagttttacaagatgaaaacagttcccaaaactgtatacctgtacatagttaagatggtaaagtttatgatatgtgtattttaccaaaattttttaaatgaaaaactttttttttttttttttttttgagacagagtctcgctctgtcgcccaggctggagtgcaatggcgcaatctcggctcactacaatcttcgcctcccgggttcacaacattctcctgcctcagccttccaagcagctgggactataggcacccgccaccatgcctggctaatttttttttcgtatttttagtagagacggggtttcactgtgttagccaggacagtctcgatctcctgacattgtgatccacctgcctcggcctcccaaagtgctgggattacaggtgtgagccaccgcgcccggcctgaaaaacatttttaagtggtgggacgtgtagggctccacggggcacctagcacaggaaagcgtgtggtaaataaaaggtgactgccagggctgttgaggagctgactagggaaggcctgcttcctagaaaaggggtgaggcgcagggcattggagggaggtgtgcctgggaggtcaggagtcctgccttatgcgggaacctggagcagcaccctccctgctttgggcctcctctgtgaagtgaggcgtagtcccctcctggggccagcaggttgctctgtgacctgggccagcaacctcaaagccacgaggggcctggctccttgcgccccctgctggccgactcgggaataacacacccacaagcccccaagttgctcccaaccaacctggccaagttgctgggttaaggcagcctacgtgccccctgtacccttctgctcttggctgagaaccccttatggcttctccctccctccctccctcctaagttcctggaacctaccttcaccacacccataagctcacagacacagacacagagatgtgtgcacatgctcaggtgcaagctcttgtatttggatccttttgttgttttggtttttttttttgtagagaaagggtgttgttatgttgcccaggctagtcttgaacttctgagctcaagcgatctgcccacctcagcctcccaaaatgctgggattacaggtgtgagccaccatgcccagcctccatgaattattattatttatttcatgcatagaaaattgatgttcagagaggtaaaatggcttgcctcatgtcacactgccaaggtcatcaaagcctgtgttctaatccttcccccgtctctcagcactgccctcctccttgtgtgtctacttggggcctgatcctgggtgtggtaatagaacagacctaccctgtggagggtgcaacataacattcacttctggccgggcatggtggctcatgcctgtaatctcagcactttgggaggccgaggcgggcggatcatgaggtcaggagttcaagaccatcctggccaacatggtgaaaccccatctctactaaagacacacaaaaaaattagccgggcatggtagcgcgcgtctgtaatcccagccactcgggaggctgaggcatgagaatcacttgaacctgggaggcggaggttgcagggagccgagatcatgccattgcactccatcctgggtgataaaaagatagggcgagactctgtgtcaaaaaacaaacaaaccaacattgactcctatgcccagtcttacccggccacacataggcccgatgcactgccagtcccctgcaatggaagccgatcctggtttccagccccacccccaaggctgcaagattgtttaagcatatccgtgtgcagcacaggtgccacccagcttcttgacccccatggagccagtgatctggacacacagaaggcaccgcctttcctgagaactggcagtgcccagagaaggcaaggggccaaggctggggcagggcagagaagagggccacagctgggatctgtttctcctgagtttctgccctgtgctggcaccaggtgtacaatctgctataaggcctgcaggagctcaatgtaagtgttgttattttagtatgttaggaatttcctcacctgttaatgagggtgaggatagcacttgctttacagagttgttgaaaggatccagtgacaaaagtattgggacagagtgagtcctagtaaattaaagctggttgtattattaatattattcttggccaagtacagtggctcacatttgtaatcccagcactgggacgctgcggcaggaggatgccttgagcccaggagtttgagacaagcctgggcaacacagtgagaccacatctctacaaaaaatacaaaaattagctcaattcacttgagatgatgaagacatgacttagaatgttgtcacttcaggaaaaaaagactgatttgatggacacagagtccgatgtgggggagagtgtcagagagagaattgacctaccaggcaactgtgggtttttaactcagtggtcagaaagcagtagagtgggtcccggtagggtgaaatccagctcctcctgtagtcctagaagaagtagcaagatgttgggtctaggacaggaaatggctaacctaaagagaccctttggcccaggatggttcccatcccaagacacccctcagtcctgggccagcagatagttggtcttcatagaacaggcagagggcacagagtgcctcccatgaccagccctgggcttgggcctgcccttgggccgctcatccgtttagctgagttacctgagctaaagcaccagactccctcccttgaggtgacaccaaggaatgtccctcctgggatggcagtaacactaccctttgttgctcaaggcacaggtacttagtttcaggggtcagagtacatacttcaggcctctcctgggaaccgctctcaaatctaaggaacgagagggtgagctctggcatcgccttgtgtgttagcccattctcccactgctataaagaactgcgcaagactgggtcatttataaaggaaagagatttaattgactcacagttcctcatggctggggaggcctcaggaaacttaaaatcatggcagaaggggaagcaaacacgttcttcacatggcggcaggagagagaactgctgagcaaagggggaaaagctctttataaaaccatcagctctcatgagaactcactcattatcgccagcacagcagcatgggggtaactgcccccatgattcaattacctcccactgggtccctcccaggacacgtgggaattatgagaactgcaattcaagatgagatttgggtggggacacagctcaaccccatcaccttggatttgattcctaaggctgttgtaacaaactagccacacttcattgtattgcgtttggcagatatcacggtctttgcaaattgaagctttgtgagaaccttgcaccaagcaagtctattgttcccattgttccaacagaatgtgttcccttagggtctgtgtgtaattcccacaatagttcaaactttatcattattattatgtctgacacggtgatctgtgatcagtgatctttgatattactattgtgcttgttttggggaaccacaaaccatgcccatataagatggtaaacttaataaatgcgtgtgggccggaggcagtggctcacaactgtaatcccagcactttgggaggccgaggtgggcagatcacctaaggtcaggagttcgagaccagtctgaccaacatagtgaaaccccatctctactaaaaatacaaaaattagccaggcatggtggaatgcgactgtaatcccagttacttaggctgaggcaggagaatcgcttgaacccaggaggcggagcttgcagtgagccgagattgcgcaactgcactccaccctgggcgacaaagcaagactccgtttcaaaaaaaaaaaaaaaaggctgaacaaactgaaaaaccagcggctctttttcagttcatcagaaaattaggtcacagggtaacctgctgcccccaaactggagaggcagaaaggtagatacagagaatcatgatttgccagagcagaaaccttccctggaatcagcacctgggtgggaaaacctgaactgcaactgacgaatgtctggcagcgtggatgtgtgctgctggttaatgttaggtggcagctggactggagtaaggaatacctagagaatggtgaaacatgacttctgggtgtgtctgtgagggtgtttccagaggagattggcgtgggagtcagtggactgagtggggaagatccgctctcaatgtgggtggcagtatgcaattggttcacggcttgaataaaaacaaaagaggagaaaattttcctctttctgtctctgtctctcctggagctggaagattctccttctcctgccctttggatatcaaaactctaggctcttcagccttggactgagaattatcccagtggcgtccctggttctgaggcttgcagacttggactgagccacgctactggcacctcttgcaaatagtctctcaggggacttctcagcctccattaattgcgtgagtcaatttccctataaatcccctctcatgcactttgggaggccgaggcgggtgggtcacgaggtcaggagatcgagatcatcctggctaacacggtgaaaccctgtctctactaaaaatacaaaaaattagctgggtgtgatggcgggcacctgtagtcccagctacttaggaggctgaggcaggagaatggtgtgaacctgggaggcagagcttgcagtgagccgagatcgcgccactgcgctccagcctgggcaacagagcgagattctgtctcaaaaaaaaaaaaaaatggctgggcaaggtggctcaccagcacgatctcggctcactgcaacctccacctcctgggttcaagcaattctcctgtctcagcctcctgagtagctgggagattacaggcatgcgccaccacacccagctaatttttgtatttttagtagagatggggtttcaccatgttgaccaggctggtctcaaactcctgacctcaggtgatccacccacctcagcctcccaaagtgctgggattacaggcaggagccactgcacccagctgagagtaacttttttttttgttgttgagacggagtctccctctgttgcccaggctggagtgcagtggcgcgatctcagctcactgcaggttcagcctcctgggttcacgacattctcctgcctcagcctcccgagtagctgggactacaggtgcccaccaccacacctggctaatttctgtatttttagtagagacagggtttcgccgtgttagccaggatggtctcgatctcctgacctcgtgatccgcctgccttggcctcccaaaatgctgggattacaggcgtgagtcaccgtgcctggccaagggtaactatttttaagtatgccagagcattcctccaaaatactctttttctttcttttcttttctttgctttttttttttttttgagatggagtcttgttctgtcacccaggctggagtgcaacgcacaatctcagctcactttagcctccaagcaattcccttgcctcagcctcccgagtagctgggattacaggtatgagccaccatgtccagctaatttttgtgttgttagtacagacaggatttcaccgtgttggccagtctggtctcaaactcctgacctcaagtgatctgcccacctcagcctcccgaagtgctggaattataagcgtgagccaccgggcctggcctaaaacattctttttctttttttgttttttgagatggaatttcacttttgttgcccaggctggagtgcaatggtgcagtggctcactgcaacctccgactctcggattcaagtgattctccagtctcagccttccaagtagctgggattacaggtgcatgccatcacgcctggctaatttttgtagttttagtagagatggggtttcatcatattggtcaggctggtctcagactcctgaccttaggtgatctgcccgccttggcctcccaaagtgctgtgattacaggtatgagccaccatgcccgggcttttttttttttttttttttatacatggtctcactctgttgcccaggctggagtgcagtggagcaattttggctcattgcaacctctgcctcctgagctcaagcgattctcgtacctcagcctcctaagtagctgggactacaggtgcatgtgacttcgcccagctaatttttgtatttttggtagagatggggttttgtcgtgttggccaggctggtctcaaactcctgacctcaggtgacccacccacctcagcctcccaaagtgctgggattacagacgtgagccaccgtgcccagccttggctgtttgtgtatcttttttggaaacattcagatttatgatttgcagatatttccttccattccatgggctgtcttttcattttcttaatgggtatccttgaagcacaaaagttcttaattttgatgaggtccagtttattttttcttttgttgtgtatgctttggatgttatgtctagaaccccaaggtcacagagatttattcctatgttttcttctagttttcttgttttagttcatacatttagttttgttttttgtttgtttgtttgttttgagacggagtctcgctgtgtcgcccaggctggagtgcagtggcgtgatctctgctcactgcaagctccgcctcccgggttcacgccattctcctgcctcagcctccagagcagctgggactgcaggtgcccaccaccacgcccagctaattttttgtatttttagtagagacggggtttcactgtgttagccaggatggtcttgatctcctgaccttatgatccgcctgccctggcctcccaaagtgctgggattacaggcgtgagacaccgtccccagcccatacatttagttatgtgattcactttgaattaatttttgtgtatggggcagggcacatggctcacgcatgtaatttcagcactttgggaagctgagtgaagcggtggcctgtccctccacacctgtgggtatctcatcaggtgggacgagagactgagaaaagaagtaagacacagagatgaagtatagagacaacagtgggcccaggagactggcaagcagcatatcaaggacctgcaccagcatcggtttctgagtttcctcactttttattgattattatttttattatctcagcaagaggaatgcagtaggagagcagggtgataataaggagaaggtcagcaaaaaaacatgtgagcaaaagaatctatgtcataattaagttcaaggggaggtactatgcctgcatgtgcacgtaggccggatttatgtttctccccgcccaaacatctcagtggagtaaagaataacaaggcagcattgctgccaacatgtctcgcctcccgccatagggcggtttttctcctatctcagaattgaacaaatgtataatcaggttttataccgagacattcagttcccaggggcaggcaggagacagtggccttcctctatttcaacttcaagaggctttcctcttttactaatctacctcagcacagaccctttacgggtgttgggctgggggacagtcaggtctttctcatcccacaaggccatatttcagattatcacatggggagaaaccttggacaatacgtggctttccaaggcagaggtccgtgcggctttccgcagtgcgttgtgcccctggtttattgagattagagaatggcgatgacttttaccaagcatactgcttgtaaacattttgttaacaaggcatatcctgcacagccctagatcccttaaaccttgattccagacaacacatgtttttgtgagctcaaagttggggcaaagtggctggggcaaagttacaaattaacaacatctcagcaaagcaattgttcaaggtacaggtcaaaatggaatttcttatgtcttccctttctacatagacacagtaacagtctgatctctctttctttgccgtacatatcccccttttctttttgacaaaaccgccatagtcattatggcctgttttcgctggttgctgtctctctggagctgctggatacacctgtagaccagcaacagagaacagacatacaaggattaatacaaaatttgcaatagtggaacttccagtggttttaacccaagtgatggggttaagatttgtgaggccatcagcagctttcaccattgcctcagtttctggcaccagattgaactgggcttttgatgcctcaaaaatttgttattttaattttaaaatatctaaagtaaggttatcttctcttccttgtagatggcgtctaaccatgtcccagtgatgttcagattcattataggctcgaggtgtaatacaaaaatctgacatattccagtcacactgtaactgaaaaagatattctaagctcatgagcctatctctcattcaaatgacagtttgtctacgatcattaatttggtttgccaatttttggtctatttgagtctgagaattccacaattttgaggagttcttttgccaattatttatatattttgtagtttgaacagaggagtgtaaagcaattccagcagccgcagcagtagctgtgactgcaataagacccataatcactgcaattaaagtaaaaaatgaatcttttggatctagttagaactccttttaatacttctgttaaaatatggatggatggggaagcctcccacggtcggtccatggacacagggatccacacaccctctcttgccctcactggcagaatatggtgctgccaatcaaaagttgaatcaatgcaagtaaacaatctacaattttcacaggttatagtttgggaatctggtttaataactatgtttcctacaactagcatataagagggttttacacaactttgcaaaggaattgtcggattggaatttaggttaatagtataatgtggcttatgatttcttgttccgataacttgatttccagaccaaattctaatgtggtgcgaggccacagtaagctttcataatgctggatgttcaggagcagtaacaggactaactaactttggttgaggtgatgaaatccccttttcaccccatttccatggatagggtgattctagccttctataaacctggtctagcctttcagttaaatcactatcataggccggattagtgggccagacagatggggtctgtgaacatgagtgagtctggcccatacaaccataatataattggttttgaggggcccagtctataatagttccaaatttattgttttgtaataccaccacagtatcagccacatatttttcccaaactaagacttctgggtcttttgattctttgggaatttccttgaggcaaggtccccttaggcctaaattttaatgatctttgataagaagagtcctgtaaattattcatttgtgacccaagtgacattccacttaccatatgataagtaaatttattggtggcactgacagtagatacttctaccaaccaattttgggttgtaggcattaagcatcctggtgctttccccaggcaaataggaggataatgatacccagtggaaatgtttatcatcattccttcttcttcaggttgggcagggccgcggtcatctgtgggtcctggtacccatgcactaatattaacacatacttcaatagaatattatccatccaagtgactgcctgaattaagggcgggaaaggcacataggcccagtaagtataattagctgcagctgctcctgcagacatagtgagacttaccaccattgatacaatcattaaagctgcaagcagcatattctctggagtttgtgttacccttgtgtactttaggcttttttcagctaactgtgtcagcttctttagctgggcccaggtcggcggcttcgcttttttggtggatggcaactttttctgtaagttgtaggtacccaaactggaagctgattttctcctggtgaaacacgagcaaaacctctcccccacgttatcaccttctctattttttatgttttatttttgttgtctttttaccaaatcagtttttcctcatgtgggctgttctttttaccagtaaaatgttgttctgcagaagtagcggtctgatttctataaatgttaaaaaaatttaaagtatagagtgctagattaagttgcatctggggagtgttatattccttactgtccttttcctttttttgtttaaccaattgagctttgagtgttctattacttctttcaattatggcctgtccttgggaattataagggatttctgttgtgtgtgtaattttccactgatttaagaatttttgaaatgctttactacagtatcctggcccattatctgttttaattttttatggaactcccatgacagcaaaacaagataataaatgtcttttaacatgggaagtattttctcctgtctggcaggttgcccatatgaaatgtgaataagtatcaactgtcacatggacaaatgacaattttccaaatgaaggtacatgtgtgacatccatttgccataatgcattgggacataaacctctgggattaactcctgcctcctgagtgggcacatgtaggacttgacactgagtacaatgttgtacaacattttttgcctgttttcatatgatatcaaatttattttttagtcctgatgcatttacatgagtcaaggcacgaagtttttatgcttttatgaatgcagatgatactagcaagtcagcttgttcatttgccttagttaaaggccctggtaaattagtatgtgttcgaatatgagtaatataaaatgggaaatttctttttcttacagtttgttgtaacgaattaaacagctgatttaactgatcatccatactatatttgattagggctgtctcaacatcctttgtagcctgtactacatatgcagaatctgaaacaatgttaataggctgattaaaaccttgtaacactgaaatgacagcaaccaactctgctctttgagctgagtgatattgagtttcaatgacttgttcttttggcccagtttaagccacttttccattgctggaacaatcagtaaacgccatcagagcattttctaaaggtttatatctggtaattttaggtaaaatccaagtaatcaattttaagaactggaagatttttgtttttgggtaatgattgtcaataattcccacaaaatcagcaagaccaatctggcatgcagcagaattgataaaagcttgtctaacctgttccttgtttaaaggaacaatgattttatctgggtcacttccacacaattttactatatgtagtcttgcctgaccaattaatgtagccatttgatctaagtacaatgtaaaagtcttagttgtactgtgaggaaggaatgaccactctgcaagatcagtattttgaacaataatgcctgttggagaatgtgcagtagcaaaaatcaaaagttggagtggggctaaatgatctattctatttacttgtgctgaccgaattttttcttcaactaattcaatttctttagttgcttctggagttaatggttttttactgtttaagtctggatcccctctcaagatagaaaacaaatttgacatggcataagtagggatgcctagagttggccgaatccaattaatatgtcttagcaatttttgaaagtcatttaatgttttttaatgtgtcttttcttatttttattttttgtggtttaattttcctttcctctacctgcattcccaaataatggaaaggagtagaggtctgaatcttatcagatgctattgtcagtcctgcgtttgcaacatctgtctgcagaaatgtgtaacagtcaattaatttgtctcttgtttctgcagcacacaaaatatcatcaacataatgaatgacataacaatctgaaaacttgtctctaactggttgaagaacttgagctacaaaagtctgacaaatagttggactgaggcaacactttccactaaaacctggctggttctttattatttacggctggtatagtaaaagcaaatttttcaaaatcctgttttgccagaggaatggtaaaaaagcagtccttcagatcaattataattaaaggccagtctttggggatcatggccagagagggcatcccgggttggagagcacccatgggttgtattatggcattaacagctcttaagtcagtcagcatgcgccatctgcctgattttttctgaattacaaacacaggagaattctaaagagagaaagtgggtgaaacatgtccttttttaaatagttttttaactattttatgtagcgcccccaacttttccttagagagtggccactgtttgacccatacaggacactgcagggcgagtctgaattgctccttcactgtagtgaactgtaggttgggcaataatgagtgccacgagccaagtcgcagtgtgcctagtttcaggctgcctcccccagcactcactcggctgaggaggaggtggccattgtggttgtagccccaatggccccaatgattctggactttttccttttaattttaatgtttcaggatatattacctcctgtaattgattgtagtcaacactttgcgttgactgagccattaccggctctgctacatatttacaatgtgaactttccgttcctttcttgaactctgtctctgcctcttcttcacaatctatcacacagctttcaggggcatcagaaactgaaatgctatcttcttctatttgaaatggttctaaagttgctttaataatggcccaatcattccatactgtaagtgggatgattttaccttccctacttgcttgttttaattccttgccaattttttcccaatcttttaaatctaaagttccttgttctggaaaccatgggcagaattgttctattgtttgaaatagcgtaattagattttctgtagaagctttaactccccctcttcttaagagaattttaatgaagctgagataagaggcatatttactttcagtttgccccattgttaccctggattcctccgagcgcacaagcatactgcaaggctgaccgtggacgtactcgggaatctctcatcagctgtcctcaatactcacgttctcagcataacttcaccctggagaaaggccccatattgggcgtcagatgaaggggtggcctgcccctccatacctgtgggatatctcgtcaggtgggatgagagactgagaaaagaaataagacacagagacaaagtgtagagaaacaacagtgggcccaggagaccggcatgcagcatatcaaggacctgcaccagtaccggtctctgagtttcctcactttttattgattattatttttattatctcagcaagaggaatgcagtaggagagcagggtgataataaggagaagttcagcaaaaaacatgagcaaaagaatctgtcataattaagttcaaggggaggtactatgcctgcatgtgcatgtaggccggatttatgtttctctccacccaaacatctcagtggagtaaagaatagcaggcagcattgctgccaatgtgtctcgcctcccgccatagggtggtttttctcctatctcagaattgaacaaatgtataatcaggttttatactgagacattcagttcccaggggcaggcaggagacagtggccttcctctatctcaacttcatgaggctttcctcttttactaatccacctcagcacagaccctttacaggtgttgggctgggggacggtcaggtctttctcatcccacgaggccatatttcagactatcacatggggagaaacctcggacaatacgcggctttccaaggcagaggtccctgtggctttctgcagtgcattgtgcccctggtttattgagactagagaatggcgatgacttttaccaagcatactgcttgtaaacattttgttaacaaggcatatcctgcacagccctagatcccttaaaccctggttccctacaacacatgtttttgtgagctcaaagttagggcaaagtggctggggcaaagttacaaattaacaacatctcagcaaagcaattgttcaaggtacaggtcaaaatggaatttcttatgtcttccatttctacatagacacagtaacagtctgatctctctttcttttccctacactgaagaaggaggatcgcttgaagtcaggggttcaagaacagcctgggctggccaggcatggtggctcatgcctgcaatcctaacactgtgggaggccgtcatgagcagaacaacttcaggccaggagttcaagaccagcctggccagtatagcaaaaccccatctctaattaaaatacaaaaattagccaggcatggtggcacacacgtataatcccagctactcaggaggctgaggcaggagaatcacttgaacccaggaagtcgaggctgcagtgagctgagaaggcaccactgcactccagcctgggtaacaacgtgagaccctatctcaaaaaaaaaaaaaaaaaaagaagaaaataaaaaatttatatgtgtgtattctgtgagatagaggtccaaattcattcttttcttttcttttctttttttttttttttgagacagagtctcactttgtctcccaggctggagtgcagtggcgtgatctcggctcactgcaacctccatctcccaagttgaagcaattctctgcctcagcctcctgagtagctgggattacaggtgccaaccaccatgcctggctaattttttgtatttttagtacaccatcttggtttcaccatcttggccaggctggtcttgagctcctaacctcatgatcagcctgcctcggcctcccaaagtgctgggattacaggcataagctgccacgcctggccccaaattcattcatttacatgtggatatttagttgtctcagcaccatttgttcatttgttgaaaagattattatttcccaccccccacccccgctttttttttgagccggtgacttgctctgtcacccagcctggagtgcagtggtgtgatctcggctcactgcaacctccgcctcctgggttccagcgattctcctgcctcagcctcctgggtagctgggactacaggcatgtgccaccatgccctgctaattttgtatttttcgtagaaatggggtttcaccatgttgaccaggctggtatcgaactcctgacctcaggtgatccgtccacctcagcctcccaaattgctggaattacaggcatgagccaccatgcctggcctccccacctttttttttgagacagtctcattttgtcgcttaggctggagtacagtggcacgatcttggctcactgcaacctttgcctcccaggttcaagcagttctcctgcctcagcctcacaagtagctgggactacagtcatgtgccaccacacccagctaattttttgtatttttattagagatggggtttcgctggtctcaaactcctgacctcaaatgatcctcccgccttggcctcccaaagtgttcgtgttacaggcatgagccacacccagcctcccaattttttttttttttttttttttgagacagagtctcactctgtcacccaggctggagtgcagtgagtggcgtgatctcggctcactgcatcctccacctcctaagttcaagtgattcttctgcctcagcctcccagtaactgggattacaggtgcacaccaccatgcctggctaatttttgtatttttagtagagacgaggttttagcatgttggccaggctggtcacaaacttctgacctgaagtgatccactcgcctcagcctcccacagtgctgggattacaggcgtgagccaccatgcctggcccccatttgagtttcttagcatcttatcaaatagcaattgtgaccatttatttctggactgtcagttctattcaattgacttatatatctatctttaagcagtatcacactttcttggttcctgtatgtttgcattaagcttccaaattgtgcagtgtgatttcttcaatttttttcttctttttcaggcatttacttttttttttttttttttttttgagacatatctccctctgtcgcccaggctggagtgcagtggtgggatcatggctcactgtagccttgacctctccaggatcaagtgattctcccactttagcttccccagtagctgggactacaggtgtgcaccatcacacctggtcaatttttgtatttttgtagagacggtgtttcagtatgttgcccaggctggtctcaaactcctgggctcaagagatcctcctgctttggcctcccaaagtgctgagtttacaggtgtgagacacattgccctgcttgaatttgttgattgcatctccatggtgttatttaacatgttcttctgtccctgtattttagtcattcaacagtgtgatctaatttagggccacttttacagcaggaataatttgcaggtggtgtatgtgtttccagagtcagaacatgtttggtttatgctcttggtgatattcagggctatcagtgatcctctcctggatcattttttaattagaggtgatttgtgttttgaaagggtcacttgggttgctggggggtgtattgtatatgagtaacagggttcttataaggacggagtcggataatcatgcaacagagcacttggtgctattcctggcacgcaatgaccatattgttgttgttgttgttgttgttgttgttgttattgttagagctgtgtgtgggggacccaagtcctgagctcggaggcattttctggccagggctgtttcctcccttctcccctgcctctggaaaagtctgcagtgccccaaggctctgggaggcatgttcaggactgcagcagccatctctgtgcacctggtggggccccttcagggaaggaaggctggagccccactcacttggttcttgcaccagactgtaagtgccctaaccccaatactctgccacctgcatggcctggggcttctggggtctggctcgttcctggcttcaaagctgtgcatgagccttctctttcagggagccctctttaactgcagcctgtatgtgggcttctcccttgcccctgcttctctagtctagaacttgtagctctgcatctgaatagtcagcttgggcgctgtagggtgctgcttcccatgatcccctgtgcccatcccagaacccagtacctggtagggactcaataaatgtcaactgagccaggcgcggtggggttcctgggccatggaagacctggcacttactcaaatggtcccaaggcccctccaggacaggggggcctggtgttgagattactgtggctgccaccctgaccaggtccttgccagcttctcttctgaccctgggcaggtacctgagcctcttcaagcctcagtgtcctcatctgttagatggagactattgtggcacctctagtgagagtgcagtgggaactgagcgaggtggaactgagcaaaatcctgagccagggttcactattgaccacagcaggtggctgagaagaatgttggatccccagctccacggcccaccagccatctgggactggcaaacccacaggaacggaaggttcctcagggaccacaaagcccatgtgaggtccctgctgctgaagggattctgaggacaggaggagccaaattacctatccagggtcacccagccaaggtgggttaggacctgagtttggtggctctcaggtctggccaatttctttctttctttttttttttttttttttttttttggtagagtcttgctcgttgggtcgggcaggagtgcagtggctggcacgatcttggcccactgcaatctccatctcccaggttcaagtgattctcaggcctcagcctcctgagtagctgggattacaggcatgtgtcatgacgcccagataagtttctttgtttgtttttcccagactgagtttcactctaatgctcaggctggagtgcagtggtgtgctcttgcctcactgcaatgtctgcctcccaggttcaagtgattcttgtgcctcagcctcccaagtagctgggataacaggtgcgtgctaccacgcccagctaatttttgtatttttagtagagatgggggtttcaccatgttggccaggctggtctcgaactcctgacctcaggtgatctgcccgcctcagcctcccaaagtgctgggattacaggcgtgagccactgtgcccagcccctggccagtttctgcacaccagtggctgaggagggagctggcctgggaggaacaccgggaggggaggggcgagccaggagccaggaccccgggaccctccgaggagcggattagtgcctccctcagagttaggacatggccttgggtccaacaggcctaagtctgagtgtgtgtgttgtgtggccttaaacacatcactccccctcctgcaccctccagcctctgttttccaccttctgttttctcattgataagataggcctgaccaggtcattcagggaatgaaatggaagtgcttagcaagacctctgtaagtggaggctgctgctgtcactgttgccattatcctccctctccgctccacccacctcctgctcctcttctttaaccctcagcccttcctgagtcagactttaacctggccaagtcagggctctgtctcaggacgcatggagccagggctggaagtctccactgggcaggcgccaggcagcccctgcaggttggggaggtggaggctgctggagtcaagaggaaccaggtgagggtgttggagcataacaggcttgggaggcaggcagaaacctgcccttctgcaaactctatctcttccccctcctgggagcagacaggatggcgctgtggcctgaaagcagctgtccctcctgtgtgcaagctcggactgctgcacccagacagattccatctctgaccttccacttgttcgtctccagctcgccatggccaaacagctgcaggcccgaaggctagacgggatcgactacaacccctggtgagccagctgggctggggaggtgtgtgggtgtcccctcgggcatgggttggccatccctgggtttacagcaactcagtagtactccagatggtggcggtacacagactgccagattccagccatagctcaggagagacagggcccgagggagtaggcttggttcaaatctcagctttcttctgcatgactgtgccactaggacaggtgacatacctgctctgagcctcatctccccagctgcaaaatgaagagttatacccacctggagagcgttggggaggaaaaagtaaaatgctgtccaaagccattctacccaggcaccaagctaaggcctttccagggatgactctttctcacttggtatagagtcagataaactaagataagtaaaataagcaagtaagatacagtcagctcttcaccagacatttgcagaggttgatattgttttcttttttgacttgttttattttcattttatttttgagacggagttttgcccttgtcgcccaggctggagtgcaatggtgcggtctcggctcactgcaacctctgcctcctgggttcaaatgattctcctgcttcagcctccaagtagctgggattacaggcgtgcaacacaacgcccagctaattttttttctttttcttttcccccgcaagacagaatcttactctgtcacccaggctggagtgcagtggcatgatctcggctcactgcaacctccccctcacaggttcaagcaattctcctgcctcagcctcccaagtagctgggattacaggcgtgcgccaccacgcccagctaattttttttttttttttgtatttttagtagagatgagatttcaccatgtttgccaggctggtctcgaactcctgacctcgtgatccacccgcctcagcctcccaaagtactgggattacaggcatgagccactgtgcctggccctaatttttatatctttagagaaaatggggtttcagcatgttgtccaggctggtctcaaactcctgacctcaagggatctgccctcctcggccttccaaagtgctggggaatacaggcataagccaccgggcccagccaaaaatgacacattttagacatatttattggtatgcaaattcaactcagccaggtcttcactctgctccaaactagccccaaaccacataccagcctcttcatccagcttcccagcctttctcccacctggagaggtggcccccaggcagggccagaacagaggattatgggtccagagatgatgtgtgcctgggctggtggggccctgttctgcccagagtagggtcaagagcatcaaactttgcttgagatggaagtagaaaggctggctggctgtgccttgtactagctgggaggctttaggcaagtcactccactccttatccccacagtggtccaggaacaagatgtgcctcacaggccattgtgaaggctatatgagcagagcgtttaactgtggtgttgacgaatccaaggaggagtcatgcaatctgtacagggggtctcaactagtatttggaaagaatagagtaggataggacaggacagaaaatactgcagtagattgcaccaagaaggatgaagcttccattccatgtttgtgctccacagggttgatgatgcaaaggtgatttcttggccggtagtggtggctcacgcctgtactgctagcactttgagaggccaaggggggcggtggatcacctgaggtcaggagttcgagaccagcctggccaacatagcaaaaccccatctgtactaaaaatacaaaaattagctgggcgtggtggcgggtgcctgtaatcccagctactcaggaggctgaggcatgagaatcgcttgacctcgggaggcggaggttgcagtgagttgagattgcaccactgcactccagcctaggggatagagcgaaactctgtcaaaaaaaaaaaaaaaagatgatttcttcctatgggtcatggtggaagaacttggaaagcccctgggctgattcctgcgattaacaatgtgcctgactgacctaatctcaatgtaggggaccagctgtgacacttaggcagatcttcaggccaggacagttgctgattgtctagtttttgtttttcttgtgtgtgtatgtgtgtgttttttgttttttgtttttgtttttttaagacagaatctcactcttgttatccaggctgcagtgcaatggtgcgatctcggctcacttcaacctccggttcccgggttcaagtgattcttctgcctcagccttccaagtagctgggattacaggcccctgccaccatgcctgactaacttttgtatttttagtgaagacagagtttcaccatgttggccaggctggtctcaaactcctgacctcaggtgatccgcccacctcggcctcccaaagtgctgggattacaggcgtgagccaccacacctggccggttgtccagtttttctaaacaggccgaagtccaggtcaccatggagggctgggctggtgctgattctccatttgttacccagggtggagtttgtgaaactggccagtgagcatgacgtcgtgaacttgggccagggcttcccggatttcccaccaccagactttgccgtggaagcctttcagcacgctgtcagtggagacttcatgcttaaccagtacaccaagacatttgtgagtctccccatctctcgtggaggcactgggggaggaaggggacagggctttctggacttcaagcccacacagctgtcaggcttcaggggacagagccaggggattctgtatgaccatagttcagtgtttactgagcgtatcctctgtcccagagccttcgcctcgtggtctagtggggatggcagacaagaagccagtaacgacaggcagttgatacatgatgtgatggaggaggatgggatatcgtgcgagtaagaaagagggaatgaaacctggggagggggctggagagatgcacgaagacttcctggaggaggtgacacttaaaccaagtcctgaaagatgagctactggttggattacacaataaatccaaacgttttccggaaaggaccacatagtaaatatgtgacactgcttggattagaacagtggttctttttttctttttcttttttgagacaaggtctcactctgttatccaggctggagtgcaatggtgcgatcatggtccactgcagccttgaccctgccagtctcaagtggtcctcccacctcagcctctggagtaactgggactacaggtgtgcatcaccatgcccagctaattttatttatatatttatttatttatttttgagtcagggtctcactcctgtcacctaggctagagtgtagtgacatgatcacggctcactgcagcctgtacctcatggggctcacatgatatgccatttcctggggctcatgtgatcctcccacctcagcctctagagttgctgggacaacaggggcatgccacctcacccagctaatttagagacagggtttcaccatgttgctcagactggtctgaaactcctgggctcaagtgatcctgccacctcggcctccaaaagtgctgggattacaggcgtgagccactgaaccctcattctttttttttttttttttttgagatggagtctccctctgtcgccaggctggagtgcaggggcgcaatctcggctcactgcaacctccccctcccaggttcaagagattctcctgcctcagcctcccgagtagctgggactataggggtgcgcccccacgcccagctaatttttgttttgttttttttttaagacagtctcgcactgtcgccccggctggagtctggagtgcagcggcacgatctcggctcactgcaacctccgcctccgcctccgcctccgcctcctgggttcaagccattctcctgcctcagcctcttgagtagttgggattacaggcgcccgccaccatgcccagctaatttttgtatttttagtagagacggggtttcaccatgttggccaggctggtctcaaactcccgacctcgtgattcgcctgcctcggcctcccaaagtgctgggattacaggcgtgagccaccgcacctggccattttttgtatttttagtggatactgggtttcaccatgttagtccggttggtctcgatctcttgacctcgtgatccacccacctcagcctcccagagtgctgggattacaggcgtgagccaccgcacccgaccgcactcgttctttttaatggctgcatactgttctgttgcctggatgtgccataatttatttaagcagttctgcactgatggactgcttctgctatctcaatatcataagcaatgccacagcaaatatccctgtgtggacatctttgtatacatatgtatttctctaagataaattcctggaggtaaaactagcaaaagaaagactataaatatttataaatacaataggtggatattgttaagaaacagtgtgtgcctataatcccagctacttgggagtctgaggcaggaagattgtttgagcccaggagtttgaggccagtgcaacatagtgagatcctgtctgaaaaataaacaaacaactaagtaaataattgccctccagtaaggtttactcatttacatccctgccaataggctggtctcagagctggttggaaagttccttctttgatccaaaaaaaaaaaaaatcatttgggtatgtatctttttcttttctttctttctttcttttttttttcttttaactagagacaaaagctgggtatggtggctcacgcctataatcccagcattctgggaggctaaggctggcagatcacctgaggtcaggagttcaagaccagcctgcccaacatggtgagatcccatctctaataaaaattagctgggcgtggtggtgggtgcctgtaatcccaactacttgggaggctgaggcacaagaatcgcttgaacccgggaggcggaggttgcagtgggccgaggtggtgccattgcactccagcctgggtgacaacaacaacaacaacaacaaaatagagacagggtctccttatgttacccaggctggtctcaaactcctgggctcaagcaatcctcccaccttagcctcccaaagtgctgggttacaggcatgagccactgtgcccagcctcattaaatattttacctctttcttgtatgttgcaatatttttctcttcctgttttgaccttgctcatggtgccttttatttttatttaattaattaatttattgtctaagacagagtctcagttttattacccagactggtgtgatcataactcacttcagccttgatctcctgggctcaagcaatcctcctgcctcagcctcccgagtacctgggactacaggcacgtgatactacacctggataatttttttgattttccatcagtagagacagagtccctctgtgttgcccaggctgttctcaaactcctggcctcaagcaaccctcccgcctcatactcccaaatgctaggattacaggcgtgagccacggtgcctggcctgtgcctcttgttgtacagaaaatttttatatttgtgtggccaaatctggtttagtgagttactgagttgagttctagataaagtttcaatcacttggcttagccttgagtatttttgttttgttttgtttgtttttgttttttttgagacggagtctcgctctgtcgcccaggctggagtgcagtggcgcgatctcggctcactgcaagctccgcctcccgggttcacgccattcttctgcctcagcctcccgagtagagctgggactacaggtgcccgccaccatgccagctaattttttgtatttttagtagagacggggtttcaccttgagtattttataagtgtcctcagcaaacaagtttctggatctaatcttcctctcaaaaaggggtgcttacaaagctgcaacatgaggttcctgactgtcaactgtgtgtgactttagacaagtaatttcttctctctgggtctctatttttctacctgtcaaatagtgggcatcaggccaggcacggtggctcacatctgtaatcccagcactttgggaggccaaagcaggcagattacccaaggtcagaagttcgaaaccagtctggccaacatggtgaaaccccgtctccactaaaaatacaaaaattaaccaggcatggtggtgcgtgcctgtagtcccagctacttgggaggctgaggcaggagaatcacttgaacccaggaggcggaggttgcagggagccgcgattgtgccactgcactccagcctgggtgacatgagtgagaccctgtctcaaaataaataaataaataaataaataaataaataaataaataaaagcctctcccgcaaagctgctgggaggatcaagtgggcacaaacatgcttcttaaacttacagatgtggaaagtggggagtttctactgccttgtgggctcttggactgaggttcatggaggcaagcacttcctctggttctctgctaaatccccgccctgggcttcgggcctggcacagaacaggccctgtggcaaatgctggtggaggagatggaagagcttagcactggatatctgagtcagtgcaggcctggtggttggcaccctggagtctgggaccatatagattgtgtgacctttacctcccagagtacacaggatcacaatagcacctgcctctgggttgttgagaggatgagatcaaagaaatcccacaaatagcttggtgtgtagaggaatccagagtgttgaaagctgatctattccacgtcccctggggcccaggctaccagtacctgactttgcccccaggcctgctgctggaaggtgctagaattgcctggatacagctgggccggaggatgggcccaggctgagctggacagttaacccctgctgtcctggcagggttacccaccactgacgaagatcctggcaagtttctttggggagctgctgggtcaggagatagacccgctcaggaatgtgctggtgactgttggtggctatggggccctgttcacagccttccaggccctggtggacgaaggagacgaggtgagtgggcaagacttgggctgagtgggactgagaggtcagggccatgctgactccagctgatttgacccttatatcaggtcatcatcatcgaacccttttttgactgctacgagcccatgacaatgatggcagggggtcgtcctgtgtttgtgtccctgaagccggtaaggatgctaggtagaggatggatgggcagagggatccaaggcgtgggctgagttggaccctgggagttggaaaaggaggaaagaagtgaaggaagccagttcctctaagctgggagggcagaggggaggtgtgtgtgttgggatcccaggggagagaaggtggggatagatgctggggaagacctgcatgtcaggtggttaagtggtaccaccccatgccacctgctcttgcagggtcccatccagaatggagaactgggttccagcagcaactggcagctggaccccatggagctggccggcaaattcacatcacgcaccaaagccctggtcctcaacacccccaacaaccccctgggcaaggtactggagggacctccttccctggccccctgcggacctggtcatgtctcctgcactgttactgagttgctgctgtggggcctccgtttcttcgtttgtgtgtgggagggccacacacaatgagcactgaggaccaagactccagaggtcccaggacaggggcaagaatccccagggaaggcctgagggctgggacagtgaactgggctgggagccaccatcacttcccagtgaccctggaatagtgactatgcctctcgaagtatctcatctgtaatgtgggaacctgagggaactgacctcatggtcagtgttgcagggatccaatgtgatggtgcagaacagcccttagcactgggcttggctgtattcgccatttatttatttttttgagacggagtctcgctctgtctcccaggctggagtgcagtggtgtgatcttggctcattgcaacctctgcctcctgggttcaagcaattctcctgcctcagcctcccgagtagctgggattacaggcacccgccaccatgcccagctaatttttgtgtttttagtagagacggggtttctccatgttggccaggctggtcttaaactcctgacctccagtgttccgcccgcctcggcctcccaaagtgctaggattacaggcgtgagccaccgcacctggccgcagctgtgttctttaacctctctgagtaggcctctgtgtttggggacggtcccagctgcaggtctgtgctctccttgggcatctgcaggtgttctccagggaagagctggagctggtggccagcctttgccagcagcatgacgtggtgtgtatcactgatgaagtctaccagtggatggtctacgacgggcaccagcacatcagcattggtgagccaagccagcctggggcccctcccctgcacattggtgggagggccttgaccccacctgagagtcagcgcaggcctggtagttagaacccagggttatggagccctgcagatcctgtgacctttgcctcccagagtacacagtgtcacagtagcacctgcctccctggttgtcgaaaggatgaggtcaaagaaatcctatgccgagcatggtgggtcacacctgtaatcccagcactttgggaggctgaggctggcagatcacttgaggtcaggagtttgagaccagcctggccaacatggtgaaaccctgtctgtactaaaagtacaaaaattagctgggcatggtggcacgtgcctgtagtcccagctactcaggaagctgaggtaggaggatcactggaacctgggaggcggaggttgcagtgaggcaagatggcgccattgcattcctgcctgggcaacagagcgagactccatctcaaaaaaaaaaaaaacaaagaaagaaatggggggtggagggagggagggagagagagagagagagaaagaaggaaggaaggaaaggaaaggaagaaagaaagaaaaaaaattgtgcaaataacttagtatgtagaggaatccagggtgtcaaaagcctatgcgtgtcccctggggcccagaccaccatcctcccccgtccccctcaccccagtctcagcagctgttctgttcggccttgggcagccagcctccctggcatgtgggaacggaccctgaccatcggcagcgccggcaagaccttcagcgccactggctggaaggtgagttgctgagggtgggaggtcaccaccccctgcaagatccttggcaagtgaggtgggcctgagaatgaagaaggctttagccaggtctggaaggacctctccccctacctgcgcccctgctgcaggtgggctgggtcctgggtccagatcacatcatgaagcacctgcggaccgtgcaccagaactccgtcttccactgccccacgcagagccaggtgaagaggggcaggacgtcacgggggagtggggggacaacaaaagagcccaggctggcccccgcgtcagggaacagctgatctatctgtgtgtccatctgccctgcccaggctgcagtagccgagagctttgaacgggagcagctgctcttccgccaacccagcagctactttgtgcagttcccgcaggccatgcagcgctgccgtgaccacatgatacgtagcctacagtcagtgggcctgaagcccatcatccctcagggcagctacttcctcatcacagacatctcagacttcagtgagtgagacttgccggtctgggcagggcgcaggggctggaggctgcagggggctcagtgtggcctctgtctcccagagaggaagatgcctgacttgcctggagctgtggatgagccctatgacagacgcttcgtcaagtggatgatcaagaacaaggtgggctgggcctctgccaggcagccatgtatggtttcacaggttgtgtgctgctcaagggtgcccaggcaagaggctcctgggctagatcttagtccagcctctgccgtcaaccttggggcagggttgtatccacttcagagaatgaggaggctgtttctttttttctttcttttttttttttggttgagatggagtctcactcttgcccaggctggagtgcagtggcgcgatcttggctcactgcaagctctgccccccaggttcacgccattctcctgcctcagcctcccgagtagctgggaccacaggctacttttttttgcccggctaattttttttgtatttttggtagagacggggtttcaccatgttagccaggttggtcttgatctcctgaccttgtaatccacctgcctcggcctcccaaagtgctgggattacaggcgtgagccactgctcctggcctttttttttttttttttttttttgagacagagtctcactctgtcgcctaggtgggagtgcagtggcgcaatctcagcacactgcaacctccacctccagggttcaagcgattctcctcccttagcctcctgagtagttgggtaactgggattacaggcatgtacaaccacgcctggctaatttttgtatttttagtagagacggggtttcaccatgttggtcaggctagtctccaactcctgacctcagatgatccactccccttggcctcccaaagtgctgggattacaggcgtgagccaccgtgcctggcctgaggaacctgtttctaacttgcacagagatgctgtgtgggctggcaggatttcctgcctctttggatctccatcttcccatctgtacagtgaggagttggcccattaactcttgagttcatccaggtttgatctgtgactctaaggctttgttcttctctggctctgccctgacctgctccatgatcctccctctgtcagcctccctctgccctctatacccagggagggacttggaatgatgttctgggattcttttcttctgactttgtgtttgtttttgttttggatggattttctctctttcgcccaggctgcggtgaagtggcgcaatctggctcactgcaacctccacccccgggttcaagcaattctcctgcctcagcctcccaagtagctgggattacaggcatgcgccaccacacccggccaatttttgtatttttggtagagacggggtttagccatgttggccaggctggtcttgaactcctgacctcaggtgatccacccgtctcagcctcccaaagtgctgggattataggcgtgagccaccgcacctggccttgttcctctgactttgatgcagctctaggtgctggattggagctaactctccttccccgcctggtcgtgggaacctctctgtcccctccggagccaaggcctgctgggccacgaggccgtgttgagacatgtccttcctcctccccagggcttggtggccatccctgtctccatcttctatagtgtgccacatcagaagcactttgaccactatatccgcttctgttttgtgaaggtaaagggcagggctgggggaggaaagacctcacagagcttcccaaggccggctgggcacatggggagagtgtaggactaatctgtgctggcgcaggatgaagccacgctccaggccatggacgagaagctgcggaagtggaaggtggaactctagccctgaagtcacgccttggccctgacatccccacatgcccgcagagatcctctttgagtgtctgtctttgtccaggtttcagacatttctaggttggggaagatgctattgggaaacctcttctccgtgacacagaatgttctgggtgggagccgcccttcttcatcttagagaaccaagtgcctcctgtctgaaaggtgagggtggcctgacctgggcctctccctgcccctccataggtgggtttgtagggtcttgtgttgcttctggtctctccaggcttggctgagacggacggtagacttccaccatgtaccgatcacatcccagctctgcatggcccctgctaaggctcaggtataacctcaccttccctggctcatcttggccttggggagttgcctttaggcttgagtcctcaagcctctccttttcgtccataataaaatgtttaagttattaagatccttattgacggcttctctctgcttcacactcatgctgatggctgatctaacttgtgaagaatgcccagaagaacctcagacacccccacaactttgtacaaatggttactgtagtcacatagtggcacaaccaggcctagcacccaaggccctcaaatgaattcctcactattaa

SEQ ID NO: 15647 - DNA, 48811 bp, Homo sapiens
ttgggaacgaggggtgaagcggcccaggtgagggtgagtagctgtgtcggagcgccacttccccaaggtcaggtgccgaggctgggagggtcggctaacggttccgagcttggttgtgctagagtgcttaatgagtttgatgctactaagtataacggagtggctgcacagaatgattgagccgcccgcgggaatcaactgcgcgtgctgctcgctgattctcgctcggacactggggctggtcctgtctgcacccaaatccccctcccacgaccgcgccggtggagatgatacccgagacaacagaattctggacagatctggggttggaattgggtccccagactccaactctgcagctccataaatcccgctgggtcctcgcaaattccctggctgataacagtaccggcaaccaaattaaaaaataatccatacagtggaatactgtgcagccattaagacgaacaatgtttaatatgcactaatgtagggtgacttctaagataccttaggttaaaaaaggaaacaacagtaaaaacagcgttgggccggttgcggtggctcacgtctgtaatcccagcactttgggaggccgaggcgggcggatcacgaggtcaggagatcgagaccatcctggctaacttggtgaaacctcatctctactaaaaatacaaaaaaatcagccgggcgtggtggtgggcgcctgtagtcccagctactctggaggctgaggcaggagaatggcatgaactcgggaggtggagcttgcagtgagccgagatcgcgccgctgcactccagcctgggcgacagagcgagactccgtctaaaaaaagaaaaaacagcgttgatgggtgctatccatctttgcgtagaaggacgcctgagggtgggcgtatctgcgggtgtgcgcgccagctgtctgataagatgcacaagaagttgttaattgcggttgtctccgacagaattggggtcttgggtacctgggccagggcgagaaatttactaccatgtgcacagatagataattaaaaataagatgatgaagatagtcgtggctcccatccatcacgtgttaagccaatgcctagtttcacttctgttgggaggtcttatttttcccttttaatagaagagaaaagaaccttagagaggttaggaaacttagcaatatcatagccagggccgggcgcggtggttcacacctgtaatcccagcactttgggaggctgaggcgggcggatcacgaggtcagtagatcgagaccatcctggctaacacggtgaaaccccgtctctactaaaaatacaaaaaaattagccgggtgtggtggcgagcgcctgtggtcccagctactcgggaggctgaggcaggagaatggcatgaacctgggaggcagagcttgcagtgagctgagattgggccactgcacttcagcctgggcaacagagcaagactccgtctaaaaaaaaaaaaaaatcatagccaggaagtggagaagctggaatttgaaccctgggagatttacactaatgcccatgatctagcttatccctcgccactgagatgctttttctgttgtcagtcacgcaacacccgtcttggggcctggcacacaacaggcatccagtaactatttattgacatgatgtgtggtgtgaaaagcaaacgttgaaggtcagagcccaggcttaaagtccagggcttgggcacctctttccaacctgtggactgtgggcctgccaggtactccgtgggcctccatgtccccgcctgtaaaatgaacaaccagaaccacagttgtagacagtgaatgttcccacgtattatactttgtattttacacgcagataagtctcattttacagataagtgaggcacagagagattaagaaagttgccagaagggggttcctacaggtctccctccctccctaggaaggctgctgggctcccaggcctctcccttagcttcccaggatcatctgtgctaatgcctgggggacctactctgtgctgggtgagctgccagaggctgaggatctggtggagaacaggtcaagcacatagttcctgtccttggagttgagcgcccccgtgctgagtactttgagggcggaagcccaggtcttgggaccacctgggaggggacatgtggcttagcctgggtggagtcagaaggggcttctccaaggaagggactttcaatgtgactggaaactaggatgtccagaaggagaaatgatgaggctggagactcaaggagagatgggctcctaccctggacttggccttggtgtccactaagaaactgagggtgaccaacaggattggagaatatacaagttagacccattcagtctggcttcagcaggaatctttcctcccggagaatgcctccattaggtgccaaccaccagaacgccacactaacctctccaagctccaaagagtagggcgcctgattttataatccaggtgggggcgataaaggaatgcaggagccttcacagccatgaggcagtcactgtaactcctgccagaacagacctggggccacatcccactcctggatggcactgccagttccctgcataattcctttttttttttttgagacggagtctcactctgtcgcccaggctggagtgcagtggtgcaatctcggctcactgcaagctccacctcccgggttcactccattctcctgcctcagcctcccaagtagctgggactacaggcacccgccaccacgcctggctaattttttgtatttttagtagagacggggtttcaccgtgttagccaggatggtctctatctcctgaccttgtgatccgcccacctcggcctcccaaagtgctgggattacaggcgtgagccaccgcgcccggcctcccggcataatttttaaaatgctcatcctatgccctcattccccagcttgcagctgggggcctcctggtgcttttctgggacttcgagtaagtcatttcccctctctaagcctcagtttccccacctgtaaagctgatgccacctcctccaaggctcccgcgaggctatctgcctatctgttgtgtgttcctttaatgtatgggagtgagattgtggtttttgaatctgggtcctgtgccaggaggaataagtggtgagatacctactgtttgtgtcactcaggtcttccaccaacccctccagcctgtaaacctgccgtctggactccagaagtcatttctctctcctctgccaattcctaagcccagggggactgtgtctgagtgacgcaattgttagatctcctcagacaggctgttctctccaggaaaacattggctcaacaaattgtcaccaaacatttgtcttcagggaattctgttttttttctatcaaaaaaaatttggattcattatataataagagatttttcattttgcttggttactaattttatggaaagcctggtaggtttaaatgttaatagcttgttgactgggtgtggtggttcatgcctataatcccagtaatttggaaggctgaggtgggactatcgcttgagctcaggagttcgagaccaacctgggcaacgtggtaaaaccccatctctatcaaaaatacaaaaattagctgggtgtggtggcacgtgcctgtggtcccagctactctggaggctgaggtacaagaatcgcttgaaactgggaggcagaggttgcagtgagccgagattgtgccactgcactccagcctgggcgatagagcaagactgtctcaaaaaaaaaaaaaagttaatagcttgttgtcattgacaagtggctgtgagccaggacccacagtatattctctgtggattcttgtcaccttcattgtacagatgaggaagctgagcccccaagaggctgcggcctggcatgaccaaggtcccatagctagtttatggtggagctgggactatttgatccaagtccaaggtttggtcttctgtggttattcatgcactagactggtcttcctgggcatggtatccccagttctgtaccctttctctagaggtgccacgatgtgtgttgtctcagtaactgggagtctcctggcattttaagcccagggatgctaaacatccttcaaggctccagatagctctccccagtgaagaactgactcatctcaaattctaagtgtgcccctattgagaagctccaaaaccgaatgtcataattgacttgagtgatgtgacgtggggccaccctgggaaggcatggtcacctcgcctgcccttgtaagcagccatgcaaggtgaagttggacaagacatggctcctgtccccaaggggctggtggtctcctgtcagccctagcacccgcctgagaggagatttcacgggacagaatttggactttggaaataggcaaaccagggtttgaatcacagctggagctctctaggctgagtgagttttccttgttctccttttgagcaaaatagagtaaataataccatcctaatcagctgtgatgaggattagagaatttagcatggggttgggggagagggtcaggcacaggtaggtgctttctgagttcagcaaagggcctgggtggacacagaagcttcagagaggaggtacaggtggggctaggccctgctagggattttggattggagggtatgccaggcaggggaaacagcttgagtgaagatgggcaacatttattcaaaagcaaagggtggctgggcacagtggttcacacctgtaattccagcaatttgggaggtcaaggcaggcagatcaccagaggccagaagttcaagaccagcctggccaacatggtgaaaccccatctctacaaaaatacaaaaattagccgagcatgatggtgggtgcctgtaatcccagctactcgggaggctgaggtgggagaatcacttgaacccgggaggcagaggttgcagtgagccgagatcgtgccattacactccagcctgggtgaaagagtgagactccatctcaaaaaaataaaaataaaaataaattagctgggcgtggtggcgtgcacctgtaatcccggctacttgggaggctgaggcaggagaatcacttgaacccggcaggtgggggttgcagtgagccaagattgtgccactgcactccagcctgggtgacagagtgaagagagaggctctatctcaagaaaaaaaaaaaaaaaaggccgggtgccgtggctcatgcctgtaatctcagcactttgggaggccgaggcaggcggatcacgaggtcaggagattgagaccatcctggctaacatggtgaaaccctgtctctactaaaaatacaaaaaaaattagcagggcgtggtggcgggcgcctgtagtcccagctactcgggaggctgaggcaggagagtggcgtgaacccgggaggtggagcttccagttagctgagatcacgccactgcactccagcctgggcgacagagccagactctgtctcaaaaacagaaaaaaaaaaaaaaaaaagaacaaaggatgactgggtgtggtgtctcatgcctataatccaagctgtaatcccaggactttaggaggccaagaccagaggatcacttgagcccaggagttcaagaccagcctgggtaacatagggagaccctgtctctatttttttttttttttaaaagcaaagaatttgagctgggggttggggcatgcacttatagtcccagatactcaggcggctgaggcaggaggatcacttgagctcaggagttcaaggctcctaggtgacaaagcgagaccctatctctaaaataaaaaaagagtaaagggagggaaggtggaggctgccaagcctggattccagccggctccaaacgccaggctgaggaggctttggactttgtccagtgtcaccacaggcttctgggcagagctggtccaatgggggttgggggacagtggcatagctgacatcagcccctgggttattgacatcagcccctggaatgcatcagtgatgcattccacgggcccaggggtcatccactgccttcgggtcaagcaaatggccagtagctgcccaggctgatagaggtgtgtgttggaggggggcacaggccactggccctcggcccctggcctggcagcagggaggcctcagatcttagatgcctgagagctaccccagaagggtcctcggcacagctatggtccccatgcctagtggtgctgggcctcctcggtgctgccagatcacctgagctgcctccattgcagcagttatcccacacatttttttttttttttgaagcggagtcttgctctgtcacctggacagctgtcaggctggagtgcagtggctcaatcttggctcacttcaacctctgcctctcaggttcaagtgattctcctgcctcagcctcccgagtagctgggactacaggtgcccaccaccacacccggctaatttttgtatttttgtagagacgcggtttcaccatgttggccaggctggtctcgaactcctgacctcaagtgatctgtctgcctcggcctcccaaagtgctgggattacaggcgtgagccaccacgccagtgagccaaggtcacacagctgcactccggcctgggcgacacagcaggactccatctcaaaaacaaaaaccaaaaaaaaaaaaaaaacaaaaaaaaacaaattgaacataaatggaataatggaagaaatagctagctgtggggatggcaactctgcagctgttcacagtttgggaaacctgagatctgcatccagagaaacttcttgaaggcaaacttatcaacataaatgaggaaagtggttctaaagaaaaagataatgacccagaggaaataataccagcaaaacttcacattaaaggaactccctgggctgagcgcagtggctcacgcctgtaatcccagcactttgggaggccgaggtgggcagatcacttgaggtcaggagttcgagaccagcctggccaacatggtgaaaccccatccctactaaaaatacaaaaataagtcgggcatggtggtgcgtgcctgtaatcccagctactcaggaggctgaggcaggagaatcgtttgaacctgggaggcagagattggagtgagccgagatcacgccactgcactccagcctgagtgacagagcgagactccgtctcaaaaaaaaaaaaaaaaaaaaggcaggattatctcaccacaaaatgtacagaacaggaactcccagagatatttcacaacattgaaaacaaaggatgactaaggatgactcgtattcatcaagacatagaagatgtcaggtgcagtggcttacacctgtaatcccagcactttgggaggctaaggcaggatgattgcttgatgccaggagttcaacatcagcctaagcaacatagtaaaacccccatctttacaaaaaaaaaaaaatagctgagcatggtggttcgtgcttattgtctcagcaactcaggagaatgaggtgggaggatttcctgagcccggtaggttgaggctgcagtgagccgagatcacaccactgcactccagccttggcaacaaacatagaagaaatgctcattctgtatcctaaattaaaccactggaagactgcagcactgttcagttcagaatattctttttttttttttggaatgaagtttcatttttgttgcccaggctggagcgcagtggcgtgatctcggctcactgcaacctctgcctcctgggttcaagcgattctcccgtctcagcctcctgagtagctgggatcacaggcgcccgccaccacgcctggctaatttttgtgtatttaatagagacggggtttcaccatgttgaccaggctggtcttgaacttctgacctcaggtgatccacccgcctcggcttcccaaagtgctggggttacaggtgtgaaccaccacgcccggcctcagaatattctttttttttttttttttgagacggagatttgctctgtcacccgggctggagtgcagtggtgcaatctctgctcactgcaacctctgcctcccaggttgaagcgattctcctgcctcagccttccgtgtagctgggattacaggtgtgcatcaccatgcccggctaattttttgtatttgtatttaattttttttttctttttgagatggagtctcgctctgtggagtgcagtgccgctcactgcaacctctatctctcgggttcaagcgattctcctgcctcagcctcccaagtagctgggatgggattacaggcacctgccactacacccagctaattttttttgtaattttagtagagacgggatttcaccatgttggccagcctggtctcaaactcctgacctcaaatgatctgcctgcctaccggcctcccaaagtgctgggattacaggagtgagccatcgcgcctggcccaagctatttgcaataaaattttttccttgataaacttttataacgaaagaaaacgtcttaattttcagtgttgctaatattaaattacagtgtactaagttcttattagttttttttttttttcattttctatacttttttatttttaaatgacagagtctcactttgttgcccaggctagtctccaattcccgggctccagtcatcctcttgccttggcctcccaaagtcctgggactacaggcatgagccaccacacctgggctacatttttaacagatggtaagagagttttaaaaggtcacagaacaattgtcttattaattattattatccaataataattttctcgattattaagttctctttgcacaatttaagtttacatggtcttttttttttttttttttttaaatggagtctcactctgtcacccaggctggagtgcagtagtgcgatcctggctcactagaatctttgcctcccgggttcaagcaattctcctgcctcagcctccgaagtagctgcgattacaggcacatgccaccatgcccggctaattttttttgtattttcagtagggacggggtttcatcatgttgaccaggctggtttcaaactcctgacctcaagtgatctgcctgcctcggcctcccaaagttctaggattacaggcctgagccaccacgtctggccaacatggtctttttttttcttttgagacggagtctcgctctgtcacccaggctagagtgcaaacggtgcgatcttggctcactgcaacctccgcctcccgagttcaagctggtctcctgtctcagcctcccgagtagccgggattacaggtgagtgccaccattcctagctactttttgtattttattagagacgggctttcaccatgttagccaggctggtctcgaactcctgacctcaggtgatccgcccacctcggcctcccaaagtgctgggattacaggcatgagccactgcgcctggcctcaacatggtctttttctgttttgctttgttttgttttttttgagtcggagtctcgctctgtcacccaggctggagtgcagtggcacaatcttggctcactgcagtctccacctcccaggttcatgccattctcctgcctcagcctcccgagtagctgggactacaggtgcacgccaccacgcctggctaattttttgtatttttagtagagacagggtttcaccgtgttagccaggatggtctcaatctcctgacctcgtgatccacccacctcagcctcccaaagtgctgggattacaggtgtgagccaccatgcccagccaattcaacatggtcttttttttttttttttttttgagacagagtttcgctcttgttgcccaggctgccgtgcagtggcacgatctcagctcactgcaacctccgcctcccagttcaagtgattctcctgccccagcctccggagtagctgggactacaggcgtgtgccactatgcccagctaatttttgtattttttttagtagagacaggctttcaccatgttggccaggatggtcttgatctcttgacctcatgatccacccgcctcagcctcccaaagtgctgggattacaggcatgagccaccacgcccagccaacatggtcatttttataatgccacactactgtggaaagtaaagactacctgaatatgtatgtgtatgtgtatatgtatatatatgtatgcatcctcacatatgtatctccacaattgattttgtttattttttgagacaggatctcactctgtcacccaggctggaatgcagtgctgtgattatggctcactgctgcctcgactgcctgggctcaagcaatactcccagctgagcctcctgagtagctgggaccacaggcatgcaccaccacacccagctaatttttaaaaaattatttgtagagacaaggtcttgttatgttgcccaggctggtctggaaatcctgagctccagtcctcctgcctcggcctctcaaagtgctgatattacaggtgtgagccacctttccaggtgtgagccaccacatccagctttctctacaattaaaaaaaatgcaaatagagttatattgttcttcaacctgccctttttgtttgtttttgtttgttttgttttgttttgttttaagacaaggtctcactctgtctcccaagctggagtacagtggcacaatcttggctcactgcagcctcaaccttctgggctcaagcaatcctcccacttcagcttcccgagtagctgggactacagacacgtaccaccgtggccagctaattttttgcattttttgtagagatgggatttcaccatgttgcccaggctgatctcgaactcctgagctcaagcaatctacccgcctttgcctcctgaagtgctgagattacaggtgtgagtcaccgcggccagcctgtctctacaatttaaaaaatgtaaatgggttatattgttcttcaacccttttaaaaaattaccatacttttttttttttttttgtaattgaggtgaaattcacctaacatacaagtaactattttaaggtatacaattcagtggcatttagtgcattcacaatgttgtacaaacattatgtcactgtagtttcaaaactttatcgttcccttaggaaaacactccgtacccatcaaatagtcactccccattacctcctccctgtcctctggttaccactcatctgctttctgtctctatagacttgttattctgaatatttcacagaaaaggaatcatagctatgtgaccttttttgtccggcttctttcacttagtgtgttttgtttgtttgtttgtgacagggtcttgctctgttgtccagactggagtgcagtgtcatgacctcagctcactgcaatctccacttcccaggctcaagcgatcctcccacctcagccatcttattatctgggactacaggcacacaccaccatgcctggctgatttttgtattttttgtagaaacaaggttttgccgtgtttcccaggctggtgtcaaacaatgatcctcccacgtcagccttccaaagtgcagagattatagtcatcagccatgtcgccctggcctcacttaatatatttttgaggttcatctaagttacagcatgtgtcagcacatatttcattccattttgtggctgaataatattccatggtacagatatgttacaatttatccattcatccattgatggacaatttgggtttttttcacctgttggctatgatgaatactgttgatataaacatttgtgtacatgtttctgtgtggacatatgttttcagttcttttgggtatatacctaggagtgaaattgctaggttgtaaggtacttctatatttggacttcataaaaattaaaaagttttgtgtaccaaagaacattatctgccgggcccgggtaattgcagcactttgggaggctgaggcggggggatcacctgaggtcaggatttcaagaccagcctggccaacatggcgaaaccctgtctccactaaaaatacaaaaattagctgggcgtagtggcgaacacctgtagtcccagctactcgggaggctgaggcaggagaatcgcttgaacccaggaggcagaggttgcagtgagctaagatcacgcctctgcactctagcctgggcaacagagtgagactctgtctcaaaaaaaaaaaaaaagtacattatcaagaatgtgatcaggctgggcacaatggctcacacctgtaatccaagcactttggaaggccgaaacgggaggattgctagaggccaggagttaaagcccagcctgggcaacgtggtgagaccccatctctgcaataaaaattttcgaagttgttggtttattttgagttaatttttgtagatggaacgaggtgaaactcctgcttcattcttttatatgtaaatatccagttgtcccagcaccctttgttgaagagactattctttcctctattaaatgggcttggtgccgggtacggtggctcacgccagtaatcccagcactttgggaggccgaggcgggcagatcatgaggtcaggagatcaagaccaccctggctaacacggtgaaaccccgtctctactaaaaatacaaaaaattagccgggcgtggtggctcgcgcctgtagtcccagctatgcaggaggctgaggcaggagaatggtgtgaacccgggaggcagagcttgcagtgagccgagattgtgccattgcactccagcctaggcaacagagcgagactccatctcaaaaaaaaacaggcttggtgcccttgtcaaaaatcaataaggccaggcgcagtggctcccacctgtaatcccagcactttgggaggccaaggcctttgtattgcgtgagtccagaaatttgagaccagcctgggcaacatagtgagacccccgtctctacaaaaaattaaaaaattggccaggcacagtggctcacacctgtaatcctaacactttgggaggccaaggtgggcagatcatgaggtcaggagatcgagaccatcctggccaacatggtgaaaccccgtctctactaaaaatacaaaacttagctgggcatggtggtgtgcgcctatagtcccagctactcaggaggctgaggcaggagaatcgcttgaatcccagaggcagaggttgtagtgagccaagatcgtgccacagcactctagcctggcaacagagcaagactccatctcaaaaaaaaaaaaaaaaaaaaattagccaggcatggtggcatgtgcctgtagtcccagctactcaggaaattgaggcaggaagattgcttgactctatgagaacaaggctgtagtgagccgtgatcgcaccactgcactccatcctgggtgacagagcgagaccctgtctcaaaaaaaaggaaaaaaagaaaaaaatgtccagctacttgggagactgaggtgagagaatcacctgagctcaggatgtcgaggctacagtgaaccgtgattgcacacaccactgttctccagcctgggctacagaatgagaccctgtctcaccaaagaaaaaaaggaaaaaaaaatcagtgggccaggctgggcatgatggctcacgcctgtaatcacagcactttgggaggccgaggtgggtggatcacctatagttccagctactcaggaggctgaggcacaagaatcggcagaggctgcagtgaatcaagatcgtgccattgcactgcagcctgggcaacagagtgagactctgactcaaaaaaaaaaaaattagtgggccatagatgtttgggtttattactgggctctcaattttattccatgggtctatgtctgtctttatggtaataccacactattctaattataagctttgcagggccaagcgcagtggctcacgcctgtaatcccagtactttgggaggccaaggcgggtggctcacgaggtcaggagatcgagaccatcctggctaacatggtgaaaccccgtctctactaaaaatacaaaaaaattagctgggcgtggtggtgggcacctgtagtcccagctactcaggaggctgaggcaggagaatggcgtgaacccgggaggcagagcttgcagtgagccaagatcgcgccactgcactccagcctgggcgacagagcgagactccgtctcaaacaaacaaacaaaaaaacctttgcaataagttttgaaatcaacctgcatttttcacataacctgaatatctttccacgtcagactgctaaaagcaatcttattccttttagtggttgcacaatggttcattctatggttaaaccacgcagtgatacagtgatattgtgatacagcgatactgaactagccccaggttgatggatatcagattgcctccagtttttttctctcatgctgagtgctgcgttaatcatccaagtgtatatttttgtatatacgtgtgaatattcctgtaagatcagcttttagggctgggtgcactggctcacacctgtaatcccagcactttgagaggtcaaggtaggagaactgcttgagcccagcagtacaagaccagcctgggcaatgtagtcagaccttgtctctactaaaaataaaaagttagcccagcatggtggcgtgcacatgtggtcccagctacttgggaagctgaggtgggaggatggcttgagccccagaggtgtaagctgcaatgagccataattgtgccactgcactccagactgagtgacagagcaagaccctgtctcaaaacaaacaaacaaaaaacttttaggagaggaagtgttgagtcaaagagtggtatgtgttattattaaattgccctccaaaacttacaccagtgaacactcttaacctagtgcttgcttttcaaatcacaaattctcaccttttagtacattgtaggatcagtttggtgggtctcaagtttgtcttggcccatctgagaggcaaaaaatagtacttcgctttcatttacgtatcactaattatgactaattttcagcatcctttcaaggttattgacttttttttttttttgagacagagtctcgctctgtcacccagactggagtgcagtggcacgatctcagttcaccacaacctccgcctcctgggctcaagcgattctcctgcctcagcctcccaagcagctgggattacaggcgcacatcacggctaatattttttatatttttagtagagacagggtttcaccatgttggccaggctggttttgaacacctggcctcaagtgatctgcccgccttagcctcctaaagtgctgggattacaggcatgagccactgcgcccggcgactattttcttttcttttcttttctttttgagacagagtctcgctctgttgcccaggctggagtgcaatggcacgatctcagctcactgcaacctccacttcccaggttcaagtgattatctcacctcagcttcccgagtagctgggattacaggtgcctgccaccacacccggctaatttttgtattttagtagagacagggtttcaccatgttggccaggctggtctcaaactcctgacctcaggtgatccgcctgcctcagcctcccaaagtgctgggattacaggcgtgagccaccacacccagcgactatttgcttttgtgaatttcccatttatatctttttcacactttttcttattgagatgctggtcttttgttgtcgatttatacaaatatttgcatattaaggctcatattatattaaaatggcccagttacttgtttgtctccttgattagattgtgcgctccttggaggaaaggaaggtatcctatcacccttgtatacatggtggctagcttagggaatgaatagcacataataggaattcactgaggagatgtacacttaccatatggcaggctctgtgcaagatgttgagaataaaaagatgaacagaagagaatctttgttctaacaaagcttacagtctggtgcaagcgatagacattcattctcattctgcaggtttattgagcagctgctctgtgccaggtgcataacgcccattggaagagccagcctattaggatgagaaaaatgtcaggactgggacttcgctaacctggtcctgggaaatctgggtgggtcagttccccatccctggttatcagtatccccatcaataaaatgtgagccactggaccaaattctctcatttcccattgagcatccatgcatctgtgctgctttggcttttggaaagtaggagtcagagtcctgagttcaaatattggctctgtgctgggtgtggtggctcacgcctgtaatcacagcactttgggaagccgaggtgggtggatcacctgacgtcaggagtttgagaccagcctggacaacgtagtgaaaccccacctctactaaaaatacaaaattagcctggtgtggtggtgcatgcctgtaatcccagctacttgggaggctgaggcacgagaatcgcttgaacccgggaggcagaggttgcagtgagccaagatcgcaccattgcactccagcctgggcaacaagagcgaaactctgtctcaaaaaaaaaaaaaaaaaaaatatatatatatatatatatatatatatatatatatatatatatatatatatgtaggctctgctacttgttagctgtggccttgggtgtgtgacttagcctttttttttttttttggtgtgggagggatgtggggagggacatggtcttgctttgtcactcaggctgcagtgcagtagtgcaattatggctcacttcagccccaacctccaggctcaagtgatcctcccacctcagcctcccgagtagctgggactacagacgtgcaccaccactcccagataatttattattttttgtagagattgagtctcactacgttgcccaggctggtctcgaactcctgggctcaagggatcctcctgccttggcctctcttgcaggcataagccactgtacctgaccacttagcctcttgaaggaatctttcttataggattaaaagtgatgggaagccaggagcagtgactcacacctctaatcccagcactttgggaggcctaggcaggcggatcacttgaggtcaggagttctagaccagcctggtcaacatggtgaaaccctgtctctactaaaaatacaaagattagctggacatggtggtgcacaactgtagtcccagctactcgggaggctgaggcacaagaatcacttgaacatgggaggcggaggttgcagagagctgagatcgcgctgctgcacttcagcctgggcgacagagcacgactttgtcccccaaaaaataagtaaataaataataaaagtgatgggacctgatttcaagtagtcaaaatcgcagagacagcaaatgggctgggctatgggccagagggtaaagggatgtaattgtttaatgggtacagagttgtcagttttacaagatgaaaacagttcccaaaactgtatacctgtacatagttaagatggtaaagtttatgatatgtgtattttaccaaaattttttaaatgaaaaactttttttttttttttttttttgagacagagtctcgctctgtcgcccaggctggagtgcaatggcgcaatctcggctcactacaatcttcgcctcccgggttcacaacattctcctgcctcagccttccaagcagctgggactataggcacccgccaccatgcctggctaatttttttttcgtatttttagtagagacggggtttcactgtgttagccaggacagtctcgatctcctgacattgtgatccacctgcctcggcctcccaaagtgctgggattacaggtgtgagccaccgcgcccggcctgaaaaacatttttaagtggtgggacgtgtagggctccacggggcacctagcacaggaaagcgtgtggtaaataaaaggtgactgccagggctgttgaggagctgactagggaaggcctgcttcctagaaaaggggtgaggcgcagggcattggagggaggtgtgcctgggaggtcaggagtcctgccttatgcgggaacctggagcagcaccctccctgctttgggcctcctctgtgaagtgaggcgtagtcccctcctggggccagcaggttgctctgtgacctgggccagcaacctcaaagccacgaggggcctggctccttgcgccccctgctggccgactcgggaataacacacccacaagcccccaagttgctcccaaccaacctggccaagttgctgggttaaggcagcctacgtgccccctgtacccttctgctcttggctgagaaccccttatggcttctccctccctccctccctcctaagttcctggaacctaccttcaccacacccataagctcacagacacagacacagagatgtgtgcacatgctcaggtgcaagctcttgtatttggatccttttgttgttttggtttttttttttgtagagaaagggtgttgttatgttgcccaggctagtcttgaacttctgagctcaagcgatctgcccacctcagcctcccaaaatgctgggattacaggtgtgagccaccatgcccagcctccatgaattattattatttatttcatgcatagaaaattgatgttcagagaggtaaaatggcttgcctcatgtcacactgccaaggtcatcaaagcctgtgttctaatccttcccccgtctctcagcactgccctcctccttgtgtgtctacttggggcctgatcctgggtgtggtaatagaacagacctaccctgtggagggtgcaacataacattcacttctggccgggcatggtggctcatgcctgtaatctcagcactttgggaggccgaggcgggcggatcatgaggtcaggagttcaagaccatcctggccaacatggtgaaaccccatctctactaaagacacacaaaaaaattagccgggcatggtagcgcgcgtctgtaatcccagccactcgggaggctgaggcatgagaatcacttgaacctgggaggcggaggttgcagggagccgagatcatgccattgcactccatcctgggtgataaaaagatagggcgagactctgtgtcaaaaaacaaacaaaccaacattgactcctatgcccagtcttacccggccacacataggcccgatgcactgccagtcccctgcaatggaagccgatcctggtttccagccccacccccaaggctgcaagattgtttaagcatatccgtgtgcagcacaggtgccacccagcttcttgacccccatggagccagtgatctggacacacagaaggcaccgcctttcctgagaactggcagtgcccagagaaggcaaggggccaaggctggggcagggcagagaagagggccacagctgggatctgtttctcctgagtttctgccctgtgctggcaccaggtgtacaatctgctataaggcctgcaggagctcaatgtaagtgttgttattttagtatgttaggaatttcctcacctgttaatgagggtgaggatagcacttgctttacagagttgttgaaaggatccagtgacaaaagtattgggacagagtgagtcctagtaaattaaagctggttgtattattaatattattcttggccaagtacagtggctcacatttgtaatcccagcactgggacgctgcggcaggaggatgccttgagcccaggagtttgagacaagcctgggcaacacagtgagaccacatctctacaaaaaatacaaaaattagctcaattcacttgagatgatgaagacatgacttagaatgttgtcacttcaggaaaaaaagactgatttgatggacacagagtccgatgtgggggagagtgtcagagagagaattgacctaccaggcaactgtgggtttttaactcagtggtcagaaagcagtagagtgggtcccggtagggtgaaatccagctcctcctgtagtcctagaagaagtagcaagatgttgggtctaggacaggaaatggctaacctaaagagaccctttggcccaggatggttcccatcccaagacacccctcagtcctgggccagcagatagttggtcttcatagaacaggcagagggcacagagtgcctcccatgaccagccctgggcttgggcctgcccttgggccgctcatccgtttagctgagttacctgagctaaagcaccagactccctcccttgaggtgacaccaaggaatgtccctcctgggatggcagtaacactaccctttgttgctcaaggcacaggtacttagtttcaggggtcagagtacatacttcaggcctctcctgggaaccgctctcaaatctaaggaacgagagggtgagctctggcatcgccttgtgtgttagcccattctcccactgctataaagaactgcgcaagactgggtcatttataaaggaaagagatttaattgactcacagttcctcatggctggggaggcctcaggaaacttaaaatcatggcagaaggggaagcaaacacgttcttcacatggcggcaggagagagaactgctgagcaaagggggaaaagctctttataaaaccatcagctctcatgagaactcactcattatcgccagcacagcagcatgggggtaactgcccccatgattcaattacctcccactgggtccctcccaggacacgtgggaattatgagaactgcaattcaagatgagatttgggtggggacacagctcaaccccatcaccttggatttgattcctaaggctgttgtaacaaactagccacacttcattgtattgcgtttggcagatatcacggtctttgcaaattgaagctttgtgagaaccttgcaccaagcaagtctattgttcccattgttccaacagaatgtgttcccttagggtctgtgtgtaattcccacaatagttcaaactttatcattattattatgtctgacacggtgatctgtgatcagtgatctttgatattactattgtgcttgttttggggaaccacaaaccatgcccatataagatggtaaacttaataaatgcgtgtgggccggaggcagtggctcacaactgtaatcccagcactttgggaggccgaggtgggcagatcacctaaggtcaggagttcgagaccagtctgaccaacatagtgaaaccccatctctactaaaaatacaaaaattagccaggcatggtggaatgcgactgtaatcccagttacttaggctgaggcaggagaatcgcttgaacccaggaggcggagcttgcagtgagccgagattgcgcaactgcactccaccctgggcgacaaagcaagactccgtttcaaaaaaaaaaaaaaaaggctgaacaaactgaaaaaccagcggctctttttcagttcatcagaaaattaggtcacagggtaacctgctgcccccaaactggagaggcagaaaggtagatacagagaatcatgatttgccagagcagaaaccttccctggaatcagcacctgggtgggaaaacctgaactgcaactgacgaatgtctggcagcgtggatgtgtgctgctggttaatgttaggtggcagctggactggagtaaggaatacctagagaatggtgaaacatgacttctgggtgtgtctgtgagggtgtttccagaggagattggcgtgggagtcagtggactgagtggggaagatccgctctcaatgtgggtggcagtatgcaattggttcacggcttgaataaaaacaaaagaggagaaaattttcctctttctgtctctgtctctcctggagctggaagattctccttctcctgccctttggatatcaaaactctaggctcttcagccttggactgagaattatcccagtggcgtccctggttctgaggcttgcagacttggactgagccacgctactggcacctcttgcaaatagtctctcaggggacttctcagcctccattaattgcgtgagtcaatttccctataaatcccctctcatgcactttgggaggccgaggcgggtgggtcacgaggtcaggagatcgagatcatcctggctaacacggtgaaaccctgtctctactaaaaatacaaaaaattagctgggtgtgatggcgggcacctgtagtcccagctacttaggaggctgaggcaggagaatggtgtgaacctgggaggcagagcttgcagtgagccgagatcgcgccactgcgctccagcctgggcaacagagcgagattctgtctcaaaaaaaaaaaaaaatggctgggcaaggtggctcaccagcacgatctcggctcactgcaacctccacctcctgggttcaagcaattctcctgtctcagcctcctgagtagctgggagattacaggcatgcgccaccacacccagctaatttttgtatttttagtagagatggggtttcaccatgttgaccaggctggtctcaaactcctgacctcaggtgatccacccacctcagcctcccaaagtgctgggattacaggcaggagccactgcacccagctgagagtaacttttttttttgttgttgagacggagtctccctctgttgcccaggctggagtgcagtggcgcgatctcagctcactgcaggttcagcctcctgggttcacgacattctcctgcctcagcctcccgagtagctgggactacaggtgcccaccaccacacctggctaatttctgtatttttagtagagacagggtttcgccgtgttagccaggatggtctcgatctcctgacctcgtgatccgcctgccttggcctcccaaaatgctgggattacaggcgtgagtcaccgtgcctggccaagggtaactatttttaagtatgccagagcattcctccaaaatactctttttctttcttttcttttctttgctttttttttttttttgagatggagtcttgttctgtcacccaggctggagtgcaacgcacaatctcagctcactttagcctccaagcaattcccttgcctcagcctcccgagtagctgggattacaggtatgagccaccatgtccagctaatttttgtgttgttagtacagacaggatttcaccgtgttggccagtctggtctcaaactcctgacctcaagtgatctgcccacctcagcctcccgaagtgctggaattataagcgtgagccaccgggcctggcctaaaacattctttttctttttttgttttttgagatggaatttcacttttgttgcccaggctggagtgcaatggtgcagtggctcactgcaacctccgactctcggattcaagtgattctccagtctcagccttccaagtagctgggattacaggtgcatgccatcacgcctggctaatttttgtagttttagtagagatggggtttcatcatattggtcaggctggtctcagactcctgaccttaggtgatctgcccgccttggcctcccaaagtgctgtgattacaggtatgagccaccatgcccgggcttttttttttttttttttttatacatggtctcactctgttgcccaggctggagtgcagtggagcaattttggctcattgcaacctctgcctcctgagctcaagcgattctcgtacctcagcctcctaagtagctgggactacaggtgcatgtgacttcgcccagctaatttttgtatttttggtagagatggggttttgtcgtgttggccaggctggtctcaaactcctgacctcaggtgacccacccacctcagcctcccaaagtgctgggattacagacgtgagccaccgtgcccagccttggctgtttgtgtatcttttttggaaacattcagatttatgatttgcagatatttccttccattccatgggctgtcttttcattttcttaatgggtatccttgaagcacaaaagttcttaattttgatgaggtccagtttattttttcttttgttgtgtatgctttggatgttatgtctagaaccccaaggtcacagagatttattcctatgttttcttctagttttcttgttttagttcatacatttagttttgttttttgtttgtttgtttgttttgagacggagtctcgctgtgtcgcccaggctggagtgcagtggcgtgatctctgctcactgcaagctccgcctcccgggttcacgccattctcctgcctcagcctccagagcagctgggactgcaggtgcccaccaccacgcccagctaattttttgtatttttagtagagacggggtttcactgtgttagccaggatggtcttgatctcctgaccttatgatccgcctgccctggcctcccaaagtgctgggattacaggcgtgagacaccgtccccagcccatacatttagttatgtgattcactttgaattaatttttgtgtatggggcagggcacatggctcacgcatgtaatttcagcactttgggaagctgagtgaagcggtggcctgtccctccacacctgtgggtatctcatcaggtgggacgagagactgagaaaagaagtaagacacagagatgaagtatagagacaacagtgggcccaggagactggcaagcagcatatcaaggacctgcaccagcatcggtttctgagtttcctcactttttattgattattatttttattatctcagcaagaggaatgcagtaggagagcagggtgataataaggagaaggtcagcaaaaaaacatgtgagcaaaagaatctatgtcataattaagttcaaggggaggtactatgcctgcatgtgcacgtaggccggatttatgtttctccccgcccaaacatctcagtggagtaaagaataacaaggcagcattgctgccaacatgtctcgcctcccgccatagggcggtttttctcctatctcagaattgaacaaatgtataatcaggttttataccgagacattcagttcccaggggcaggcaggagacagtggccttcctctatttcaacttcaagaggctttcctcttttactaatctacctcagcacagaccctttacgggtgttgggctgggggacagtcaggtctttctcatcccacaaggccatatttcagattatcacatggggagaaaccttggacaatacgtggctttccaaggcagaggtccgtgcggctttccgcagtgcgttgtgcccctggtttattgagattagagaatggcgatgacttttaccaagcatactgcttgtaaacattttgttaacaaggcatatcctgcacagccctagatcccttaaaccttgattccagacaacacatgtttttgtgagctcaaagttggggcaaagtggctggggcaaagttacaaattaacaacatctcagcaaagcaattgttcaaggtacaggtcaaaatggaatttcttatgtcttccctttctacatagacacagtaacagtctgatctctctttctttgccgtacatatcccccttttctttttgacaaaaccgccatagtcattatggcctgttttcgctggttgctgtctctctggagctgctggatacacctgtagaccagcaacagagaacagacatacaaggattaatacaaaatttgcaatagtggaacttccagtggttttaacccaagtgatggggttaagatttgtgaggccatcagcagctttcaccattgcctcagtttctggcaccagattgaactgggcttttgatgcctcaaaaatttgttattttaattttaaaatatctaaagtaaggttatcttctcttccttgtagatggcgtctaaccatgtcccagtgatgttcagattcattataggctcgaggtgtaatacaaaaatctgacatattccagtcacactgtaactgaaaaagatattctaagctcatgagcctatctctcattcaaatgacagtttgtctacgatcattaatttggtttgccaatttttggtctatttgagtctgagaattccacaattttgaggagttcttttgccaattatttatatattttgtagtttgaacagaggagtgtaaagcaattccagcagccgcagcagtagctgtgactgcaataagacccataatcactgcaattaaagtaaaaaatgaatcttttggatctagttagaactccttttaatacttctgttaaaatatggatggatggggaagcctcccacggtcggtccatggacacagggatccacacaccctctcttgccctcactggcagaatatggtgctgccaatcaaaagttgaatcaatgcaagtaaacaatctacaattttcacaggttatagtttgggaatctggtttaataactatgtttcctacaactagcatataagagggttttacacaactttgcaaaggaattgtcggattggaatttaggttaatagtataatgtggcttatgatttcttgttccgataacttgatttccagaccaaattctaatgtggtgcgaggccacagtaagctttcataatgctggatgttcaggagcagtaacaggactaactaactttggttgaggtgatgaaatccccttttcaccccatttccatggatagggtgattctagccttctataaacctggtctagcctttcagttaaatcactatcataggccggattagtgggccagacagatggggtctgtgaacatgagtgagtctggcccatacaaccataatataattggttttgaggggcccagtctataatagttccaaatttattgttttgtaataccaccacagtatcagccacatatttttcccaaactaagacttctgggtcttttgattctttgggaatttccttgaggcaaggtccccttaggcctaaattttaatgatctttgataagaagagtcctgtaaattattcatttgtgacccaagtgacattccacttaccatatgataagtaaatttattggtggcactgacagtagatacttctaccaaccaattttgggttgtaggcattaagcatcctggtgctttccccaggcaaataggaggataatgatacccagtggaaatgtttatcatcattccttcttcttcaggttgggcagggccgcggtcatctgtgggtcctggtacccatgcactaatattaacacatacttcaatagaatattatccatccaagtgactgcctgaattaagggcgggaaaggcacataggcccagtaagtataattagctgcagctgctcctgcagacatagtgagacttaccaccattgatacaatcattaaagctgcaagcagcatattctctggagtttgtgttacccttgtgtactttaggcttttttcagctaactgtgtcagcttctttagctgggcccaggtcggcggcttcgcttttttggtggatggcaactttttctgtaagttgtaggtacccaaactggaagctgattttctcctggtgaaacacgagcaaaacctctcccccacgttatcaccttctctattttttatgttttatttttgttgtctttttaccaaatcagtttttcctcatgtgggctgttctttttaccagtaaaatgttgttctgcagaagtagcggtctgatttctataaatgttaaaaaaatttaaagtatagagtgctagattaagttgcatctggggagtgttatattccttactgtccttttcctttttttgtttaaccaattgagctttgagtgttctattacttctttcaattatggcctgtccttgggaattataagggatttctgttgtgtgtgtaattttccactgatttaagaatttttgaaatgctttactacagtatcctggcccattatctgttttaattttttatggaactcccatgacagcaaaacaagataataaatgtcttttaacatgggaagtattttctcctgtctggcaggttgcccatatgaaatgtgaataagtatcaactgtcacatggacaaatgacaattttccaaatgaaggtacatgtgtgacatccatttgccataatgcattgggacataaacctctgggattaactcctgcctcctgagtgggcacatgtaggacttgacactgagtacaatgttgtacaacattttttgcctgttttcatatgatatcaaatttattttttagtcctgatgcatttacatgagtcaaggcacgaagtttttatgcttttatgaatgcagatgatactagcaagtcagcttgttcatttgccttagttaaaggccctggtaaattagtatgtgttcgaatatgagtaatataaaatgggaaatttctttttcttacagtttgttgtaacgaattaaacagctgatttaactgatcatccatactatatttgattagggctgtctcaacatcctttgtagcctgtactacatatgcagaatctgaaacaatgttaataggctgattaaaaccttgtaacactgaaatgacagcaaccaactctgctctttgagctgagtgatattgagtttcaatgacttgttcttttggcccagtttaagccacttttccattgctggaacaatcagtaaacgccatcagagcattttctaaaggtttatatctggtaattttaggtaaaatccaagtaatcaattttaagaactggaagatttttgtttttgggtaatgattgtcaataattcccacaaaatcagcaagaccaatctggcatgcagcagaattgataaaagcttgtctaacctgttccttgtttaaaggaacaatgattttatctgggtcacttccacacaattttactatatgtagtcttgcctgaccaattaatgtagccatttgatctaagtacaatgtaaaagtcttagttgtactgtgaggaaggaatgaccactctgcaagatcagtattttgaacaataatgcctgttggagaatgtgcagtagcaaaaatcaaaagttggagtggggctaaatgatctattctatttacttgtgctgaccgaattttttcttcaactaattcaatttctttagttgcttctggagttaatggttttttactgtttaagtctggatcccctctcaagatagaaaacaaatttgacatggcataagtagggatgcctagagttggccgaatccaattaatatgtcttagcaatttttgaaagtcatttaatgttttttaatgtgtcttttcttatttttattttttgtggtttaattttcctttcctctacctgcattcccaaataatggaaaggagtagaggtctgaatcttatcagatgctattgtcagtcctgcgtttgcaacatctgtctgcagaaatgtgtaacagtcaattaatttgtctcttgtttctgcagcacacaaaatatcatcaacataatgaatgacataacaatctgaaaacttgtctctaactggttgaagaacttgagctacaaaagtctgacaaatagttggactgaggcaacactttccactaaaacctggctggttctttattatttacggctggtatagtaaaagcaaatttttcaaaatcctgttttgccagaggaatggtaaaaaagcagtccttcagatcaattataattaaaggccagtctttggggatcatggccagagagggcatcccgggttggagagcacccatgggttgtattatggcattaacagctcttaagtcagtcagcatgcgccatctgcctgattttttctgaattacaaacacaggagaattctaaagagagaaagtgggtgaaacatgtccttttttaaatagttttttaactattttatgtagcgcccccaacttttccttagagagtggccactgtttgacccatacaggacactgcagggcgagtctgaattgctccttcactgtagtgaactgtaggttgggcaataatgagtgccacgagccaagtcgcagtgtgcctagtttcaggctgcctcccccagcactcactcggctgaggaggaggtggccattgtggttgtagccccaatggccccaatgattctggactttttccttttaattttaatgtttcaggatatattacctcctgtaattgattgtagtcaacactttgcgttgactgagccattaccggctctgctacatatttacaatgtgaactttccgttcctttcttgaactctgtctctgcctcttcttcacaatctatcacacagctttcaggggcatcagaaactgaaatgctatcttcttctatttgaaatggttctaaagttgctttaataatggcccaatcattccatactgtaagtgggatgattttaccttccctacttgcttgttttaattccttgccaattttttcccaatcttttaaatctaaagttccttgttctggaaaccatgggcagaattgttctattgtttgaaatagcgtaattagattttctgtagaagctttaactccccctcttcttaagagaattttaatgaagctgagataagaggcatatttactttcagtttgccccattgttaccctggattcctccgagcgcacaagcatactgcaaggctgaccgtggacgtactcgggaatctctcatcagctgtcctcaatactcacgttctcagcataacttcaccctggagaaaggccccatattgggcgtcagatgaaggggtggcctgcccctccatacctgtgggatatctcgtcaggtgggatgagagactgagaaaagaaataagacacagagacaaagtgtagagaaacaacagtgggcccaggagaccggcatgcagcatatcaaggacctgcaccagtaccggtctctgagtttcctcactttttattgattattatttttattatctcagcaagaggaatgcagtaggagagcagggtgataataaggagaagttcagcaaaaaacatgagcaaaagaatctgtcataattaagttcaaggggaggtactatgcctgcatgtgcatgtaggccggatttatgtttctctccacccaaacatctcagtggagtaaagaatagcaggcagcattgctgccaatgtgtctcgcctcccgccatagggtggtttttctcctatctcagaattgaacaaatgtataatcaggttttatactgagacattcagttcccaggggcaggcaggagacagtggccttcctctatctcaacttcatgaggctttcctcttttactaatccacctcagcacagaccctttacaggtgttgggctgggggacggtcaggtctttctcatcccacgaggccatatttcagactatcacatggggagaaacctcggacaatacgcggctttccaaggcagaggtccctgtggctttctgcagtgcattgtgcccctggtttattgagactagagaatggcgatgacttttaccaagcatactgcttgtaaacattttgttaacaaggcatatcctgcacagccctagatcccttaaaccctggttccctacaacacatgtttttgtgagctcaaagttagggcaaagtggctggggcaaagttacaaattaacaacatctcagcaaagcaattgttcaaggtacaggtcaaaatggaatttcttatgtcttccatttctacatagacacagtaacagtctgatctctctttcttttccctacactgaagaaggaggatcgcttgaagtcaggggttcaagaacagcctgggctggccaggcatggtggctcatgcctgcaatcctaacactgtgggaggccgtcatgagcagaacaacttcaggccaggagttcaagaccagcctggccagtatagcaaaaccccatctctaattaaaatacaaaaattagccaggcatggtggcacacacgtataatcccagctactcaggaggctgaggcaggagaatcacttgaacccaggaagtcgaggctgcagtgagctgagaaggcaccactgcactccagcctgggtaacaacgtgagaccctatctcaaaaaaaaaaaaaaaaaaagaagaaaataaaaaatttatatgtgtgtattctgtgagatagaggtccaaattcattcttttcttttcttttctttttttttttttttgagacagagtctcactttgtctcccaggctggagtgcagtggcgtgatctcggctcactgcaacctccatctcccaagttgaagcaattctctgcctcagcctcctgagtagctgggattacaggtgccaaccaccatgcctggctaattttttgtatttttagtacaccatcttggtttcaccatcttggccaggctggtcttgagctcctaacctcatgatcagcctgcctcggcctcccaaagtgctgggattacaggcataagctgccacgcctggccccaaattcattcatttacatgtggatatttagttgtctcagcaccatttgttcatttgttgaaaagattattatttcccaccccccacccccgctttttttttgagccggtgacttgctctgtcacccagcctggagtgcagtggtgtgatctcggctcactgcaacctccgcctcctgggttccagcgattctcctgcctcagcctcctgggtagctgggactacaggcatgtgccaccatgccctgctaattttgtatttttcgtagaaatggggtttcaccatgttgaccaggctggtatcgaactcctgacctcaggtgatccgtccacctcagcctcccaaattgctggaattacaggcatgagccaccatgcctggcctccccacctttttttttgagacagtctcattttgtcgcttaggctggagtacagtggcacgatcttggctcactgcaacctttgcctcccaggttcaagcagttctcctgcctcagcctcacaagtagctgggactacagtcatgtgccaccacacccagctaattttttgtatttttattagagatggggtttcgctggtctcaaactcctgacctcaaatgatcctcccgccttggcctcccaaagtgttcgtgttacaggcatgagccacacccagcctcccaattttttttttttttttttttttgagacagagtctcactctgtcacccaggctggagtgcagtgagtggcgtgatctcggctcactgcatcctccacctcctaagttcaagtgattcttctgcctcagcctcccagtaactgggattacaggtgcacaccaccatgcctggctaatttttgtatttttagtagagacgaggttttagcatgttggccaggctggtcacaaacttctgacctgaagtgatccactcgcctcagcctcccacagtgctgggattacaggcgtgagccaccatgcctggcccccatttgagtttcttagcatcttatcaaatagcaattgtgaccatttatttctggactgtcagttctattcaattgacttatatatctatctttaagcagtatcacactttcttggttcctgtatgtttgcattaagcttccaaattgtgcagtgtgatttcttcaatttttttcttctttttcaggcatttacttttttttttttttttttttttgagacatatctccctctgtcgcccaggctggagtgcagtggtgggatcatggctcactgtagccttgacctctccaggatcaagtgattctcccactttagcttccccagtagctgggactacaggtgtgcaccatcacacctggtcaatttttgtatttttgtagagacggtgtttcagtatgttgcccaggctggtctcaaactcctgggctcaagagatcctcctgctttggcctcccaaagtgctgagtttacaggtgtgagacacattgccctgcttgaatttgttgattgcatctccatggtgttatttaacatgttcttctgtccctgtattttagtcattcaacagtgtgatctaatttagggccacttttacagcaggaataatttgcaggtggtgtatgtgtttccagagtcagaacatgtttggtttatgctcttggtgatattcagggctatcagtgatcctctcctggatcattttttaattagaggtgatttgtgttttgaaagggtcacttgggttgctggggggtgtattgtatatgagtaacagggttcttataaggacggagtcggataatcatgcaacagagcacttggtgctattcctggcacgcaatgaccatattgttgttgttgttgttgttgttgttgttgttattgttagagctgtgtgtgggggacccaagtcctgagctcggaggcattttctggccagggctgtttcctcccttctcccctgcctctggaaaagtctgcagtgccccaaggctctgggaggcatgttcaggactgcagcagccatctctgtgcacctggtggggccccttcagggaaggaaggctggagccccactcacttggttcttgcaccagactgtaagtgccctaaccccaatactctgccacctgcatggcctggggcttctggggtctggctcgttcctggcttcaaagctgtgcatgagccttctctttcagggagccctctttaactgcagcctgtatgtgggcttctcccttgcccctgcttctctagtctagaacttgtagctctgcatctgaatagtcagcttgggcgctgtagggtgctgcttcccatgatcccctgtgcccatcccagaacccagtacctggtagggactcaataaatgtcaactgagccaggcgcggtggggttcctgggccatggaagacctggcacttactcaaatggtcccaaggcccctccaggacaggggggcctggtgttgagattactgtggctgccaccctgaccaggtccttgccagcttctcttctgaccctgggcaggtacctgagcctcttcaagcctcagtgtcctcatctgttagatggagactattgtggcacctctagtgagagtgcagtgggaactgagcgaggtggaactgagcaaaatcctgagccagggttcactattgaccacagcaggtggctgagaagaatgttggatccccagctccacggcccaccagccatctgggactggcaaacccacaggaacggaaggttcctcagggaccacaaagcccatgtgaggtccctgctgctgaagggattctgaggacaggaggagccaaattacctatccagggtcacccagccaaggtgggttaggacctgagtttggtggctctcaggtctggccaatttctttctttctttttttttttttttttttttttttggtagagtcttgctcgttgggtcgggcaggagtgcagtggctggcacgatcttggcccactgcaatctccatctcccaggttcaagtgattctcaggcctcagcctcctgagtagctgggattacaggcatgtgtcatgacgcccagataagtttctttgtttgtttttcccagactgagtttcactctaatgctcaggctggagtgcagtggtgtgctcttgcctcactgcaatgtctgcctcccaggttcaagtgattcttgtgcctcagcctcccaagtagctgggataacaggtgcgtgctaccacgcccagctaatttttgtatttttagtagagatgggggtttcaccatgttggccaggctggtctcgaactcctgacctcaggtgatctgcccgcctcagcctcccaaagtgctgggattacaggcgtgagccactgtgcccagcccctggccagtttctgcacaccagtggctgaggagggagctggcctgggaggaacaccgggaggggaggggcgagccaggagccaggaccccgggaccctccgaggagcggattagtgcctccctcagagttaggacatggccttgggtccaacaggcctaagtctgagtgtgtgtgttgtgtggccttaaacacatcactccccctcctgcaccctccagcctctgttttccaccttctgttttctcattgataagataggcctgaccaggtcattcagggaatgaaatggaagtgcttagcaagacctctgtaagtggaggctgctgctgtcactgttgccattatcctccctctccgctccacccacctcctgctcctcttctttaaccctcagcccttcctgagtcagactttaacctggccaagtcagggctctgtctcaggacgcatggagccagggctggaagtctccactgggcaggcgccaggcagcccctgcaggttggggaggtggaggctgctggagtcaagaggaaccaggtgagggtgttggagcataacaggcttgggaggcaggcagaaacctgcccttctgcaaactctatctcttccccctcctgggagcagacaggatggcgctgtggcctgaaagcagctgtccctcctgtgtgcaagctcggactgctgcacccagacagattccatctctgaccttccacttgttcgtctccagctcgccatggccaaacagctgcaggcccgaaggctagacgggatcgactacaacccctggtgagccagctgggctggggaggtgtgtgggtgtcccctcgggcatgggttggccatccctgggtttacagcaactcagtagtactccagatggtggcggtacacagactgccagattccagccatagctcaggagagacagggcccgagggagtaggcttggttcaaatctcagctttcttctgcatgactgtgccactaggacaggtgacatacctgctctgagcctcatctccccagctgcaaaatgaagagttatacccacctggagagcgttggggaggaaaaagtaaaatgctgtccaaagccattctacccaggcaccaagctaaggcctttccagggatgactctttctcacttggtatagagtcagataaactaagataagtaaaataagcaagtaagatacagtcagctcttcaccagacatttgcagaggttgatattgttttcttttttgacttgttttattttcattttatttttgagacggagttttgcccttgtcgcccaggctggagtgcaatggtgcggtctcggctcactgcaacctctgcctcctgggttcaaatgattctcctgcttcagcctccaagtagctgggattacaggcgtgcaacacaacgcccagctaattttttttctttttcttttcccccgcaagacagaatcttactctgtcacccaggctggagtgcagtggcatgatctcggctcactgcaacctccccctcacaggttcaagcaattctcctgcctcagcctcccaagtagctgggattacaggcgtgcgccaccacgcccagctaattttttttttttttttgtatttttagtagagatgagatttcaccatgtttgccaggctggtctcgaactcctgacctcgtgatccacccgcctcagcctcccaaagtactgggattacaggcatgagccactgtgcctggccctaatttttatatctttagagaaaatggggtttcagcatgttgtccaggctggtctcaaactcctgacctcaagggatctgccctcctcggccttccaaagtgctggggaatacaggcataagccaccgggcccagccaaaaatgacacattttagacatatttattggtatgcaaattcaactcagccaggtcttcactctgctccaaactagccccaaaccacataccagcctcttcatccagcttcccagcctttctcccacctggagaggtggcccccaggcagggccagaacagaggattatgggtccagagatgatgtgtgcctgggctggtggggccctgttctgcccagagtagggtcaagagcatcaaactttgcttgagatggaagtagaaaggctggctggctgtgccttgtactagctgggaggctttaggcaagtcactccactccttatccccacagtggtccaggaacaagatgtgcctcacaggccattgtgaaggctatatgagcagagcgtttaactgtggtgttgacgaatccaaggaggagtcatgcaatctgtacagggggtctcaactagtatttggaaagaatagagtaggataggacaggacagaaaatactgcagtagattgcaccaagaaggatgaagcttccattccatgtttgtgctccacagggttgatgatgcaaaggtgatttcttggccggtagtggtggctcacgcctgtactgctagcactttgagaggccaaggggggcggtggatcacctgaggtcaggagttcgagaccagcctggccaacatagcaaaaccccatctgtactaaaaatacaaaaattagctgggcgtggtggcgggtgcctgtaatcccagctactcaggaggctgaggcatgagaatcgcttgacctcgggaggcggaggttgcagtgagttgagattgcaccactgcactccagcctaggggatagagcgaaactctgtcaaaaaaaaaaaaaaaagatgatttcttcctatgggtcatggtggaagaacttggaaagcccctgggctgattcctgcgattaacaatgtgcctgactgacctaatctcaatgtaggggaccagctgtgacacttaggcagatcttcaggccaggacagttgctgattgtctagtttttgtttttcttgtgtgtgtatgtgtgtgttttttgttttttgtttttgtttttttaagacagaatctcactcttgttatccaggctgcagtgcaatggtgcgatctcggctcacttcaacctccggttcccgggttcaagtgattcttctgcctcagccttccaagtagctgggattacaggcccctgccaccatgcctgactaacttttgtatttttagtgaagacagagtttcaccatgttggccaggctggtctcaaactcctgacctcaggtgatccgcccacctcggcctcccaaagtgctgggattacaggcgtgagccaccacacctggccggttgtccagtttttctaaacaggccgaagtccaggtcaccatggagggctgggctggtgctgattctccatttgttacccagggtggagtttgtgaaactggccagtgagcatgacgtcgtgaacttgggccagggcttcccggatttcccaccaccagactttgccgtggaagcctttcagcacgctgtcagtggagacttcatgcttaaccagtacaccaagacatttgtgagtctccccatctctcgtggaggcactgggggaggaaggggacagggctttctggacttcaagcccacacagctgtcaggcttcaggggacagagccaggggattctgtatgaccatagttcagtgtttactgagcgtatcctctgtcccagagccttcgcctcgtggtctagtggggatggcagacaagaagccagtaacgacaggcagttgatacatgatgtgatggaggaggatgggatatcgtgcgagtaagaaagagggaatgaaacctggggagggggctggagagatgcacgaagacttcctggaggaggtgacacttaaaccaagtcctgaaagatgagctactggttggattacacaataaatccaaacgttttccggaaaggaccacatagtaaatatgtgacactgcttggattagaacagtggttctttttttctttttcttttttgagacaaggtctcactctgttatccaggctggagtgcaatggtgcgatcatggtccactgcagccttgaccctgccagtctcaagtggtcctcccacctcagcctctggagtaactgggactacaggtgtgcatcaccatgcccagctaattttatttatatatttatttatttatttttgagtcagggtctcactcctgtcacctaggctagagtgtagtgacatgatcacggctcactgcagcctgtacctcatggggctcacatgatatgccatttcctggggctcatgtgatcctcccacctcagcctctagagttgctgggacaacaggggcatgccacctcacccagctaatttagagacagggtttcaccatgttgctcagactggtctgaaactcctgggctcaagtgatcctgccacctcggcctccaaaagtgctgggattacaggcgtgagccactgaaccctcattctttttttttttttttttttgagatggagtctccctctgtcgccaggctggagtgcaggggcgcaatctcggctcactgcaacctccccctcccaggttcaagagattctcctgcctcagcctcccgagtagctgggactataggggtgcgcccccacgcccagctaatttttgttttgttttttttttaagacagtctcgcactgtcgccccggctggagtctggagtgcagcggcacgatctcggctcactgcaacctccgcctccgcctccgcctccgcctcctgggttcaagccattctcctgcctcagcctcttgagtagttgggattacaggcgcccgccaccatgcccagctaatttttgtatttttagtagagacggggtttcaccatgttggccaggctggtctcaaactcccgacctcgtgattcgcctgcctcggcctcccaaagtgctgggattacaggcgtgagccaccgcacctggccattttttgtatttttagtggatactgggtttcaccatgttagtccggttggtctcgatctcttgacctcgtgatccacccacctcagcctcccagagtgctgggattacaggcgtgagccaccgcacccgaccgcactcgttctttttaatggctgcatactgttctgttgcctggatgtgccataatttatttaagcagttctgcactgatggactgcttctgctatctcaatatcataagcaatgccacagcaaatatccctgtgtggacatctttgtatacatatgtatttctctaagataaattcctggaggtaaaactagcaaaagaaagactataaatatttataaatacaataggtggatattgttaagaaacagtgtgtgcctataatcccagctacttgggagtctgaggcaggaagattgtttgagcccaggagtttgaggccagtgcaacatagtgagatcctgtctgaaaaataaacaaacaactaagtaaataattgccctccagtaaggtttactcatttacatccctgccaataggctggtctcagagctggttggaaagttccttctttgatccaaaaaaaaaaaaaatcatttgggtatgtatctttttcttttctttctttctttcttttttttttcttttaactagagacaaaagctgggtatggtggctcacgcctataatcccagcattctgggaggctaaggctggcagatcacctgaggtcaggagttcaagaccagcctgcccaacatggtgagatcccatctctaataaaaattagctgggcgtggtggtgggtgcctgtaatcccaactacttgggaggctgaggcacaagaatcgcttgaacccgggaggcggaggttgcagtgggccgaggtggtgccattgcactccagcctgggtgacaacaacaacaacaacaacaaaatagagacagggtctccttatgttacccaggctggtctcaaactcctgggctcaagcaatcctcccaccttagcctcccaaagtgctgggttacaggcatgagccactgtgcccagcctcattaaatattttacctctttcttgtatgttgcaatatttttctcttcctgttttgaccttgctcatggtgccttttatttttatttaattaattaatttattgtctaagacagagtctcagttttattacccagactggtgtgatcataactcacttcagccttgatctcctgggctcaagcaatcctcctgcctcagcctcccgagtacctgggactacaggcacgtgatactacacctggataatttttttgattttccatcagtagagacagagtccctctgtgttgcccaggctgttctcaaactcctggcctcaagcaaccctcccgcctcatactcccaaatgctaggattacaggcgtgagccacggtgcctggcctgtgcctcttgttgtacagaaaatttttatatttgtgtggccaaatctggtttagtgagttactgagttgagttctagataaagtttcaatcacttggcttagccttgagtatttttgttttgttttgtttgtttttgttttttttgagacggagtctcgctctgtcgcccaggctggagtgcagtggcgcgatctcggctcactgcaagctccgcctcccgggttcacgccattcttctgcctcagcctcccgagtagagctgggactacaggtgcccgccaccatgccagctaattttttgtatttttagtagagacggggtttcaccttgagtattttataagtgtcctcagcaaacaagtttctggatctaatcttcctctcaaaaaggggtgcttacaaagctgcaacatgaggttcctgactgtcaactgtgtgtgactttagacaagtaatttcttctctctgggtctctatttttctacctgtcaaatagtgggcatcaggccaggcacggtggctcacatctgtaatcccagcactttgggaggccaaagcaggcagattacccaaggtcagaagttcgaaaccagtctggccaacatggtgaaaccccgtctccactaaaaatacaaaaattaaccaggcatggtggtgcgtgcctgtagtcccagctacttgggaggctgaggcaggagaatcacttgaacccaggaggcggaggttgcagggagccgcgattgtgccactgcactccagcctgggtgacatgagtgagaccctgtctcaaaataaataaataaataaataaataaataaataaataaataaaagcctctcccgcaaagctgctgggaggatcaagtgggcacaaacatgcttcttaaacttacagatgtggaaagtggggagtttctactgccttgtgggctcttggactgaggttcatggaggcaagcacttcctctggttctctgctaaatccccgccctgggcttcgggcctggcacagaacaggccctgtggcaaatgctggtggaggagatggaagagcttagcactggatatctgagtcagtgcaggcctggtggttggcaccctggagtctgggaccatatagattgtgtgacctttacctcccagagtacacaggatcacaatagcacctgcctctgggttgttgagaggatgagatcaaagaaatcccacaaatagcttggtgtgtagaggaatccagagtgttgaaagctgatctattccacgtcccctggggcccaggctaccagtacctgactttgcccccaggcctgctgctggaaggtgctagaattgcctggatacagctgggccggaggatgggcccaggctgagctggacagttaacccctgctgtcctggcagggttacccaccactgacgaagatcctggcaagtttctttggggagctgctgggtcaggagatagacccgctcaggaatgtgctggtgactgttggtggctatggggccctgttcacagccttccaggccctggtggacgaaggagacgaggtgagtgggcaagacttgggctgagtgggactgagaggtcagggccatgctgactccagctgatttgacccttatatcaggtcatcatcatcgaacccttttttgactgctacgagcccatgacaatgatggcagggggtcgtcctgtgtttgtgtccctgaagccggtaaggatgctaggtagaggatggatgggcagagggatccaaggcgtgggctgagttggaccctgggagttggaaaaggaggaaagaagtgaaggaagccagttcctctaagctgggagggcagaggggaggtgtgtgtgttgggatcccaggggagagaaggtggggatagatgctggggaagacctgcatgtcaggtggttaagtggtaccaccccatgccacctgctcttgcagggtcccatccagaatggagaactgggttccagcagcaactggcagctggaccccatggagctggccggcaaattcacatcacgcaccaaagccctggtcctcaacacccccaacaaccccctgggcaaggtactggagggacctccttccctggccccctgcggacctggtcatgtctcctgcactgttactgagttgctgctgtggggcctccgtttcttcgtttgtgtgtgggagggccacacacaatgagcactgaggaccaagactccagaggtcccaggacaggggcaagaatccccagggaaggcctgagggctgggacagtgaactgggctgggagccaccatcacttcccagtgaccctggaatagtgactatgcctctcgaagtatctcatctgtaatgtgggaacctgagggaactgacctcatggtcagtgttgcagggatccaatgtgatggtgcagaacagcccttagcactgggcttggctgtattcgccatttatttatttttttgagacggagtctcgctctgtctcccaggctggagtgcagtggtgtgatcttggctcattgcaacctctgcctcctgggttcaagcaattctcctgcctcagcctcccgagtagctgggattacaggcacccgccaccatgcccagctaatttttgtgtttttagtagagacggggtttctccatgttggccaggctggtcttaaactcctgacctccagtgttccgcccgcctcggcctcccaaagtgctaggattacaggcgtgagccaccgcacctggccgcagctgtgttctttaacctctctgagtaggcctctgtgtttggggacggtcccagctgcaggtctgtgctctccttgggcatctgcaggtgttctccagggaagagctggagctggtggccagcctttgccagcagcatgacgtggtgtgtatcactgatgaagtctaccagtggatggtctacgacgggcaccagcacatcagcattggtgagccaagccagcctggggcccctcccctgcacattggtgggagggccttgaccccacctgagagtcagcgcaggcctggtagttagaacccagggttatggagccctgcagatcctgtgacctttgcctcccagagtacacagtgtcacagtagcacctgcctccctggttgtcgaaaggatgaggtcaaagaaatcctatgccgagcatggtgggtcacacctgtaatcccagcactttgggaggctgaggctggcagatcacttgaggtcaggagtttgagaccagcctggccaacatggtgaaaccctgtctgtactaaaagtacaaaaattagctgggcatggtggcacgtgcctgtagtcccagctactcaggaagctgaggtaggaggatcactggaacctgggaggcggaggttgcagtgaggcaagatggcgccattgcattcctgcctgggcaacagagcgagactccatctcaaaaaaaaaaaaaacaaagaaagaaatggggggtggagggagggagggagagagagagagagagaaagaaggaaggaaggaaaggaaaggaagaaagaaagaaaaaaaattgtgcaaataacttagtatgtagaggaatccagggtgtcaaaagcctatgcgtgtcccctggggcccagaccaccatcctcccccgtccccctcaccccagtctcagcagctgttctgttcggccttgggcagccagcctccctggcatgtgggaacggaccctgaccatcggcagcgccggcaagaccttcagcgccactggctggaaggtgagttgctgagggtgggaggtcaccaccccctgcaagatccttggcaagtgaggtgggcctgagaatgaagaaggctttagccaggtctggaaggacctctccccctacctgcgcccctgctgcaggtgggctgggtcctgggtccagatcacatcatgaagcacctgcggaccgtgcaccagaactccgtcttccactgccccacgcagagccaggtgaagaggggcaggacgtcacgggggagtggggggacaacaaaagagcccaggctggcccccgcgtcagggaacagctgatctatctgtgtgtccatctgccctgcccaggctgcagtagccgagagctttgaacgggagcagctgctcttccgccaacccagcagctactttgtgcagttcccgcaggccatgcagcgctgccgtgaccacatgatacgtagcctacagtcagtgggcctgaagcccatcatccctcagggcagctacttcctcatcacagacatctcagacttcagtgagtgagacttgccggtctgggcagggcgcaggggctggaggctgcagggggctcagtgtggcctctgtctcccagagaggaagatgcctgacttgcctggagctgtggatgagccctatgacagacgcttcgtcaagtggatgatcaagaacaaggtgggctgggcctctgccaggcagccatgtatggtttcacaggttgtgtgctgctcaagggtgcccaggcaagaggctcctgggctagatcttagtccagcctctgccgtcaaccttggggcagggttgtatccacttcagagaatgaggaggctgtttctttttttctttcttttttttttttggttgagatggagtctcactcttgcccaggctggagtgcagtggcgcgatcttggctcactgcaagctctgccccccaggttcacgccattctcctgcctcagcctcccgagtagctgggaccacaggctacttttttttgcccggctaattttttttgtatttttggtagagacggggtttcaccatgttagccaggttggtcttgatctcctgaccttgtaatccacctgcctcggcctcccaaagtgctgggattacaggcgtgagccactgctcctggcctttttttttttttttttttttttgagacagagtctcactctgtcgcctaggtgggagtgcagtggcgcaatctcagcacactgcaacctccacctccagggttcaagcgattctcctcccttagcctcctgagtagttgggtaactgggattacaggcatgtacaaccacgcctggctaatttttgtatttttagtagagacggggtttcaccatgttggtcaggctagtctccaactcctgacctcagatgatccactccccttggcctcccaaagtgctgggattacaggcgtgagccaccgtgcctggcctgaggaacctgtttctaacttgcacagagatgctgtgtgggctggcaggatttcctgcctctttggatctccatcttcccatctgtacagtgaggagttggcccattaactcttgagttcatccaggtttgatctgtgactctaaggctttgttcttctctggctctgccctgacctgctccatgatcctccctctgtcagcctccctctgccctctatacccagggagggacttggaatgatgttctgggattcttttcttctgactttgtgtttgtttttgttttggatggattttctctctttcgcccaggctgcggtgaagtggcgcaatctggctcactgcaacctccacccccgggttcaagcaattctcctgcctcagcctcccaagtagctgggattacaggcatgcgccaccacacccggccaatttttgtatttttggtagagacggggtttagccatgttggccaggctggtcttgaactcctgacctcaggtgatccacccgtctcagcctcccaaagtgctgggattataggcgtgagccaccgcacctggccttgttcctctgactttgatgcagctctaggtgctggattggagctaactctccttccccgcctggtcgtgggaacctctctgtcccctccggagccaaggcctgctgggccacgaggccgtgttgagacatgtccttcctcctccccagggcttggtggccatccctgtctccatcttctatagtgtgccacatcagaagcactttgaccactatatccgcttctgttttgtgaaggtaaagggcagggctgggggaggaaagacctcacagagcttcccaaggccggctgggcacatggggagagtgtaggactaatctgtgctggcgcaggatgaagccacgctccaggccatggacgagaagctgcggaagtggaaggtggaactctagccctgaagtcacgccttggccctgacatccccacatgcccgcagagatcctctttgagtgtctgtctttgtccaggtttcagacatttctaggttggggaagatgctattgggaaacctcttctccgtgacacagaatgttctgggtgggagccgcccttcttcatcttagagaaccaagtgcctcctgtctgaaaggtgagggtggcctgacctgggcctctccctgcccctccataggtgggtttgtagggtcttgtgttgcttctggtctctccaggcttggctgagacggacggtagacttccaccatgtaccgatcacatcccagctctgcatggcccctgctaaggctcaggtataacctcaccttccctggctcatcttggccttggggagttgcctttaggcttgagtcctcaagcctctccttttcgtccataataaaatgtttaagttattaaga

SEQ ID NO: 15648 - DNA, 48636 bp, Homo sapiens
acttgggaacgaggggtgaagcggcccaggtgagggtgagtagctgtgtcggagcgccacttccccaaggtcaggtgccgaggctgggagggtcggctaacggttccgagcttggttgtgctagagtgcttaatgagtttgatgctactaagtataacggagtggctgcacagaatgattgagccgcccgcgggaatcaactgcgcgtgctgctcgctgattctcgctcggacactggggctggtcctgtctgcacccaaatccccctcccacgaccgcgccggtggagatgatacccgagacaacagaattctggacagatctggggttggaattgggtccccagactccaactctgcagctccataaatcccgctgggtcctcgcaaattccctggctgataacagtaccggcaaccaaattaaaaaataatccatacagtggaatactgtgcagccattaagacgaacaatgtttaatatgcactaatgtagggtgacttctaagataccttaggttaaaaaaggaaacaacagtaaaaacagcgttgggccggttgcggtggctcacgtctgtaatcccagcactttgggaggccgaggcgggcggatcacgaggtcaggagatcgagaccatcctggctaacttggtgaaacctcatctctactaaaaatacaaaaaaatcagccgggcgtggtggtgggcgcctgtagtcccagctactctggaggctgaggcaggagaatggcatgaactcgggaggtggagcttgcagtgagccgagatcgcgccgctgcactccagcctgggcgacagagcgagactccgtctaaaaaaagaaaaaacagcgttgatgggtgctatccatctttgcgtagaaggacgcctgagggtgggcgtatctgcgggtgtgcgcgccagctgtctgataagatgcacaagaagttgttaattgcggttgtctccgacagaattggggtcttgggtacctgggccagggcgagaaatttactaccatgtgcacagatagataattaaaaataagatgatgaagatagtcgtggctcccatccatcacgtgttaagccaatgcctagtttcacttctgttgggaggtcttatttttcccttttaatagaagagaaaagaaccttagagaggttaggaaacttagcaatatcatagccagggccgggcgcggtggttcacacctgtaatcccagcactttgggaggctgaggcgggcggatcacgaggtcagtagatcgagaccatcctggctaacacggtgaaaccccgtctctactaaaaatacaaaaaaattagccgggtgtggtggcgagcgcctgtggtcccagctactcgggaggctgaggcaggagaatggcatgaacctgggaggcagagcttgcagtgagctgagattgggccactgcacttcagcctgggcaacagagcaagactccgtctaaaaaaaaaaaaaaatcatagccaggaagtggagaagctggaatttgaaccctgggagatttacactaatgcccatgatctagcttatccctcgccactgagatgctttttctgttgtcagtcacgcaacacccgtcttggggcctggcacacaacaggcatccagtaactatttattgacatgatgtgtggtgtgaaaagcaaacgttgaaggtcagagcccaggcttaaagtccagggcttgggcacctctttccaacctgtggactgtgggcctgccaggtactccgtgggcctccatgtccccgcctgtaaaatgaacaaccagaaccacagttgtagacagtgaatgttcccacgtattatactttgtattttacacgcagataagtctcattttacagataagtgaggcacagagagattaagaaagttgccagaagggggttcctacaggtctccctccctccctaggaaggctgctgggctcccaggcctctcccttagcttcccaggatcatctgtgctaatgcctgggggacctactctgtgctgggtgagctgccagaggctgaggatctggtggagaacaggtcaagcacatagttcctgtccttggagttgagcgcccccgtgctgagtactttgagggcggaagcccaggtcttgggaccacctgggaggggacatgtggcttagcctgggtggagtcagaaggggcttctccaaggaagggactttcaatgtgactggaaactaggatgtccagaaggagaaatgatgaggctggagactcaaggagagatgggctcctaccctggacttggccttggtgtccactaagaaactgagggtgaccaacaggattggagaatatacaagttagacccattcagtctggcttcagcaggaatctttcctcccggagaatgcctccattaggtgccaaccaccagaacgccacactaacctctccaagctccaaagagtagggcgcctgattttataatccaggtgggggcgataaaggaatgcaggagccttcacagccatgaggcagtcactgtaactcctgccagaacagacctggggccacatcccactcctggatggcactgccagttccctgcataattcctttttttttttttgagacggagtctcactctgtcgcccaggctggagtgcagtggtgcaatctcggctcactgcaagctccacctcccgggttcactccattctcctgcctcagcctcccaagtagctgggactacaggcacccgccaccacgcctggctaattttttgtatttttagtagagacggggtttcaccgtgttagccaggatggtctctatctcctgaccttgtgatccgcccacctcggcctcccaaagtgctgggattacaggcgtgagccaccgcgcccggcctcccggcataatttttaaaatgctcatcctatgccctcattccccagcttgcagctgggggcctcctggtgcttttctgggacttcgagtaagtcatttcccctctctaagcctcagtttccccacctgtaaagctgatgccacctcctccaaggctcccgcgaggctatctgcctatctgttgtgtgttcctttaatgtatgggagtgagattgtggtttttgaatctgggtcctgtgccaggaggaataagtggtgagatacctactgtttgtgtcactcaggtcttccaccaacccctccagcctgtaaacctgccgtctggactccagaagtcatttctctctcctctgccaattcctaagcccagggggactgtgtctgagtgacgcaattgttagatctcctcagacaggctgttctctccaggaaaacattggctcaacaaattgtcaccaaacatttgtcttcagggaattctgttttttttctatcaaaaaaaatttggattcattatataataagagatttttcattttgcttggttactaattttatggaaagcctggtaggtttaaatgttaatagcttgttgactgggtgtggtggttcatgcctataatcccagtaatttggaaggctgaggtgggactatcgcttgagctcaggagttcgagaccaacctgggcaacgtggtaaaaccccatctctatcaaaaatacaaaaattagctgggtgtggtggcacgtgcctgtggtcccagctactctggaggctgaggtacaagaatcgcttgaaactgggaggcagaggttgcagtgagccgagattgtgccactgcactccagcctgggcgatagagcaagactgtctcaaaaaaaaaaaaaagttaatagcttgttgtcattgacaagtggctgtgagccaggacccacagtatattctctgtggattcttgtcaccttcattgtacagatgaggaagctgagcccccaagaggctgcggcctggcatgaccaaggtcccatagctagtttatggtggagctgggactatttgatccaagtccaaggtttggtcttctgtggttattcatgcactagactggtcttcctgggcatggtatccccagttctgtaccctttctctagaggtgccacgatgtgtgttgtctcagtaactgggagtctcctggcattttaagcccagggatgctaaacatccttcaaggctccagatagctctccccagtgaagaactgactcatctcaaattctaagtgtgcccctattgagaagctccaaaaccgaatgtcataattgacttgagtgatgtgacgtggggccaccctgggaaggcatggtcacctcgcctgcccttgtaagcagccatgcaaggtgaagttggacaagacatggctcctgtccccaaggggctggtggtctcctgtcagccctagcacccgcctgagaggagatttcacgggacagaatttggactttggaaataggcaaaccagggtttgaatcacagctggagctctctaggctgagtgagttttccttgttctccttttgagcaaaatagagtaaataataccatcctaatcagctgtgatgaggattagagaatttagcatggggttgggggagagggtcaggcacaggtaggtgctttctgagttcagcaaagggcctgggtggacacagaagcttcagagaggaggtacaggtggggctaggccctgctagggattttggattggagggtatgccaggcaggggaaacagcttgagtgaagatgggcaacatttattcaaaagcaaagggtggctgggcacagtggttcacacctgtaattccagcaatttgggaggtcaaggcaggcagatcaccagaggccagaagttcaagaccagcctggccaacatggtgaaaccccatctctacaaaaatacaaaaattagccgagcatgatggtgggtgcctgtaatcccagctactcgggaggctgaggtgggagaatcacttgaacccgggaggcagaggttgcagtgagccgagatcgtgccattacactccagcctgggtgaaagagtgagactccatctcaaaaaaataaaaataaaaataaattagctgggcgtggtggcgtgcacctgtaatcccggctacttgggaggctgaggcaggagaatcacttgaacccggcaggtgggggttgcagtgagccaagattgtgccactgcactccagcctgggtgacagagtgaagagagaggctctatctcaagaaaaaaaaaaaaaaaaggccgggtgccgtggctcatgcctgtaatctcagcactttgggaggccgaggcaggcggatcacgaggtcaggagattgagaccatcctggctaacatggtgaaaccctgtctctactaaaaatacaaaaaaaattagcagggcgtggtggcgggcgcctgtagtcccagctactcgggaggctgaggcaggagagtggcgtgaacccgggaggtggagcttccagttagctgagatcacgccactgcactccagcctgggcgacagagccagactctgtctcaaaaacagaaaaaaaaaaaaaaaaaagaacaaaggatgactgggtgtggtgtctcatgcctataatccaagctgtaatcccaggactttaggaggccaagaccagaggatcacttgagcccaggagttcaagaccagcctgggtaacatagggagaccctgtctctatttttttttttttttaaaagcaaagaatttgagctgggggttggggcatgcacttatagtcccagatactcaggcggctgaggcaggaggatcacttgagctcaggagttcaaggctcctaggtgacaaagcgagaccctatctctaaaataaaaaaagagtaaagggagggaaggtggaggctgccaagcctggattccagccggctccaaacgccaggctgaggaggctttggactttgtccagtgtcaccacaggcttctgggcagagctggtccaatgggggttgggggacagtggcatagctgacatcagcccctgggttattgacatcagcccctggaatgcatcagtgatgcattccacgggcccaggggtcatccactgccttcgggtcaagcaaatggccagtagctgcccaggctgatagaggtgtgtgttggaggggggcacaggccactggccctcggcccctggcctggcagcagggaggcctcagatcttagatgcctgagagctaccccagaagggtcctcggcacagctatggtccccatgcctagtggtgctgggcctcctcggtgctgccagatcacctgagctgcctccattgcagcagttatcccacacatttttttttttttttgaagcggagtcttgctctgtcacctggacagctgtcaggctggagtgcagtggctcaatcttggctcacttcaacctctgcctctcaggttcaagtgattctcctgcctcagcctcccgagtagctgggactacaggtgcccaccaccacacccggctaatttttgtatttttgtagagacgcggtttcaccatgttggccaggctggtctcgaactcctgacctcaagtgatctgtctgcctcggcctcccaaagtgctgggattacaggcgtgagccaccacgccagtgagccaaggtcacacagctgcactccggcctgggcgacacagcaggactccatctcaaaaacaaaaaccaaaaaaaaaaaaaaaacaaaaaaaaacaaattgaacataaatggaataatggaagaaatagctagctgtggggatggcaactctgcagctgttcacagtttgggaaacctgagatctgcatccagagaaacttcttgaaggcaaacttatcaacataaatgaggaaagtggttctaaagaaaaagataatgacccagaggaaataataccagcaaaacttcacattaaaggaactccctgggctgagcgcagtggctcacgcctgtaatcccagcactttgggaggccgaggtgggcagatcacttgaggtcaggagttcgagaccagcctggccaacatggtgaaaccccatccctactaaaaatacaaaaataagtcgggcatggtggtgcgtgcctgtaatcccagctactcaggaggctgaggcaggagaatcgtttgaacctgggaggcagagattggagtgagccgagatcacgccactgcactccagcctgagtgacagagcgagactccgtctcaaaaaaaaaaaaaaaaaaaaggcaggattatctcaccacaaaatgtacagaacaggaactcccagagatatttcacaacattgaaaacaaaggatgactaaggatgactcgtattcatcaagacatagaagatgtcaggtgcagtggcttacacctgtaatcccagcactttgggaggctaaggcaggatgattgcttgatgccaggagttcaacatcagcctaagcaacatagtaaaacccccatctttacaaaaaaaaaaaaatagctgagcatggtggttcgtgcttattgtctcagcaactcaggagaatgaggtgggaggatttcctgagcccggtaggttgaggctgcagtgagccgagatcacaccactgcactccagccttggcaacaaacatagaagaaatgctcattctgtatcctaaattaaaccactggaagactgcagcactgttcagttcagaatattctttttttttttttggaatgaagtttcatttttgttgcccaggctggagcgcagtggcgtgatctcggctcactgcaacctctgcctcctgggttcaagcgattctcccgtctcagcctcctgagtagctgggatcacaggcgcccgccaccacgcctggctaatttttgtgtatttaatagagacggggtttcaccatgttgaccaggctggtcttgaacttctgacctcaggtgatccacccgcctcggcttcccaaagtgctggggttacaggtgtgaaccaccacgcccggcctcagaatattctttttttttttttttttgagacggagatttgctctgtcacccgggctggagtgcagtggtgcaatctctgctcactgcaacctctgcctcccaggttgaagcgattctcctgcctcagccttccgtgtagctgggattacaggtgtgcatcaccatgcccggctaattttttgtatttgtatttaattttttttttctttttgagatggagtctcgctctgtggagtgcagtgccgctcactgcaacctctatctctcgggttcaagcgattctcctgcctcagcctcccaagtagctgggatgggattacaggcacctgccactacacccagctaattttttttgtaattttagtagagacgggatttcaccatgttggccagcctggtctcaaactcctgacctcaaatgatctgcctgcctaccggcctcccaaagtgctgggattacaggagtgagccatcgcgcctggcccaagctatttgcaataaaattttttccttgataaacttttataacgaaagaaaacgtcttaattttcagtgttgctaatattaaattacagtgtactaagttcttattagttttttttttttttcattttctatacttttttatttttaaatgacagagtctcactttgttgcccaggctagtctccaattcccgggctccagtcatcctcttgccttggcctcccaaagtcctgggactacaggcatgagccaccacacctgggctacatttttaacagatggtaagagagttttaaaaggtcacagaacaattgtcttattaattattattatccaataataattttctcgattattaagttctctttgcacaatttaagtttacatggtcttttttttttttttttttttaaatggagtctcactctgtcacccaggctggagtgcagtagtgcgatcctggctcactagaatctttgcctcccgggttcaagcaattctcctgcctcagcctccgaagtagctgcgattacaggcacatgccaccatgcccggctaattttttttgtattttcagtagggacggggtttcatcatgttgaccaggctggtttcaaactcctgacctcaagtgatctgcctgcctcggcctcccaaagttctaggattacaggcctgagccaccacgtctggccaacatggtctttttttttcttttgagacggagtctcgctctgtcacccaggctagagtgcaaacggtgcgatcttggctcactgcaacctccgcctcccgagttcaagctggtctcctgtctcagcctcccgagtagccgggattacaggtgagtgccaccattcctagctactttttgtattttattagagacgggctttcaccatgttagccaggctggtctcgaactcctgacctcaggtgatccgcccacctcggcctcccaaagtgctgggattacaggcatgagccactgcgcctggcctcaacatggtctttttctgttttgctttgttttgttttttttgagtcggagtctcgctctgtcacccaggctggagtgcagtggcacaatcttggctcactgcagtctccacctcccaggttcatgccattctcctgcctcagcctcccgagtagctgggactacaggtgcacgccaccacgcctggctaattttttgtatttttagtagagacagggtttcaccgtgttagccaggatggtctcaatctcctgacctcgtgatccacccacctcagcctcccaaagtgctgggattacaggtgtgagccaccatgcccagccaattcaacatggtcttttttttttttttttttttgagacagagtttcgctcttgttgcccaggctgccgtgcagtggcacgatctcagctcactgcaacctccgcctcccagttcaagtgattctcctgccccagcctccggagtagctgggactacaggcgtgtgccactatgcccagctaatttttgtattttttttagtagagacaggctttcaccatgttggccaggatggtcttgatctcttgacctcatgatccacccgcctcagcctcccaaagtgctgggattacaggcatgagccaccacgcccagccaacatggtcatttttataatgccacactactgtggaaagtaaagactacctgaatatgtatgtgtatgtgtatatgtatatatatgtatgcatcctcacatatgtatctccacaattgattttgtttattttttgagacaggatctcactctgtcacccaggctggaatgcagtgctgtgattatggctcactgctgcctcgactgcctgggctcaagcaatactcccagctgagcctcctgagtagctgggaccacaggcatgcaccaccacacccagctaatttttaaaaaattatttgtagagacaaggtcttgttatgttgcccaggctggtctggaaatcctgagctccagtcctcctgcctcggcctctcaaagtgctgatattacaggtgtgagccacctttccaggtgtgagccaccacatccagctttctctacaattaaaaaaaatgcaaatagagttatattgttcttcaacctgccctttttgtttgtttttgtttgttttgttttgttttgttttaagacaaggtctcactctgtctcccaagctggagtacagtggcacaatcttggctcactgcagcctcaaccttctgggctcaagcaatcctcccacttcagcttcccgagtagctgggactacagacacgtaccaccgtggccagctaattttttgcattttttgtagagatgggatttcaccatgttgcccaggctgatctcgaactcctgagctcaagcaatctacccgcctttgcctcctgaagtgctgagattacaggtgtgagtcaccgcggccagcctgtctctacaatttaaaaaatgtaaatgggttatattgttcttcaacccttttaaaaaattaccatacttttttttttttttttgtaattgaggtgaaattcacctaacatacaagtaactattttaaggtatacaattcagtggcatttagtgcattcacaatgttgtacaaacattatgtcactgtagtttcaaaactttatcgttcccttaggaaaacactccgtacccatcaaatagtcactccccattacctcctccctgtcctctggttaccactcatctgctttctgtctctatagacttgttattctgaatatttcacagaaaaggaatcatagctatgtgaccttttttgtccggcttctttcacttagtgtgttttgtttgtttgtttgtgacagggtcttgctctgttgtccagactggagtgcagtgtcatgacctcagctcactgcaatctccacttcccaggctcaagcgatcctcccacctcagccatcttattatctgggactacaggcacacaccaccatgcctggctgatttttgtattttttgtagaaacaaggttttgccgtgtttcccaggctggtgtcaaacaatgatcctcccacgtcagccttccaaagtgcagagattatagtcatcagccatgtcgccctggcctcacttaatatatttttgaggttcatctaagttacagcatgtgtcagcacatatttcattccattttgtggctgaataatattccatggtacagatatgttacaatttatccattcatccattgatggacaatttgggtttttttcacctgttggctatgatgaatactgttgatataaacatttgtgtacatgtttctgtgtggacatatgttttcagttcttttgggtatatacctaggagtgaaattgctaggttgtaaggtacttctatatttggacttcataaaaattaaaaagttttgtgtaccaaagaacattatctgccgggcccgggtaattgcagcactttgggaggctgaggcggggggatcacctgaggtcaggatttcaagaccagcctggccaacatggcgaaaccctgtctccactaaaaatacaaaaattagctgggcgtagtggcgaacacctgtagtcccagctactcgggaggctgaggcaggagaatcgcttgaacccaggaggcagaggttgcagtgagctaagatcacgcctctgcactctagcctgggcaacagagtgagactctgtctcaaaaaaaaaaaaaaagtacattatcaagaatgtgatcaggctgggcacaatggctcacacctgtaatccaagcactttggaaggccgaaacgggaggattgctagaggccaggagttaaagcccagcctgggcaacgtggtgagaccccatctctgcaataaaaattttcgaagttgttggtttattttgagttaatttttgtagatggaacgaggtgaaactcctgcttcattcttttatatgtaaatatccagttgtcccagcaccctttgttgaagagactattctttcctctattaaatgggcttggtgccgggtacggtggctcacgccagtaatcccagcactttgggaggccgaggcgggcagatcatgaggtcaggagatcaagaccaccctggctaacacggtgaaaccccgtctctactaaaaatacaaaaaattagccgggcgtggtggctcgcgcctgtagtcccagctatgcaggaggctgaggcaggagaatggtgtgaacccgggaggcagagcttgcagtgagccgagattgtgccattgcactccagcctaggcaacagagcgagactccatctcaaaaaaaaacaggcttggtgcccttgtcaaaaatcaataaggccaggcgcagtggctcccacctgtaatcccagcactttgggaggccaaggcctttgtattgcgtgagtccagaaatttgagaccagcctgggcaacatagtgagacccccgtctctacaaaaaattaaaaaattggccaggcacagtggctcacacctgtaatcctaacactttgggaggccaaggtgggcagatcatgaggtcaggagatcgagaccatcctggccaacatggtgaaaccccgtctctactaaaaatacaaaacttagctgggcatggtggtgtgcgcctatagtcccagctactcaggaggctgaggcaggagaatcgcttgaatcccagaggcagaggttgtagtgagccaagatcgtgccacagcactctagcctggcaacagagcaagactccatctcaaaaaaaaaaaaaaaaaaaaattagccaggcatggtggcatgtgcctgtagtcccagctactcaggaaattgaggcaggaagattgcttgactctatgagaacaaggctgtagtgagccgtgatcgcaccactgcactccatcctgggtgacagagcgagaccctgtctcaaaaaaaaggaaaaaaagaaaaaaatgtccagctacttgggagactgaggtgagagaatcacctgagctcaggatgtcgaggctacagtgaaccgtgattgcacacaccactgttctccagcctgggctacagaatgagaccctgtctcaccaaagaaaaaaaggaaaaaaaaatcagtgggccaggctgggcatgatggctcacgcctgtaatcacagcactttgggaggccgaggtgggtggatcacctatagttccagctactcaggaggctgaggcacaagaatcggcagaggctgcagtgaatcaagatcgtgccattgcactgcagcctgggcaacagagtgagactctgactcaaaaaaaaaaaaattagtgggccatagatgtttgggtttattactgggctctcaattttattccatgggtctatgtctgtctttatggtaataccacactattctaattataagctttgcagggccaagcgcagtggctcacgcctgtaatcccagtactttgggaggccaaggcgggtggctcacgaggtcaggagatcgagaccatcctggctaacatggtgaaaccccgtctctactaaaaatacaaaaaaattagctgggcgtggtggtgggcacctgtagtcccagctactcaggaggctgaggcaggagaatggcgtgaacccgggaggcagagcttgcagtgagccaagatcgcgccactgcactccagcctgggcgacagagcgagactccgtctcaaacaaacaaacaaaaaaacctttgcaataagttttgaaatcaacctgcatttttcacataacctgaatatctttccacgtcagactgctaaaagcaatcttattccttttagtggttgcacaatggttcattctatggttaaaccacgcagtgatacagtgatattgtgatacagcgatactgaactagccccaggttgatggatatcagattgcctccagtttttttctctcatgctgagtgctgcgttaatcatccaagtgtatatttttgtatatacgtgtgaatattcctgtaagatcagcttttagggctgggtgcactggctcacacctgtaatcccagcactttgagaggtcaaggtaggagaactgcttgagcccagcagtacaagaccagcctgggcaatgtagtcagaccttgtctctactaaaaataaaaagttagcccagcatggtggcgtgcacatgtggtcccagctacttgggaagctgaggtgggaggatggcttgagccccagaggtgtaagctgcaatgagccataattgtgccactgcactccagactgagtgacagagcaagaccctgtctcaaaacaaacaaacaaaaaacttttaggagaggaagtgttgagtcaaagagtggtatgtgttattattaaattgccctccaaaacttacaccagtgaacactcttaacctagtgcttgcttttcaaatcacaaattctcaccttttagtacattgtaggatcagtttggtgggtctcaagtttgtcttggcccatctgagaggcaaaaaatagtacttcgctttcatttacgtatcactaattatgactaattttcagcatcctttcaaggttattgacttttttttttttttgagacagagtctcgctctgtcacccagactggagtgcagtggcacgatctcagttcaccacaacctccgcctcctgggctcaagcgattctcctgcctcagcctcccaagcagctgggattacaggcgcacatcacggctaatattttttatatttttagtagagacagggtttcaccatgttggccaggctggttttgaacacctggcctcaagtgatctgcccgccttagcctcctaaagtgctgggattacaggcatgagccactgcgcccggcgactattttcttttcttttcttttctttttgagacagagtctcgctctgttgcccaggctggagtgcaatggcacgatctcagctcactgcaacctccacttcccaggttcaagtgattatctcacctcagcttcccgagtagctgggattacaggtgcctgccaccacacccggctaatttttgtattttagtagagacagggtttcaccatgttggccaggctggtctcaaactcctgacctcaggtgatccgcctgcctcagcctcccaaagtgctgggattacaggcgtgagccaccacacccagcgactatttgcttttgtgaatttcccatttatatctttttcacactttttcttattgagatgctggtcttttgttgtcgatttatacaaatatttgcatattaaggctcatattatattaaaatggcccagttacttgtttgtctccttgattagattgtgcgctccttggaggaaaggaaggtatcctatcacccttgtatacatggtggctagcttagggaatgaatagcacataataggaattcactgaggagatgtacacttaccatatggcaggctctgtgcaagatgttgagaataaaaagatgaacagaagagaatctttgttctaacaaagcttacagtctggtgcaagcgatagacattcattctcattctgcaggtttattgagcagctgctctgtgccaggtgcataacgcccattggaagagccagcctattaggatgagaaaaatgtcaggactgggacttcgctaacctggtcctgggaaatctgggtgggtcagttccccatccctggttatcagtatccccatcaataaaatgtgagccactggaccaaattctctcatttcccattgagcatccatgcatctgtgctgctttggcttttggaaagtaggagtcagagtcctgagttcaaatattggctctgtgctgggtgtggtggctcacgcctgtaatcacagcactttgggaagccgaggtgggtggatcacctgacgtcaggagtttgagaccagcctggacaacgtagtgaaaccccacctctactaaaaatacaaaattagcctggtgtggtggtgcatgcctgtaatcccagctacttgggaggctgaggcacgagaatcgcttgaacccgggaggcagaggttgcagtgagccaagatcgcaccattgcactccagcctgggcaacaagagcgaaactctgtctcaaaaaaaaaaaaaaaaaaaatatatatatatatatatatatatatatatatatatatatatatatatatatgtaggctctgctacttgttagctgtggccttgggtgtgtgacttagcctttttttttttttttggtgtgggagggatgtggggagggacatggtcttgctttgtcactcaggctgcagtgcagtagtgcaattatggctcacttcagccccaacctccaggctcaagtgatcctcccacctcagcctcccgagtagctgggactacagacgtgcaccaccactcccagataatttattattttttgtagagattgagtctcactacgttgcccaggctggtctcgaactcctgggctcaagggatcctcctgccttggcctctcttgcaggcataagccactgtacctgaccacttagcctcttgaaggaatctttcttataggattaaaagtgatgggaagccaggagcagtgactcacacctctaatcccagcactttgggaggcctaggcaggcggatcacttgaggtcaggagttctagaccagcctggtcaacatggtgaaaccctgtctctactaaaaatacaaagattagctggacatggtggtgcacaactgtagtcccagctactcgggaggctgaggcacaagaatcacttgaacatgggaggcggaggttgcagagagctgagatcgcgctgctgcacttcagcctgggcgacagagcacgactttgtcccccaaaaaataagtaaataaataataaaagtgatgggacctgatttcaagtagtcaaaatcgcagagacagcaaatgggctgggctatgggccagagggtaaagggatgtaattgtttaatgggtacagagttgtcagttttacaagatgaaaacagttcccaaaactgtatacctgtacatagttaagatggtaaagtttatgatatgtgtattttaccaaaattttttaaatgaaaaactttttttttttttttttttttgagacagagtctcgctctgtcgcccaggctggagtgcaatggcgcaatctcggctcactacaatcttcgcctcccgggttcacaacattctcctgcctcagccttccaagcagctgggactataggcacccgccaccatgcctggctaatttttttttcgtatttttagtagagacggggtttcactgtgttagccaggacagtctcgatctcctgacattgtgatccacctgcctcggcctcccaaagtgctgggattacaggtgtgagccaccgcgcccggcctgaaaaacatttttaagtggtgggacgtgtagggctccacggggcacctagcacaggaaagcgtgtggtaaataaaaggtgactgccagggctgttgaggagctgactagggaaggcctgcttcctagaaaaggggtgaggcgcagggcattggagggaggtgtgcctgggaggtcaggagtcctgccttatgcgggaacctggagcagcaccctccctgctttgggcctcctctgtgaagtgaggcgtagtcccctcctggggccagcaggttgctctgtgacctgggccagcaacctcaaagccacgaggggcctggctccttgcgccccctgctggccgactcgggaataacacacccacaagcccccaagttgctcccaaccaacctggccaagttgctgggttaaggcagcctacgtgccccctgtacccttctgctcttggctgagaaccccttatggcttctccctccctccctccctcctaagttcctggaacctaccttcaccacacccataagctcacagacacagacacagagatgtgtgcacatgctcaggtgcaagctcttgtatttggatccttttgttgttttggtttttttttttgtagagaaagggtgttgttatgttgcccaggctagtcttgaacttctgagctcaagcgatctgcccacctcagcctcccaaaatgctgggattacaggtgtgagccaccatgcccagcctccatgaattattattatttatttcatgcatagaaaattgatgttcagagaggtaaaatggcttgcctcatgtcacactgccaaggtcatcaaagcctgtgttctaatccttcccccgtctctcagcactgccctcctccttgtgtgtctacttggggcctgatcctgggtgtggtaatagaacagacctaccctgtggagggtgcaacataacattcacttctggccgggcatggtggctcatgcctgtaatctcagcactttgggaggccgaggcgggcggatcatgaggtcaggagttcaagaccatcctggccaacatggtgaaaccccatctctactaaagacacacaaaaaaattagccgggcatggtagcgcgcgtctgtaatcccagccactcgggaggctgaggcatgagaatcacttgaacctgggaggcggaggttgcagggagccgagatcatgccattgcactccatcctgggtgataaaaagatagggcgagactctgtgtcaaaaaacaaacaaaccaacattgactcctatgcccagtcttacccggccacacataggcccgatgcactgccagtcccctgcaatggaagccgatcctggtttccagccccacccccaaggctgcaagattgtttaagcatatccgtgtgcagcacaggtgccacccagcttcttgacccccatggagccagtgatctggacacacagaaggcaccgcctttcctgagaactggcagtgcccagagaaggcaaggggccaaggctggggcagggcagagaagagggccacagctgggatctgtttctcctgagtttctgccctgtgctggcaccaggtgtacaatctgctataaggcctgcaggagctcaatgtaagtgttgttattttagtatgttaggaatttcctcacctgttaatgagggtgaggatagcacttgctttacagagttgttgaaaggatccagtgacaaaagtattgggacagagtgagtcctagtaaattaaagctggttgtattattaatattattcttggccaagtacagtggctcacatttgtaatcccagcactgggacgctgcggcaggaggatgccttgagcccaggagtttgagacaagcctgggcaacacagtgagaccacatctctacaaaaaatacaaaaattagctcaattcacttgagatgatgaagacatgacttagaatgttgtcacttcaggaaaaaaagactgatttgatggacacagagtccgatgtgggggagagtgtcagagagagaattgacctaccaggcaactgtgggtttttaactcagtggtcagaaagcagtagagtgggtcccggtagggtgaaatccagctcctcctgtagtcctagaagaagtagcaagatgttgggtctaggacaggaaatggctaacctaaagagaccctttggcccaggatggttcccatcccaagacacccctcagtcctgggccagcagatagttggtcttcatagaacaggcagagggcacagagtgcctcccatgaccagccctgggcttgggcctgcccttgggccgctcatccgtttagctgagttacctgagctaaagcaccagactccctcccttgaggtgacaccaaggaatgtccctcctgggatggcagtaacactaccctttgttgctcaaggcacaggtacttagtttcaggggtcagagtacatacttcaggcctctcctgggaaccgctctcaaatctaaggaacgagagggtgagctctggcatcgccttgtgtgttagcccattctcccactgctataaagaactgcgcaagactgggtcatttataaaggaaagagatttaattgactcacagttcctcatggctggggaggcctcaggaaacttaaaatcatggcagaaggggaagcaaacacgttcttcacatggcggcaggagagagaactgctgagcaaagggggaaaagctctttataaaaccatcagctctcatgagaactcactcattatcgccagcacagcagcatgggggtaactgcccccatgattcaattacctcccactgggtccctcccaggacacgtgggaattatgagaactgcaattcaagatgagatttgggtggggacacagctcaaccccatcaccttggatttgattcctaaggctgttgtaacaaactagccacacttcattgtattgcgtttggcagatatcacggtctttgcaaattgaagctttgtgagaaccttgcaccaagcaagtctattgttcccattgttccaacagaatgtgttcccttagggtctgtgtgtaattcccacaatagttcaaactttatcattattattatgtctgacacggtgatctgtgatcagtgatctttgatattactattgtgcttgttttggggaaccacaaaccatgcccatataagatggtaaacttaataaatgcgtgtgggccggaggcagtggctcacaactgtaatcccagcactttgggaggccgaggtgggcagatcacctaaggtcaggagttcgagaccagtctgaccaacatagtgaaaccccatctctactaaaaatacaaaaattagccaggcatggtggaatgcgactgtaatcccagttacttaggctgaggcaggagaatcgcttgaacccaggaggcggagcttgcagtgagccgagattgcgcaactgcactccaccctgggcgacaaagcaagactccgtttcaaaaaaaaaaaaaaaaggctgaacaaactgaaaaaccagcggctctttttcagttcatcagaaaattaggtcacagggtaacctgctgcccccaaactggagaggcagaaaggtagatacagagaatcatgatttgccagagcagaaaccttccctggaatcagcacctgggtgggaaaacctgaactgcaactgacgaatgtctggcagcgtggatgtgtgctgctggttaatgttaggtggcagctggactggagtaaggaatacctagagaatggtgaaacatgacttctgggtgtgtctgtgagggtgtttccagaggagattggcgtgggagtcagtggactgagtggggaagatccgctctcaatgtgggtggcagtatgcaattggttcacggcttgaataaaaacaaaagaggagaaaattttcctctttctgtctctgtctctcctggagctggaagattctccttctcctgccctttggatatcaaaactctaggctcttcagccttggactgagaattatcccagtggcgtccctggttctgaggcttgcagacttggactgagccacgctactggcacctcttgcaaatagtctctcaggggacttctcagcctccattaattgcgtgagtcaatttccctataaatcccctctcatgcactttgggaggccgaggcgggtgggtcacgaggtcaggagatcgagatcatcctggctaacacggtgaaaccctgtctctactaaaaatacaaaaaattagctgggtgtgatggcgggcacctgtagtcccagctacttaggaggctgaggcaggagaatggtgtgaacctgggaggcagagcttgcagtgagccgagatcgcgccactgcgctccagcctgggcaacagagcgagattctgtctcaaaaaaaaaaaaaaatggctgggcaaggtggctcaccagcacgatctcggctcactgcaacctccacctcctgggttcaagcaattctcctgtctcagcctcctgagtagctgggagattacaggcatgcgccaccacacccagctaatttttgtatttttagtagagatggggtttcaccatgttgaccaggctggtctcaaactcctgacctcaggtgatccacccacctcagcctcccaaagtgctgggattacaggcaggagccactgcacccagctgagagtaacttttttttttgttgttgagacggagtctccctctgttgcccaggctggagtgcagtggcgcgatctcagctcactgcaggttcagcctcctgggttcacgacattctcctgcctcagcctcccgagtagctgggactacaggtgcccaccaccacacctggctaatttctgtatttttagtagagacagggtttcgccgtgttagccaggatggtctcgatctcctgacctcgtgatccgcctgccttggcctcccaaaatgctgggattacaggcgtgagtcaccgtgcctggccaagggtaactatttttaagtatgccagagcattcctccaaaatactctttttctttcttttcttttctttgctttttttttttttttgagatggagtcttgttctgtcacccaggctggagtgcaacgcacaatctcagctcactttagcctccaagcaattcccttgcctcagcctcccgagtagctgggattacaggtatgagccaccatgtccagctaatttttgtgttgttagtacagacaggatttcaccgtgttggccagtctggtctcaaactcctgacctcaagtgatctgcccacctcagcctcccgaagtgctggaattataagcgtgagccaccgggcctggcctaaaacattctttttctttttttgttttttgagatggaatttcacttttgttgcccaggctggagtgcaatggtgcagtggctcactgcaacctccgactctcggattcaagtgattctccagtctcagccttccaagtagctgggattacaggtgcatgccatcacgcctggctaatttttgtagttttagtagagatggggtttcatcatattggtcaggctggtctcagactcctgaccttaggtgatctgcccgccttggcctcccaaagtgctgtgattacaggtatgagccaccatgcccgggcttttttttttttttttttttatacatggtctcactctgttgcccaggctggagtgcagtggagcaattttggctcattgcaacctctgcctcctgagctcaagcgattctcgtacctcagcctcctaagtagctgggactacaggtgcatgtgacttcgcccagctaatttttgtatttttggtagagatggggttttgtcgtgttggccaggctggtctcaaactcctgacctcaggtgacccacccacctcagcctcccaaagtgctgggattacagacgtgagccaccgtgcccagccttggctgtttgtgtatcttttttggaaacattcagatttatgatttgcagatatttccttccattccatgggctgtcttttcattttcttaatgggtatccttgaagcacaaaagttcttaattttgatgaggtccagtttattttttcttttgttgtgtatgctttggatgttatgtctagaaccccaaggtcacagagatttattcctatgttttcttctagttttcttgttttagttcatacatttagttttgttttttgtttgtttgtttgttttgagacggagtctcgctgtgtcgcccaggctggagtgcagtggcgtgatctctgctcactgcaagctccgcctcccgggttcacgccattctcctgcctcagcctccagagcagctgggactgcaggtgcccaccaccacgcccagctaattttttgtatttttagtagagacggggtttcactgtgttagccaggatggtcttgatctcctgaccttatgatccgcctgccctggcctcccaaagtgctgggattacaggcgtgagacaccgtccccagcccatacatttagttatgtgattcactttgaattaatttttgtgtatggggcagggcacatggctcacgcatgtaatttcagcactttgggaagctgagtgaagcggtggcctgtccctccacacctgtgggtatctcatcaggtgggacgagagactgagaaaagaagtaagacacagagatgaagtatagagacaacagtgggcccaggagactggcaagcagcatatcaaggacctgcaccagcatcggtttctgagtttcctcactttttattgattattatttttattatctcagcaagaggaatgcagtaggagagcagggtgataataaggagaaggtcagcaaaaaaacatgtgagcaaaagaatctatgtcataattaagttcaaggggaggtactatgcctgcatgtgcacgtaggccggatttatgtttctccccgcccaaacatctcagtggagtaaagaataacaaggcagcattgctgccaacatgtctcgcctcccgccatagggcggtttttctcctatctcagaattgaacaaatgtataatcaggttttataccgagacattcagttcccaggggcaggcaggagacagtggccttcctctatttcaacttcaagaggctttcctcttttactaatctacctcagcacagaccctttacgggtgttgggctgggggacagtcaggtctttctcatcccacaaggccatatttcagattatcacatggggagaaaccttggacaatacgtggctttccaaggcagaggtccgtgcggctttccgcagtgcgttgtgcccctggtttattgagattagagaatggcgatgacttttaccaagcatactgcttgtaaacattttgttaacaaggcatatcctgcacagccctagatcccttaaaccttgattccagacaacacatgtttttgtgagctcaaagttggggcaaagtggctggggcaaagttacaaattaacaacatctcagcaaagcaattgttcaaggtacaggtcaaaatggaatttcttatgtcttccctttctacatagacacagtaacagtctgatctctctttctttgccgtacatatcccccttttctttttgacaaaaccgccatagtcattatggcctgttttcgctggttgctgtctctctggagctgctggatacacctgtagaccagcaacagagaacagacatacaaggattaatacaaaatttgcaatagtggaacttccagtggttttaacccaagtgatggggttaagatttgtgaggccatcagcagctttcaccattgcctcagtttctggcaccagattgaactgggcttttgatgcctcaaaaatttgttattttaattttaaaatatctaaagtaaggttatcttctcttccttgtagatggcgtctaaccatgtcccagtgatgttcagattcattataggctcgaggtgtaatacaaaaatctgacatattccagtcacactgtaactgaaaaagatattctaagctcatgagcctatctctcattcaaatgacagtttgtctacgatcattaatttggtttgccaatttttggtctatttgagtctgagaattccacaattttgaggagttcttttgccaattatttatatattttgtagtttgaacagaggagtgtaaagcaattccagcagccgcagcagtagctgtgactgcaataagacccataatcactgcaattaaagtaaaaaatgaatcttttggatctagttagaactccttttaatacttctgttaaaatatggatggatggggaagcctcccacggtcggtccatggacacagggatccacacaccctctcttgccctcactggcagaatatggtgctgccaatcaaaagttgaatcaatgcaagtaaacaatctacaattttcacaggttatagtttgggaatctggtttaataactatgtttcctacaactagcatataagagggttttacacaactttgcaaaggaattgtcggattggaatttaggttaatagtataatgtggcttatgatttcttgttccgataacttgatttccagaccaaattctaatgtggtgcgaggccacagtaagctttcataatgctggatgttcaggagcagtaacaggactaactaactttggttgaggtgatgaaatccccttttcaccccatttccatggatagggtgattctagccttctataaacctggtctagcctttcagttaaatcactatcataggccggattagtgggccagacagatggggtctgtgaacatgagtgagtctggcccatacaaccataatataattggttttgaggggcccagtctataatagttccaaatttattgttttgtaataccaccacagtatcagccacatatttttcccaaactaagacttctgggtcttttgattctttgggaatttccttgaggcaaggtccccttaggcctaaattttaatgatctttgataagaagagtcctgtaaattattcatttgtgacccaagtgacattccacttaccatatgataagtaaatttattggtggcactgacagtagatacttctaccaaccaattttgggttgtaggcattaagcatcctggtgctttccccaggcaaataggaggataatgatacccagtggaaatgtttatcatcattccttcttcttcaggttgggcagggccgcggtcatctgtgggtcctggtacccatgcactaatattaacacatacttcaatagaatattatccatccaagtgactgcctgaattaagggcgggaaaggcacataggcccagtaagtataattagctgcagctgctcctgcagacatagtgagacttaccaccattgatacaatcattaaagctgcaagcagcatattctctggagtttgtgttacccttgtgtactttaggcttttttcagctaactgtgtcagcttctttagctgggcccaggtcggcggcttcgcttttttggtggatggcaactttttctgtaagttgtaggtacccaaactggaagctgattttctcctggtgaaacacgagcaaaacctctcccccacgttatcaccttctctattttttatgttttatttttgttgtctttttaccaaatcagtttttcctcatgtgggctgttctttttaccagtaaaatgttgttctgcagaagtagcggtctgatttctataaatgttaaaaaaatttaaagtatagagtgctagattaagttgcatctggggagtgttatattccttactgtccttttcctttttttgtttaaccaattgagctttgagtgttctattacttctttcaattatggcctgtccttgggaattataagggatttctgttgtgtgtgtaattttccactgatttaagaatttttgaaatgctttactacagtatcctggcccattatctgttttaattttttatggaactcccatgacagcaaaacaagataataaatgtcttttaacatgggaagtattttctcctgtctggcaggttgcccatatgaaatgtgaataagtatcaactgtcacatggacaaatgacaattttccaaatgaaggtacatgtgtgacatccatttgccataatgcattgggacataaacctctgggattaactcctgcctcctgagtgggcacatgtaggacttgacactgagtacaatgttgtacaacattttttgcctgttttcatatgatatcaaatttattttttagtcctgatgcatttacatgagtcaaggcacgaagtttttatgcttttatgaatgcagatgatactagcaagtcagcttgttcatttgccttagttaaaggccctggtaaattagtatgtgttcgaatatgagtaatataaaatgggaaatttctttttcttacagtttgttgtaacgaattaaacagctgatttaactgatcatccatactatatttgattagggctgtctcaacatcctttgtagcctgtactacatatgcagaatctgaaacaatgttaataggctgattaaaaccttgtaacactgaaatgacagcaaccaactctgctctttgagctgagtgatattgagtttcaatgacttgttcttttggcccagtttaagccacttttccattgctggaacaatcagtaaacgccatcagagcattttctaaaggtttatatctggtaattttaggtaaaatccaagtaatcaattttaagaactggaagatttttgtttttgggtaatgattgtcaataattcccacaaaatcagcaagaccaatctggcatgcagcagaattgataaaagcttgtctaacctgttccttgtttaaaggaacaatgattttatctgggtcacttccacacaattttactatatgtagtcttgcctgaccaattaatgtagccatttgatctaagtacaatgtaaaagtcttagttgtactgtgaggaaggaatgaccactctgcaagatcagtattttgaacaataatgcctgttggagaatgtgcagtagcaaaaatcaaaagttggagtggggctaaatgatctattctatttacttgtgctgaccgaattttttcttcaactaattcaatttctttagttgcttctggagttaatggttttttactgtttaagtctggatcccctctcaagatagaaaacaaatttgacatggcataagtagggatgcctagagttggccgaatccaattaatatgtcttagcaatttttgaaagtcatttaatgttttttaatgtgtcttttcttatttttattttttgtggtttaattttcctttcctctacctgcattcccaaataatggaaaggagtagaggtctgaatcttatcagatgctattgtcagtcctgcgtttgcaacatctgtctgcagaaatgtgtaacagtcaattaatttgtctcttgtttctgcagcacacaaaatatcatcaacataatgaatgacataacaatctgaaaacttgtctctaactggttgaagaacttgagctacaaaagtctgacaaatagttggactgaggcaacactttccactaaaacctggctggttctttattatttacggctggtatagtaaaagcaaatttttcaaaatcctgttttgccagaggaatggtaaaaaagcagtccttcagatcaattataattaaaggccagtctttggggatcatggccagagagggcatcccgggttggagagcacccatgggttgtattatggcattaacagctcttaagtcagtcagcatgcgccatctgcctgattttttctgaattacaaacacaggagaattctaaagagagaaagtgggtgaaacatgtccttttttaaatagttttttaactattttatgtagcgcccccaacttttccttagagagtggccactgtttgacccatacaggacactgcagggcgagtctgaattgctccttcactgtagtgaactgtaggttgggcaataatgagtgccacgagccaagtcgcagtgtgcctagtttcaggctgcctcccccagcactcactcggctgaggaggaggtggccattgtggttgtagccccaatggccccaatgattctggactttttccttttaattttaatgtttcaggatatattacctcctgtaattgattgtagtcaacactttgcgttgactgagccattaccggctctgctacatatttacaatgtgaactttccgttcctttcttgaactctgtctctgcctcttcttcacaatctatcacacagctttcaggggcatcagaaactgaaatgctatcttcttctatttgaaatggttctaaagttgctttaataatggcccaatcattccatactgtaagtgggatgattttaccttccctacttgcttgttttaattccttgccaattttttcccaatcttttaaatctaaagttccttgttctggaaaccatgggcagaattgttctattgtttgaaatagcgtaattagattttctgtagaagctttaactccccctcttcttaagagaattttaatgaagctgagataagaggcatatttactttcagtttgccccattgttaccctggattcctccgagcgcacaagcatactgcaaggctgaccgtggacgtactcgggaatctctcatcagctgtcctcaatactcacgttctcagcataacttcaccctggagaaaggccccatattgggcgtcagatgaaggggtggcctgcccctccatacctgtgggatatctcgtcaggtgggatgagagactgagaaaagaaataagacacagagacaaagtgtagagaaacaacagtgggcccaggagaccggcatgcagcatatcaaggacctgcaccagtaccggtctctgagtttcctcactttttattgattattatttttattatctcagcaagaggaatgcagtaggagagcagggtgataataaggagaagttcagcaaaaaacatgagcaaaagaatctgtcataattaagttcaaggggaggtactatgcctgcatgtgcatgtaggccggatttatgtttctctccacccaaacatctcagtggagtaaagaatagcaggcagcattgctgccaatgtgtctcgcctcccgccatagggtggtttttctcctatctcagaattgaacaaatgtataatcaggttttatactgagacattcagttcccaggggcaggcaggagacagtggccttcctctatctcaacttcatgaggctttcctcttttactaatccacctcagcacagaccctttacaggtgttgggctgggggacggtcaggtctttctcatcccacgaggccatatttcagactatcacatggggagaaacctcggacaatacgcggctttccaaggcagaggtccctgtggctttctgcagtgcattgtgcccctggtttattgagactagagaatggcgatgacttttaccaagcatactgcttgtaaacattttgttaacaaggcatatcctgcacagccctagatcccttaaaccctggttccctacaacacatgtttttgtgagctcaaagttagggcaaagtggctggggcaaagttacaaattaacaacatctcagcaaagcaattgttcaaggtacaggtcaaaatggaatttcttatgtcttccatttctacatagacacagtaacagtctgatctctctttcttttccctacactgaagaaggaggatcgcttgaagtcaggggttcaagaacagcctgggctggccaggcatggtggctcatgcctgcaatcctaacactgtgggaggccgtcatgagcagaacaacttcaggccaggagttcaagaccagcctggccagtatagcaaaaccccatctctaattaaaatacaaaaattagccaggcatggtggcacacacgtataatcccagctactcaggaggctgaggcaggagaatcacttgaacccaggaagtcgaggctgcagtgagctgagaaggcaccactgcactccagcctgggtaacaacgtgagaccctatctcaaaaaaaaaaaaaaaaaaagaagaaaataaaaaatttatatgtgtgtattctgtgagatagaggtccaaattcattcttttcttttcttttctttttttttttttttgagacagagtctcactttgtctcccaggctggagtgcagtggcgtgatctcggctcactgcaacctccatctcccaagttgaagcaattctctgcctcagcctcctgagtagctgggattacaggtgccaaccaccatgcctggctaattttttgtatttttagtacaccatcttggtttcaccatcttggccaggctggtcttgagctcctaacctcatgatcagcctgcctcggcctcccaaagtgctgggattacaggcataagctgccacgcctggccccaaattcattcatttacatgtggatatttagttgtctcagcaccatttgttcatttgttgaaaagattattatttcccaccccccacccccgctttttttttgagccggtgacttgctctgtcacccagcctggagtgcagtggtgtgatctcggctcactgcaacctccgcctcctgggttccagcgattctcctgcctcagcctcctgggtagctgggactacaggcatgtgccaccatgccctgctaattttgtatttttcgtagaaatggggtttcaccatgttgaccaggctggtatcgaactcctgacctcaggtgatccgtccacctcagcctcccaaattgctggaattacaggcatgagccaccatgcctggcctccccacctttttttttgagacagtctcattttgtcgcttaggctggagtacagtggcacgatcttggctcactgcaacctttgcctcccaggttcaagcagttctcctgcctcagcctcacaagtagctgggactacagtcatgtgccaccacacccagctaattttttgtatttttattagagatggggtttcgctggtctcaaactcctgacctcaaatgatcctcccgccttggcctcccaaagtgttcgtgttacaggcatgagccacacccagcctcccaattttttttttttttttttttttgagacagagtctcactctgtcacccaggctggagtgcagtgagtggcgtgatctcggctcactgcatcctccacctcctaagttcaagtgattcttctgcctcagcctcccagtaactgggattacaggtgcacaccaccatgcctggctaatttttgtatttttagtagagacgaggttttagcatgttggccaggctggtcacaaacttctgacctgaagtgatccactcgcctcagcctcccacagtgctgggattacaggcgtgagccaccatgcctggcccccatttgagtttcttagcatcttatcaaatagcaattgtgaccatttatttctggactgtcagttctattcaattgacttatatatctatctttaagcagtatcacactttcttggttcctgtatgtttgcattaagcttccaaattgtgcagtgtgatttcttcaatttttttcttctttttcaggcatttacttttttttttttttttttttttgagacatatctccctctgtcgcccaggctggagtgcagtggtgggatcatggctcactgtagccttgacctctccaggatcaagtgattctcccactttagcttccccagtagctgggactacaggtgtgcaccatcacacctggtcaatttttgtatttttgtagagacggtgtttcagtatgttgcccaggctggtctcaaactcctgggctcaagagatcctcctgctttggcctcccaaagtgctgagtttacaggtgtgagacacattgccctgcttgaatttgttgattgcatctccatggtgttatttaacatgttcttctgtccctgtattttagtcattcaacagtgtgatctaatttagggccacttttacagcaggaataatttgcaggtggtgtatgtgtttccagagtcagaacatgtttggtttatgctcttggtgatattcagggctatcagtgatcctctcctggatcattttttaattagaggtgatttgtgttttgaaagggtcacttgggttgctggggggtgtattgtatatgagtaacagggttcttataaggacggagtcggataatcatgcaacagagcacttggtgctattcctggcacgcaatgaccatattgttgttgttgttgttgttgttgttgttgttattgttagagctgtgtgtgggggacccaagtcctgagctcggaggcattttctggccagggctgtttcctcccttctcccctgcctctggaaaagtctgcagtgccccaaggctctgggaggcatgttcaggactgcagcagccatctctgtgcacctggtggggccccttcagggaaggaaggctggagccccactcacttggttcttgcaccagactgtaagtgccctaaccccaatactctgccacctgcatggcctggggcttctggggtctggctcgttcctggcttcaaagctgtgcatgagccttctctttcagggagccctctttaactgcagcctgtatgtgggcttctcccttgcccctgcttctctagtctagaacttgtagctctgcatctgaatagtcagcttgggcgctgtagggtgctgcttcccatgatcccctgtgcccatcccagaacccagtacctggtagggactcaataaatgtcaactgagccaggcgcggtggggttcctgggccatggaagacctggcacttactcaaatggtcccaaggcccctccaggacaggggggcctggtgttgagattactgtggctgccaccctgaccaggtccttgccagcttctcttctgaccctgggcaggtacctgagcctcttcaagcctcagtgtcctcatctgttagatggagactattgtggcacctctagtgagagtgcagtgggaactgagcgaggtggaactgagcaaaatcctgagccagggttcactattgaccacagcaggtggctgagaagaatgttggatccccagctccacggcccaccagccatctgggactggcaaacccacaggaacggaaggttcctcagggaccacaaagcccatgtgaggtccctgctgctgaagggattctgaggacaggaggagccaaattacctatccagggtcacccagccaaggtgggttaggacctgagtttggtggctctcaggtctggccaatttctttctttctttttttttttttttttttttttttggtagagtcttgctcgttgggtcgggcaggagtgcagtggctggcacgatcttggcccactgcaatctccatctcccaggttcaagtgattctcaggcctcagcctcctgagtagctgggattacaggcatgtgtcatgacgcccagataagtttctttgtttgtttttcccagactgagtttcactctaatgctcaggctggagtgcagtggtgtgctcttgcctcactgcaatgtctgcctcccaggttcaagtgattcttgtgcctcagcctcccaagtagctgggataacaggtgcgtgctaccacgcccagctaatttttgtatttttagtagagatgggggtttcaccatgttggccaggctggtctcgaactcctgacctcaggtgatctgcccgcctcagcctcccaaagtgctgggattacaggcgtgagccactgtgcccagcccctggccagtttctgcacaccagtggctgaggagggagctggcctgggaggaacaccgggaggggaggggcgagccaggagccaggaccccgggaccctccgaggagcggattagtgcctccctcagagttaggacatggccttgggtccaacaggcctaagtctgagtgtgtgtgttgtgtggccttaaacacatcactccccctcctgcaccctccagcctctgttttccaccttctgttttctcattgataagataggcctgaccaggtcattcagggaatgaaatggaagtgcttagcaagacctctgtaagtggaggctgctgctgtcactgttgccattatcctccctctccgctccacccacctcctgctcctcttctttaaccctcagcccttcctgagtcagactttaacctggccaagtcagggctctgtctcaggacgcatggagccagggctggaagtctccactgggcaggcgccaggcagcccctgcaggttggggaggtggaggctgctggagtcaagaggaaccaggtgagggtgttggagcataacaggcttgggaggcaggcagaaacctgcccttctgcaaactctatctcttccccctcctgggagcagacaggatggcgctgtggcctgaaagcagctgtccctcctgtgtgcaagctcggactgctgcacccagacagattccatctctgaccttccacttgttcgtctccagctcgccatggccaaacagctgcaggcccgaaggctagacgggatcgactacaacccctggtgagccagctgggctggggaggtgtgtgggtgtcccctcgggcatgggttggccatccctgggtttacagcaactcagtagtactccagatggtggcggtacacagactgccagattccagccatagctcaggagagacagggcccgagggagtaggcttggttcaaatctcagctttcttctgcatgactgtgccactaggacaggtgacatacctgctctgagcctcatctccccagctgcaaaatgaagagttatacccacctggagagcgttggggaggaaaaagtaaaatgctgtccaaagccattctacccaggcaccaagctaaggcctttccagggatgactctttctcacttggtatagagtcagataaactaagataagtaaaataagcaagtaagatacagtcagctcttcaccagacatttgcagaggttgatattgttttcttttttgacttgttttattttcattttatttttgagacggagttttgcccttgtcgcccaggctggagtgcaatggtgcggtctcggctcactgcaacctctgcctcctgggttcaaatgattctcctgcttcagcctccaagtagctgggattacaggcgtgcaacacaacgcccagctaattttttttctttttcttttcccccgcaagacagaatcttactctgtcacccaggctggagtgcagtggcatgatctcggctcactgcaacctccccctcacaggttcaagcaattctcctgcctcagcctcccaagtagctgggattacaggcgtgcgccaccacgcccagctaattttttttttttttttgtatttttagtagagatgagatttcaccatgtttgccaggctggtctcgaactcctgacctcgtgatccacccgcctcagcctcccaaagtactgggattacaggcatgagccactgtgcctggccctaatttttatatctttagagaaaatggggtttcagcatgttgtccaggctggtctcaaactcctgacctcaagggatctgccctcctcggccttccaaagtgctggggaatacaggcataagccaccgggcccagccaaaaatgacacattttagacatatttattggtatgcaaattcaactcagccaggtcttcactctgctccaaactagccccaaaccacataccagcctcttcatccagcttcccagcctttctcccacctggagaggtggcccccaggcagggccagaacagaggattatgggtccagagatgatgtgtgcctgggctggtggggccctgttctgcccagagtagggtcaagagcatcaaactttgcttgagatggaagtagaaaggctggctggctgtgccttgtactagctgggaggctttaggcaagtcactccactccttatccccacagtggtccaggaacaagatgtgcctcacaggccattgtgaaggctatatgagcagagcgtttaactgtggtgttgacgaatccaaggaggagtcatgcaatctgtacagggggtctcaactagtatttggaaagaatagagtaggataggacaggacagaaaatactgcagtagattgcaccaagaaggatgaagcttccattccatgtttgtgctccacagggttgatgatgcaaaggtgatttcttggccggtagtggtggctcacgcctgtactgctagcactttgagaggccaaggggggcggtggatcacctgaggtcaggagttcgagaccagcctggccaacatagcaaaaccccatctgtactaaaaatacaaaaattagctgggcgtggtggcgggtgcctgtaatcccagctactcaggaggctgaggcatgagaatcgcttgacctcgggaggcggaggttgcagtgagttgagattgcaccactgcactccagcctaggggatagagcgaaactctgtcaaaaaaaaaaaaaaaagatgatttcttcctatgggtcatggtggaagaacttggaaagcccctgggctgattcctgcgattaacaatgtgcctgactgacctaatctcaatgtaggggaccagctgtgacacttaggcagatcttcaggccaggacagttgctgattgtctagtttttgtttttcttgtgtgtgtatgtgtgtgttttttgttttttgtttttgtttttttaagacagaatctcactcttgttatccaggctgcagtgcaatggtgcgatctcggctcacttcaacctccggttcccgggttcaagtgattcttctgcctcagccttccaagtagctgggattacaggcccctgccaccatgcctgactaacttttgtatttttagtgaagacagagtttcaccatgttggccaggctggtctcaaactcctgacctcaggtgatccgcccacctcggcctcccaaagtgctgggattacaggcgtgagccaccacacctggccggttgtccagtttttctaaacaggccgaagtccaggtcaccatggagggctgggctggtgctgattctccatttgttacccagggtggagtttgtgaaactggccagtgagcatgacgtcgtgaacttgggccagggcttcccggatttcccaccaccagactttgccgtggaagcctttcagcacgctgtcagtggagacttcatgcttaaccagtacaccaagacatttgtgagtctccccatctctcgtggaggcactgggggaggaaggggacagggctttctggacttcaagcccacacagctgtcaggcttcaggggacagagccaggggattctgtatgaccatagttcagtgtttactgagcgtatcctctgtcccagagccttcgcctcgtggtctagtggggatggcagacaagaagccagtaacgacaggcagttgatacatgatgtgatggaggaggatgggatatcgtgcgagtaagaaagagggaatgaaacctggggagggggctggagagatgcacgaagacttcctggaggaggtgacacttaaaccaagtcctgaaagatgagctactggttggattacacaataaatccaaacgttttccggaaaggaccacatagtaaatatgtgacactgcttggattagaacagtggttctttttttctttttcttttttgagacaaggtctcactctgttatccaggctggagtgcaatggtgcgatcatggtccactgcagccttgaccctgccagtctcaagtggtcctcccacctcagcctctggagtaactgggactacaggtgtgcatcaccatgcccagctaattttatttatatatttatttatttatttttgagtcagggtctcactcctgtcacctaggctagagtgtagtgacatgatcacggctcactgcagcctgtacctcatggggctcacatgatatgccatttcctggggctcatgtgatcctcccacctcagcctctagagttgctgggacaacaggggcatgccacctcacccagctaatttagagacagggtttcaccatgttgctcagactggtctgaaactcctgggctcaagtgatcctgccacctcggcctccaaaagtgctgggattacaggcgtgagccactgaaccctcattctttttttttttttttttttgagatggagtctccctctgtcgccaggctggagtgcaggggcgcaatctcggctcactgcaacctccccctcccaggttcaagagattctcctgcctcagcctcccgagtagctgggactataggggtgcgcccccacgcccagctaatttttgttttgttttttttttaagacagtctcgcactgtcgccccggctggagtctggagtgcagcggcacgatctcggctcactgcaacctccgcctccgcctccgcctccgcctcctgggttcaagccattctcctgcctcagcctcttgagtagttgggattacaggcgcccgccaccatgcccagctaatttttgtatttttagtagagacggggtttcaccatgttggccaggctggtctcaaactcccgacctcgtgattcgcctgcctcggcctcccaaagtgctgggattacaggcgtgagccaccgcacctggccattttttgtatttttagtggatactgggtttcaccatgttagtccggttggtctcgatctcttgacctcgtgatccacccacctcagcctcccagagtgctgggattacaggcgtgagccaccgcacccgaccgcactcgttctttttaatggctgcatactgttctgttgcctggatgtgccataatttatttaagcagttctgcactgatggactgcttctgctatctcaatatcataagcaatgccacagcaaatatccctgtgtggacatctttgtatacatatgtatttctctaagataaattcctggaggtaaaactagcaaaagaaagactataaatatttataaatacaataggtggatattgttaagaaacagtgtgtgcctataatcccagctacttgggagtctgaggcaggaagattgtttgagcccaggagtttgaggccagtgcaacatagtgagatcctgtctgaaaaataaacaaacaactaagtaaataattgccctccagtaaggtttactcatttacatccctgccaataggctggtctcagagctggttggaaagttccttctttgatccaaaaaaaaaaaaaatcatttgggtatgtatctttttcttttctttctttctttcttttttttttcttttaactagagacaaaagctgggtatggtggctcacgcctataatcccagcattctgggaggctaaggctggcagatcacctgaggtcaggagttcaagaccagcctgcccaacatggtgagatcccatctctaataaaaattagctgggcgtggtggtgggtgcctgtaatcccaactacttgggaggctgaggcacaagaatcgcttgaacccgggaggcggaggttgcagtgggccgaggtggtgccattgcactccagcctgggtgacaacaacaacaacaacaacaaaatagagacagggtctccttatgttacccaggctggtctcaaactcctgggctcaagcaatcctcccaccttagcctcccaaagtgctgggttacaggcatgagccactgtgcccagcctcattaaatattttacctctttcttgtatgttgcaatatttttctcttcctgttttgaccttgctcatggtgccttttatttttatttaattaattaatttattgtctaagacagagtctcagttttattacccagactggtgtgatcataactcacttcagccttgatctcctgggctcaagcaatcctcctgcctcagcctcccgagtacctgggactacaggcacgtgatactacacctggataatttttttgattttccatcagtagagacagagtccctctgtgttgcccaggctgttctcaaactcctggcctcaagcaaccctcccgcctcatactcccaaatgctaggattacaggcgtgagccacggtgcctggcctgtgcctcttgttgtacagaaaatttttatatttgtgtggccaaatctggtttagtgagttactgagttgagttctagataaagtttcaatcacttggcttagccttgagtatttttgttttgttttgtttgtttttgttttttttgagacggagtctcgctctgtcgcccaggctggagtgcagtggcgcgatctcggctcactgcaagctccgcctcccgggttcacgccattcttctgcctcagcctcccgagtagagctgggactacaggtgcccgccaccatgccagctaattttttgtatttttagtagagacggggtttcaccttgagtattttataagtgtcctcagcaaacaagtttctggatctaatcttcctctcaaaaaggggtgcttacaaagctgcaacatgaggttcctgactgtcaactgtgtgtgactttagacaagtaatttcttctctctgggtctctatttttctacctgtcaaatagtgggcatcaggccaggcacggtggctcacatctgtaatcccagcactttgggaggccaaagcaggcagattacccaaggtcagaagttcgaaaccagtctggccaacatggtgaaaccccgtctccactaaaaatacaaaaattaaccaggcatggtggtgcgtgcctgtagtcccagctacttgggaggctgaggcaggagaatcacttgaacccaggaggcggaggttgcagggagccgcgattgtgccactgcactccagcctgggtgacatgagtgagaccctgtctcaaaataaataaataaataaataaataaataaataaataaataaaagcctctcccgcaaagctgctgggaggatcaagtgggcacaaacatgcttcttaaacttacagatgtggaaagtggggagtttctactgccttgtgggctcttggactgaggttcatggaggcaagcacttcctctggttctctgctaaatccccgccctgggcttcgggcctggcacagaacaggccctgtggcaaatgctggtggaggagatggaagagcttagcactggatatctgagtcagtgcaggcctggtggttggcaccctggagtctgggaccatatagattgtgtgacctttacctcccagagtacacaggatcacaatagcacctgcctctgggttgttgagaggatgagatcaaagaaatcccacaaatagcttggtgtgtagaggaatccagagtgttgaaagctgatctattccacgtcccctggggcccaggctaccagtacctgactttgcccccaggcctgctgctggaaggtgctagaattgcctggatacagctgggccggaggatgggcccaggctgagctggacagttaacccctgctgtcctggcagggttacccaccactgacgaagatcctggcaagtttctttggggagctgctgggtcaggagatagacccgctcaggaatgtgctggtgactgttggtggctatggggccctgttcacagccttccaggccctggtggacgaaggagacgaggtgagtgggcaagacttgggctgagtgggactgagaggtcagggccatgctgactccagctgatttgacccttatatcaggtcatcatcatcgaacccttttttgactgctacgagcccatgacaatgatggcagggggtcgtcctgtgtttgtgtccctgaagccggtaaggatgctaggtagaggatggatgggcagagggatccaaggcgtgggctgagttggaccctgggagttggaaaaggaggaaagaagtgaaggaagccagttcctctaagctgggagggcagaggggaggtgtgtgtgttgggatcccaggggagagaaggtggggatagatgctggggaagacctgcatgtcaggtggttaagtggtaccaccccatgccacctgctcttgcagggtcccatccagaatggagaactgggttccagcagcaactggcagctggaccccatggagctggccggcaaattcacatcacgcaccaaagccctggtcctcaacacccccaacaaccccctgggcaaggtactggagggacctccttccctggccccctgcggacctggtcatgtctcctgcactgttactgagttgctgctgtggggcctccgtttcttcgtttgtgtgtgggagggccacacacaatgagcactgaggaccaagactccagaggtcccaggacaggggcaagaatccccagggaaggcctgagggctgggacagtgaactgggctgggagccaccatcacttcccagtgaccctggaatagtgactatgcctctcgaagtatctcatctgtaatgtgggaacctgagggaactgacctcatggtcagtgttgcagggatccaatgtgatggtgcagaacagcccttagcactgggcttggctgtattcgccatttatttatttttttgagacggagtctcgctctgtctcccaggctggagtgcagtggtgtgatcttggctcattgcaacctctgcctcctgggttcaagcaattctcctgcctcagcctcccgagtagctgggattacaggcacccgccaccatgcccagctaatttttgtgtttttagtagagacggggtttctccatgttggccaggctggtcttaaactcctgacctccagtgttccgcccgcctcggcctcccaaagtgctaggattacaggcgtgagccaccgcacctggccgcagctgtgttctttaacctctctgagtaggcctctgtgtttggggacggtcccagctgcaggtctgtgctctccttgggcatctgcaggtgttctccagggaagagctggagctggtggccagcctttgccagcagcatgacgtggtgtgtatcactgatgaagtctaccagtggatggtctacgacgggcaccagcacatcagcattggtgagccaagccagcctggggcccctcccctgcacattggtgggagggccttgaccccacctgagagtcagcgcaggcctggtagttagaacccagggttatggagccctgcagatcctgtgacctttgcctcccagagtacacagtgtcacagtagcacctgcctccctggttgtcgaaaggatgaggtcaaagaaatcctatgccgagcatggtgggtcacacctgtaatcccagcactttgggaggctgaggctggcagatcacttgaggtcaggagtttgagaccagcctggccaacatggtgaaaccctgtctgtactaaaagtacaaaaattagctgggcatggtggcacgtgcctgtagtcccagctactcaggaagctgaggtaggaggatcactggaacctgggaggcggaggttgcagtgaggcaagatggcgccattgcattcctgcctgggcaacagagcgagactccatctcaaaaaaaaaaaaaacaaagaaagaaatggggggtggagggagggagggagagagagagagagagaaagaaggaaggaaggaaaggaaaggaagaaagaaagaaaaaaaattgtgcaaataacttagtatgtagaggaatccagggtgtcaaaagcctatgcgtgtcccctggggcccagaccaccatcctcccccgtccccctcaccccagtctcagcagctgttctgttcggccttgggcagccagcctccctggcatgtgggaacggaccctgaccatcggcagcgccggcaagaccttcagcgccactggctggaaggtgagttgctgagggtgggaggtcaccaccccctgcaagatccttggcaagtgaggtgggcctgagaatgaagaaggctttagccaggtctggaaggacctctccccctacctgcgcccctgctgcaggtgggctgggtcctgggtccagatcacatcatgaagcacctgcggaccgtgcaccagaactccgtcttccactgccccacgcagagccaggtgaagaggggcaggacgtcacgggggagtggggggacaacaaaagagcccaggctggcccccgcgtcagggaacagctgatctatctgtgtgtccatctgccctgcccaggctgcagtagccgagagctttgaacgggagcagctgctcttccgccaacccagcagctactttgtgcagttcccgcaggccatgcagcgctgccgtgaccacatgatacgtagcctacagtcagtgggcctgaagcccatcatccctcagggcagctacttcctcatcacagacatctcagacttcagtgagtgagacttgccggtctgggcagggcgcaggggctggaggctgcagggggctcagtgtggcctctgtctcccagagaggaagatgcctgacttgcctggagctgtggatgagccctatgacagacgcttcgtcaagtggatgatcaagaacaaggtgggctgggcctctgccaggcagccatgtatggtttcacaggttgtgtgctgctcaagggtgcccaggcaagaggctcctgggctagatcttagtccagcctctgccgtcaaccttggggcagggttgtatccacttcagagaatgaggaggctgtttctttttttctttcttttttttttttggttgagatggagtctcactcttgcccaggctggagtgcagtggcgcgatcttggctcactgcaagctctgccccccaggttcacgccattctcctgcctcagcctcccgagtagctgggaccacaggctacttttttttgcccggctaattttttttgtatttttggtagagacggggtttcaccatgttagccaggttggtcttgatctcctgaccttgtaatccacctgcctcggcctcccaaagtgctgggattacaggcgtgagccactgctcctggcctttttttttttttttttttttttgagacagagtctcactctgtcgcctaggtgggagtgcagtggcgcaatctcagcacactgcaacctccacctccagggttcaagcgattctcctcccttagcctcctgagtagttgggtaactgggattacaggcatgtacaaccacgcctggctaatttttgtatttttagtagagacggggtttcaccatgttggtcaggctagtctccaactcctgacctcagatgatccactccccttggcctcccaaagtgctgggattacaggcgtgagccaccgtgcctggcctgaggaacctgtttctaacttgcacagagatgctgtgtgggctggcaggatttcctgcctctttggatctccatcttcccatctgtacagtgaggagttggcccattaactcttgagttcatccaggtttgatctgtgactctaaggctttgttcttctctggctctgccctgacctgctccatgatcctccctctgtcagcctccctctgccctctatacccagggagggacttggaatgatgttctgggattcttttcttctgactttgtgtttgtttttgttttggatggattttctctctttcgcccaggctgcggtgaagtggcgcaatctggctcactgcaacctccacccccgggttcaagcaattctcctgcctcagcctcccaagtagctgggattacaggcatgcgccaccacacccggccaatttttgtatttttggtagagacggggtttagccatgttggccaggctggtcttgaactcctgacctcaggtgatccacccgtctcagcctcccaaagtgctgggattataggcgtgagccaccgcacctggccttgttcctctgactttgatgcagctctaggtgctggattggagctaactctccttccccgcctggtcgtgggaacctctctgtcccctccggagccaaggcctgctgggccacgaggccgtgttgagacatgtccttcctcctccccagggcttggtggccatccctgtctccatcttctatagtgtgccacatcagaagcactttgaccactatatccgcttctgttttgtgaaggtaaagggcagggctgggggaggaaagacctcacagagcttcccaaggccggctgggcacatggggagagtgtaggactaatctgtgctggcgcaggatgaagccacgctccaggccatggacgagaagctgcggaagtggaaggtggaactctagccctgaagtcacgccttggccctgacatccccacatgcccgcagagatcctctttgagtgtctgtctttgtccaggtttcagacatttctaggttggggaagatgctattgggaaacctcttctccgtgacacagaatgttctgggtgggagccgcccttcttcatcttagagaaccaagtgcctcctgtctgaaaggtgagggtggcctgacctgggcctctccctgcccctccataggtgggtttgtagggtcttgtgttgcttctggtctctccaggcttggctg

SEQ ID NO: 15649 - DNA, 46486 bp, Homo sapiens
cacaggggtgcctgggagggggctcgcgcgccgcggagccggcgagaaggtggtgccccggagactccgggcactggggagcccagaggtaggccgaacaccgcgggaggtccccagggggccggcccggagacagagccccagatgccccgggcgccccgggccgggcagctggccgagggcgtgtgtaagtgggtttcgagaggtgacagctcgcgcccctttccccaccccgtccactcacctgggctcgccgcgcccggccgcccggcaggcagccccaggccccggccgctccgtcccgccgccggccgcagcgctgctccggcgcctccttttgtttgtccctcactgcaccactcagcctcctccgccccggaagtgacgtcaccgccgggcgcgaacgcggcggccagggcgtcgccatctttatgaggagaattctagcggcgctttctcccgctctcgcctccgcgctagcgccctgctgcttcggggcggaagtagcggagccgggctcggcccccttaaagggacagggactgctgcaacctacggggtgtacttgggaacgaggggtgaagcggcccaggtgagggtgagtagctgtgtcggagcgccacttccccaaggtcaggtgccgaggctgggagggtcggctaacggttccgagcttggttgtgctagagtgcttaatgagtttgatgctactaagtataacggagtggctgcacagaatgattgagccgcccgcgggaatcaactgcgcgtgctgctcgctgattctcgctcggacactggggctggtcctgtctgcacccaaatccccctcccacgaccgcgccggtggagatgatacccgagacaacagaattctggacagatctggggttggaattgggtccccagactccaactctgcagctccataaatcccgctgggtcctcgcaaattccctggctgataacagtaccggcaaccaaattaaaaaataatccatacagtggaatactgtgcagccattaagacgaacaatgtttaatatgcactaatgtagggtgacttctaagataccttaggttaaaaaaggaaacaacagtaaaaacagcgttgggccggttgcggtggctcacgtctgtaatcccagcactttgggaggccgaggcgggcggatcacgaggtcaggagatcgagaccatcctggctaacttggtgaaacctcatctctactaaaaatacaaaaaaatcagccgggcgtggtggtgggcgcctgtagtcccagctactctggaggctgaggcaggagaatggcatgaactcgggaggtggagcttgcagtgagccgagatcgcgccgctgcactccagcctgggcgacagagcgagactccgtctaaaaaaagaaaaaacagcgttgatgggtgctatccatctttgcgtagaaggacgcctgagggtgggcgtatctgcgggtgtgcgcgccagctgtctgataagatgcacaagaagttgttaattgcggttgtctccgacagaattggggtcttgggtacctgggccagggcgagaaatttactaccatgtgcacagatagataattaaaaataagatgatgaagatagtcgtggctcccatccatcacgtgttaagccaatgcctagtttcacttctgttgggaggtcttatttttcccttttaatagaagagaaaagaaccttagagaggttaggaaacttagcaatatcatagccagggccgggcgcggtggttcacacctgtaatcccagcactttgggaggctgaggcgggcggatcacgaggtcagtagatcgagaccatcctggctaacacggtgaaaccccgtctctactaaaaatacaaaaaaattagccgggtgtggtggcgagcgcctgtggtcccagctactcgggaggctgaggcaggagaatggcatgaacctgggaggcagagcttgcagtgagctgagattgggccactgcacttcagcctgggcaacagagcaagactccgtctaaaaaaaaaaaaaaatcatagccaggaagtggagaagctggaatttgaaccctgggagatttacactaatgcccatgatctagcttatccctcgccactgagatgctttttctgttgtcagtcacgcaacacccgtcttggggcctggcacacaacaggcatccagtaactatttattgacatgatgtgtggtgtgaaaagcaaacgttgaaggtcagagcccaggcttaaagtccagggcttgggcacctctttccaacctgtggactgtgggcctgccaggtactccgtgggcctccatgtccccgcctgtaaaatgaacaaccagaaccacagttgtagacagtgaatgttcccacgtattatactttgtattttacacgcagataagtctcattttacagataagtgaggcacagagagattaagaaagttgccagaagggggttcctacaggtctccctccctccctaggaaggctgctgggctcccaggcctctcccttagcttcccaggatcatctgtgctaatgcctgggggacctactctgtgctgggtgagctgccagaggctgaggatctggtggagaacaggtcaagcacatagttcctgtccttggagttgagcgcccccgtgctgagtactttgagggcggaagcccaggtcttgggaccacctgggaggggacatgtggcttagcctgggtggagtcagaaggggcttctccaaggaagggactttcaatgtgactggaaactaggatgtccagaaggagaaatgatgaggctggagactcaaggagagatgggctcctaccctggacttggccttggtgtccactaagaaactgagggtgaccaacaggattggagaatatacaagttagacccattcagtctggcttcagcaggaatctttcctcccggagaatgcctccattaggtgccaaccaccagaacgccacactaacctctccaagctccaaagagtagggcgcctgattttataatccaggtgggggcgataaaggaatgcaggagccttcacagccatgaggcagtcactgtaactcctgccagaacagacctggggccacatcccactcctggatggcactgccagttccctgcataattcctttttttttttttgagacggagtctcactctgtcgcccaggctggagtgcagtggtgcaatctcggctcactgcaagctccacctcccgggttcactccattctcctgcctcagcctcccaagtagctgggactacaggcacccgccaccacgcctggctaattttttgtatttttagtagagacggggtttcaccgtgttagccaggatggtctctatctcctgaccttgtgatccgcccacctcggcctcccaaagtgctgggattacaggcgtgagccaccgcgcccggcctcccggcataatttttaaaatgctcatcctatgccctcattccccagcttgcagctgggggcctcctggtgcttttctgggacttcgagtaagtcatttcccctctctaagcctcagtttccccacctgtaaagctgatgccacctcctccaaggctcccgcgaggctatctgcctatctgttgtgtgttcctttaatgtatgggagtgagattgtggtttttgaatctgggtcctgtgccaggaggaataagtggtgagatacctactgtttgtgtcactcaggtcttccaccaacccctccagcctgtaaacctgccgtctggactccagaagtcatttctctctcctctgccaattcctaagcccagggggactgtgtctgagtgacgcaattgttagatctcctcagacaggctgttctctccaggaaaacattggctcaacaaattgtcaccaaacatttgtcttcagggaattctgttttttttctatcaaaaaaaatttggattcattatataataagagatttttcattttgcttggttactaattttatggaaagcctggtaggtttaaatgttaatagcttgttgactgggtgtggtggttcatgcctataatcccagtaatttggaaggctgaggtgggactatcgcttgagctcaggagttcgagaccaacctgggcaacgtggtaaaaccccatctctatcaaaaatacaaaaattagctgggtgtggtggcacgtgcctgtggtcccagctactctggaggctgaggtacaagaatcgcttgaaactgggaggcagaggttgcagtgagccgagattgtgccactgcactccagcctgggcgatagagcaagactgtctcaaaaaaaaaaaaaagttaatagcttgttgtcattgacaagtggctgtgagccaggacccacagtatattctctgtggattcttgtcaccttcattgtacagatgaggaagctgagcccccaagaggctgcggcctggcatgaccaaggtcccatagctagtttatggtggagctgggactatttgatccaagtccaaggtttggtcttctgtggttattcatgcactagactggtcttcctgggcatggtatccccagttctgtaccctttctctagaggtgccacgatgtgtgttgtctcagtaactgggagtctcctggcattttaagcccagggatgctaaacatccttcaaggctccagatagctctccccagtgaagaactgactcatctcaaattctaagtgtgcccctattgagaagctccaaaaccgaatgtcataattgacttgagtgatgtgacgtggggccaccctgggaaggcatggtcacctcgcctgcccttgtaagcagccatgcaaggtgaagttggacaagacatggctcctgtccccaaggggctggtggtctcctgtcagccctagcacccgcctgagaggagatttcacgggacagaatttggactttggaaataggcaaaccagggtttgaatcacagctggagctctctaggctgagtgagttttccttgttctccttttgagcaaaatagagtaaataataccatcctaatcagctgtgatgaggattagagaatttagcatggggttgggggagagggtcaggcacaggtaggtgctttctgagttcagcaaagggcctgggtggacacagaagcttcagagaggaggtacaggtggggctaggccctgctagggattttggattggagggtatgccaggcaggggaaacagcttgagtgaagatgggcaacatttattcaaaagcaaagggtggctgggcacagtggttcacacctgtaattccagcaatttgggaggtcaaggcaggcagatcaccagaggccagaagttcaagaccagcctggccaacatggtgaaaccccatctctacaaaaatacaaaaattagccgagcatgatggtgggtgcctgtaatcccagctactcgggaggctgaggtgggagaatcacttgaacccgggaggcagaggttgcagtgagccgagatcgtgccattacactccagcctgggtgaaagagtgagactccatctcaaaaaaataaaaataaaaataaattagctgggcgtggtggcgtgcacctgtaatcccggctacttgggaggctgaggcaggagaatcacttgaacccggcaggtgggggttgcagtgagccaagattgtgccactgcactccagcctgggtgacagagtgaagagagaggctctatctcaagaaaaaaaaaaaaaaaaggccgggtgccgtggctcatgcctgtaatctcagcactttgggaggccgaggcaggcggatcacgaggtcaggagattgagaccatcctggctaacatggtgaaaccctgtctctactaaaaatacaaaaaaaattagcagggcgtggtggcgggcgcctgtagtcccagctactcgggaggctgaggcaggagagtggcgtgaacccgggaggtggagcttccagttagctgagatcacgccactgcactccagcctgggcgacagagccagactctgtctcaaaaacagaaaaaaaaaaaaaaaaaagaacaaaggatgactgggtgtggtgtctcatgcctataatccaagctgtaatcccaggactttaggaggccaagaccagaggatcacttgagcccaggagttcaagaccagcctgggtaacatagggagaccctgtctctatttttttttttttttaaaagcaaagaatttgagctgggggttggggcatgcacttatagtcccagatactcaggcggctgaggcaggaggatcacttgagctcaggagttcaaggctcctaggtgacaaagcgagaccctatctctaaaataaaaaaagagtaaagggagggaaggtggaggctgccaagcctggattccagccggctccaaacgccaggctgaggaggctttggactttgtccagtgtcaccacaggcttctgggcagagctggtccaatgggggttgggggacagtggcatagctgacatcagcccctgggttattgacatcagcccctggaatgcatcagtgatgcattccacgggcccaggggtcatccactgccttcgggtcaagcaaatggccagtagctgcccaggctgatagaggtgtgtgttggaggggggcacaggccactggccctcggcccctggcctggcagcagggaggcctcagatcttagatgcctgagagctaccccagaagggtcctcggcacagctatggtccccatgcctagtggtgctgggcctcctcggtgctgccagatcacctgagctgcctccattgcagcagttatcccacacatttttttttttttttgaagcggagtcttgctctgtcacctggacagctgtcaggctggagtgcagtggctcaatcttggctcacttcaacctctgcctctcaggttcaagtgattctcctgcctcagcctcccgagtagctgggactacaggtgcccaccaccacacccggctaatttttgtatttttgtagagacgcggtttcaccatgttggccaggctggtctcgaactcctgacctcaagtgatctgtctgcctcggcctcccaaagtgctgggattacaggcgtgagccaccacgccagtgagccaaggtcacacagctgcactccggcctgggcgacacagcaggactccatctcaaaaacaaaaaccaaaaaaaaaaaaaaaacaaaaaaaaacaaattgaacataaatggaataatggaagaaatagctagctgtggggatggcaactctgcagctgttcacagtttgggaaacctgagatctgcatccagagaaacttcttgaaggcaaacttatcaacataaatgaggaaagtggttctaaagaaaaagataatgacccagaggaaataataccagcaaaacttcacattaaaggaactccctgggctgagcgcagtggctcacgcctgtaatcccagcactttgggaggccgaggtgggcagatcacttgaggtcaggagttcgagaccagcctggccaacatggtgaaaccccatccctactaaaaatacaaaaataagtcgggcatggtggtgcgtgcctgtaatcccagctactcaggaggctgaggcaggagaatcgtttgaacctgggaggcagagattggagtgagccgagatcacgccactgcactccagcctgagtgacagagcgagactccgtctcaaaaaaaaaaaaaaaaaaaaggcaggattatctcaccacaaaatgtacagaacaggaactcccagagatatttcacaacattgaaaacaaaggatgactaaggatgactcgtattcatcaagacatagaagatgtcaggtgcagtggcttacacctgtaatcccagcactttgggaggctaaggcaggatgattgcttgatgccaggagttcaacatcagcctaagcaacatagtaaaacccccatctttacaaaaaaaaaaaaatagctgagcatggtggttcgtgcttattgtctcagcaactcaggagaatgaggtgggaggatttcctgagcccggtaggttgaggctgcagtgagccgagatcacaccactgcactccagccttggcaacaaacatagaagaaatgctcattctgtatcctaaattaaaccactggaagactgcagcactgttcagttcagaatattctttttttttttttggaatgaagtttcatttttgttgcccaggctggagcgcagtggcgtgatctcggctcactgcaacctctgcctcctgggttcaagcgattctcccgtctcagcctcctgagtagctgggatcacaggcgcccgccaccacgcctggctaatttttgtgtatttaatagagacggggtttcaccatgttgaccaggctggtcttgaacttctgacctcaggtgatccacccgcctcggcttcccaaagtgctggggttacaggtgtgaaccaccacgcccggcctcagaatattctttttttttttttttttgagacggagatttgctctgtcacccgggctggagtgcagtggtgcaatctctgctcactgcaacctctgcctcccaggttgaagcgattctcctgcctcagccttccgtgtagctgggattacaggtgtgcatcaccatgcccggctaattttttgtatttgtatttaattttttttttctttttgagatggagtctcgctctgtggagtgcagtgccgctcactgcaacctctatctctcgggttcaagcgattctcctgcctcagcctcccaagtagctgggatgggattacaggcacctgccactacacccagctaattttttttgtaattttagtagagacgggatttcaccatgttggccagcctggtctcaaactcctgacctcaaatgatctgcctgcctaccggcctcccaaagtgctgggattacaggagtgagccatcgcgcctggcccaagctatttgcaataaaattttttccttgataaacttttataacgaaagaaaacgtcttaattttcagtgttgctaatattaaattacagtgtactaagttcttattagttttttttttttttcattttctatacttttttatttttaaatgacagagtctcactttgttgcccaggctagtctccaattcccgggctccagtcatcctcttgccttggcctcccaaagtcctgggactacaggcatgagccaccacacctgggctacatttttaacagatggtaagagagttttaaaaggtcacagaacaattgtcttattaattattattatccaataataattttctcgattattaagttctctttgcacaatttaagtttacatggtcttttttttttttttttttttaaatggagtctcactctgtcacccaggctggagtgcagtagtgcgatcctggctcactagaatctttgcctcccgggttcaagcaattctcctgcctcagcctccgaagtagctgcgattacaggcacatgccaccatgcccggctaattttttttgtattttcagtagggacggggtttcatcatgttgaccaggctggtttcaaactcctgacctcaagtgatctgcctgcctcggcctcccaaagttctaggattacaggcctgagccaccacgtctggccaacatggtctttttttttcttttgagacggagtctcgctctgtcacccaggctagagtgcaaacggtgcgatcttggctcactgcaacctccgcctcccgagttcaagctggtctcctgtctcagcctcccgagtagccgggattacaggtgagtgccaccattcctagctactttttgtattttattagagacgggctttcaccatgttagccaggctggtctcgaactcctgacctcaggtgatccgcccacctcggcctcccaaagtgctgggattacaggcatgagccactgcgcctggcctcaacatggtctttttctgttttgctttgttttgttttttttgagtcggagtctcgctctgtcacccaggctggagtgcagtggcacaatcttggctcactgcagtctccacctcccaggttcatgccattctcctgcctcagcctcccgagtagctgggactacaggtgcacgccaccacgcctggctaattttttgtatttttagtagagacagggtttcaccgtgttagccaggatggtctcaatctcctgacctcgtgatccacccacctcagcctcccaaagtgctgggattacaggtgtgagccaccatgcccagccaattcaacatggtcttttttttttttttttttttgagacagagtttcgctcttgttgcccaggctgccgtgcagtggcacgatctcagctcactgcaacctccgcctcccagttcaagtgattctcctgccccagcctccggagtagctgggactacaggcgtgtgccactatgcccagctaatttttgtattttttttagtagagacaggctttcaccatgttggccaggatggtcttgatctcttgacctcatgatccacccgcctcagcctcccaaagtgctgggattacaggcatgagccaccacgcccagccaacatggtcatttttataatgccacactactgtggaaagtaaagactacctgaatatgtatgtgtatgtgtatatgtatatatatgtatgcatcctcacatatgtatctccacaattgattttgtttattttttgagacaggatctcactctgtcacccaggctggaatgcagtgctgtgattatggctcactgctgcctcgactgcctgggctcaagcaatactcccagctgagcctcctgagtagctgggaccacaggcatgcaccaccacacccagctaatttttaaaaaattatttgtagagacaaggtcttgttatgttgcccaggctggtctggaaatcctgagctccagtcctcctgcctcggcctctcaaagtgctgatattacaggtgtgagccacctttccaggtgtgagccaccacatccagctttctctacaattaaaaaaaatgcaaatagagttatattgttcttcaacctgccctttttgtttgtttttgtttgttttgttttgttttgttttaagacaaggtctcactctgtctcccaagctggagtacagtggcacaatcttggctcactgcagcctcaaccttctgggctcaagcaatcctcccacttcagcttcccgagtagctgggactacagacacgtaccaccgtggccagctaattttttgcattttttgtagagatgggatttcaccatgttgcccaggctgatctcgaactcctgagctcaagcaatctacccgcctttgcctcctgaagtgctgagattacaggtgtgagtcaccgcggccagcctgtctctacaatttaaaaaatgtaaatgggttatattgttcttcaacccttttaaaaaattaccatacttttttttttttttttgtaattgaggtgaaattcacctaacatacaagtaactattttaaggtatacaattcagtggcatttagtgcattcacaatgttgtacaaacattatgtcactgtagtttcaaaactttatcgttcccttaggaaaacactccgtacccatcaaatagtcactccccattacctcctccctgtcctctggttaccactcatctgctttctgtctctatagacttgttattctgaatatttcacagaaaaggaatcatagctatgtgaccttttttgtccggcttctttcacttagtgtgttttgtttgtttgtttgtgacagggtcttgctctgttgtccagactggagtgcagtgtcatgacctcagctcactgcaatctccacttcccaggctcaagcgatcctcccacctcagccatcttattatctgggactacaggcacacaccaccatgcctggctgatttttgtattttttgtagaaacaaggttttgccgtgtttcccaggctggtgtcaaacaatgatcctcccacgtcagccttccaaagtgcagagattatagtcatcagccatgtcgccctggcctcacttaatatatttttgaggttcatctaagttacagcatgtgtcagcacatatttcattccattttgtggctgaataatattccatggtacagatatgttacaatttatccattcatccattgatggacaatttgggtttttttcacctgttggctatgatgaatactgttgatataaacatttgtgtacatgtttctgtgtggacatatgttttcagttcttttgggtatatacctaggagtgaaattgctaggttgtaaggtacttctatatttggacttcataaaaattaaaaagttttgtgtaccaaagaacattatctgccgggcccgggtaattgcagcactttgggaggctgaggcggggggatcacctgaggtcaggatttcaagaccagcctggccaacatggcgaaaccctgtctccactaaaaatacaaaaattagctgggcgtagtggcgaacacctgtagtcccagctactcgggaggctgaggcaggagaatcgcttgaacccaggaggcagaggttgcagtgagctaagatcacgcctctgcactctagcctgggcaacagagtgagactctgtctcaaaaaaaaaaaaaaagtacattatcaagaatgtgatcaggctgggcacaatggctcacacctgtaatccaagcactttggaaggccgaaacgggaggattgctagaggccaggagttaaagcccagcctgggcaacgtggtgagaccccatctctgcaataaaaattttcgaagttgttggtttattttgagttaatttttgtagatggaacgaggtgaaactcctgcttcattcttttatatgtaaatatccagttgtcccagcaccctttgttgaagagactattctttcctctattaaatgggcttggtgccgggtacggtggctcacgccagtaatcccagcactttgggaggccgaggcgggcagatcatgaggtcaggagatcaagaccaccctggctaacacggtgaaaccccgtctctactaaaaatacaaaaaattagccgggcgtggtggctcgcgcctgtagtcccagctatgcaggaggctgaggcaggagaatggtgtgaacccgggaggcagagcttgcagtgagccgagattgtgccattgcactccagcctaggcaacagagcgagactccatctcaaaaaaaaacaggcttggtgcccttgtcaaaaatcaataaggccaggcgcagtggctcccacctgtaatcccagcactttgggaggccaaggcctttgtattgcgtgagtccagaaatttgagaccagcctgggcaacatagtgagacccccgtctctacaaaaaattaaaaaattggccaggcacagtggctcacacctgtaatcctaacactttgggaggccaaggtgggcagatcatgaggtcaggagatcgagaccatcctggccaacatggtgaaaccccgtctctactaaaaatacaaaacttagctgggcatggtggtgtgcgcctatagtcccagctactcaggaggctgaggcaggagaatcgcttgaatcccagaggcagaggttgtagtgagccaagatcgtgccacagcactctagcctggcaacagagcaagactccatctcaaaaaaaaaaaaaaaaaaaaattagccaggcatggtggcatgtgcctgtagtcccagctactcaggaaattgaggcaggaagattgcttgactctatgagaacaaggctgtagtgagccgtgatcgcaccactgcactccatcctgggtgacagagcgagaccctgtctcaaaaaaaaggaaaaaaagaaaaaaatgtccagctacttgggagactgaggtgagagaatcacctgagctcaggatgtcgaggctacagtgaaccgtgattgcacacaccactgttctccagcctgggctacagaatgagaccctgtctcaccaaagaaaaaaaggaaaaaaaaatcagtgggccaggctgggcatgatggctcacgcctgtaatcacagcactttgggaggccgaggtgggtggatcacctatagttccagctactcaggaggctgaggcacaagaatcggcagaggctgcagtgaatcaagatcgtgccattgcactgcagcctgggcaacagagtgagactctgactcaaaaaaaaaaaaattagtgggccatagatgtttgggtttattactgggctctcaattttattccatgggtctatgtctgtctttatggtaataccacactattctaattataagctttgcagggccaagcgcagtggctcacgcctgtaatcccagtactttgggaggccaaggcgggtggctcacgaggtcaggagatcgagaccatcctggctaacatggtgaaaccccgtctctactaaaaatacaaaaaaattagctgggcgtggtggtgggcacctgtagtcccagctactcaggaggctgaggcaggagaatggcgtgaacccgggaggcagagcttgcagtgagccaagatcgcgccactgcactccagcctgggcgacagagcgagactccgtctcaaacaaacaaacaaaaaaacctttgcaataagttttgaaatcaacctgcatttttcacataacctgaatatctttccacgtcagactgctaaaagcaatcttattccttttagtggttgcacaatggttcattctatggttaaaccacgcagtgatacagtgatattgtgatacagcgatactgaactagccccaggttgatggatatcagattgcctccagtttttttctctcatgctgagtgctgcgttaatcatccaagtgtatatttttgtatatacgtgtgaatattcctgtaagatcagcttttagggctgggtgcactggctcacacctgtaatcccagcactttgagaggtcaaggtaggagaactgcttgagcccagcagtacaagaccagcctgggcaatgtagtcagaccttgtctctactaaaaataaaaagttagcccagcatggtggcgtgcacatgtggtcccagctacttgggaagctgaggtgggaggatggcttgagccccagaggtgtaagctgcaatgagccataattgtgccactgcactccagactgagtgacagagcaagaccctgtctcaaaacaaacaaacaaaaaacttttaggagaggaagtgttgagtcaaagagtggtatgtgttattattaaattgccctccaaaacttacaccagtgaacactcttaacctagtgcttgcttttcaaatcacaaattctcaccttttagtacattgtaggatcagtttggtgggtctcaagtttgtcttggcccatctgagaggcaaaaaatagtacttcgctttcatttacgtatcactaattatgactaattttcagcatcctttcaaggttattgacttttttttttttttgagacagagtctcgctctgtcacccagactggagtgcagtggcacgatctcagttcaccacaacctccgcctcctgggctcaagcgattctcctgcctcagcctcccaagcagctgggattacaggcgcacatcacggctaatattttttatatttttagtagagacagggtttcaccatgttggccaggctggttttgaacacctggcctcaagtgatctgcccgccttagcctcctaaagtgctgggattacaggcatgagccactgcgcccggcgactattttcttttcttttcttttctttttgagacagagtctcgctctgttgcccaggctggagtgcaatggcacgatctcagctcactgcaacctccacttcccaggttcaagtgattatctcacctcagcttcccgagtagctgggattacaggtgcctgccaccacacccggctaatttttgtattttagtagagacagggtttcaccatgttggccaggctggtctcaaactcctgacctcaggtgatccgcctgcctcagcctcccaaagtgctgggattacaggcgtgagccaccacacccagcgactatttgcttttgtgaatttcccatttatatctttttcacactttttcttattgagatgctggtcttttgttgtcgatttatacaaatatttgcatattaaggctcatattatattaaaatggcccagttacttgtttgtctccttgattagattgtgcgctccttggaggaaaggaaggtatcctatcacccttgtatacatggtggctagcttagggaatgaatagcacataataggaattcactgaggagatgtacacttaccatatggcaggctctgtgcaagatgttgagaataaaaagatgaacagaagagaatctttgttctaacaaagcttacagtctggtgcaagcgatagacattcattctcattctgcaggtttattgagcagctgctctgtgccaggtgcataacgcccattggaagagccagcctattaggatgagaaaaatgtcaggactgggacttcgctaacctggtcctgggaaatctgggtgggtcagttccccatccctggttatcagtatccccatcaataaaatgtgagccactggaccaaattctctcatttcccattgagcatccatgcatctgtgctgctttggcttttggaaagtaggagtcagagtcctgagttcaaatattggctctgtgctgggtgtggtggctcacgcctgtaatcacagcactttgggaagccgaggtgggtggatcacctgacgtcaggagtttgagaccagcctggacaacgtagtgaaaccccacctctactaaaaatacaaaattagcctggtgtggtggtgcatgcctgtaatcccagctacttgggaggctgaggcacgagaatcgcttgaacccgggaggcagaggttgcagtgagccaagatcgcaccattgcactccagcctgggcaacaagagcgaaactctgtctcaaaaaaaaaaaaaaaaaaaatatatatatatatatatatatatatatatatatatatatatatatatatatgtaggctctgctacttgttagctgtggccttgggtgtgtgacttagcctttttttttttttttggtgtgggagggatgtggggagggacatggtcttgctttgtcactcaggctgcagtgcagtagtgcaattatggctcacttcagccccaacctccaggctcaagtgatcctcccacctcagcctcccgagtagctgggactacagacgtgcaccaccactcccagataatttattattttttgtagagattgagtctcactacgttgcccaggctggtctcgaactcctgggctcaagggatcctcctgccttggcctctcttgcaggcataagccactgtacctgaccacttagcctcttgaaggaatctttcttataggattaaaagtgatgggaagccaggagcagtgactcacacctctaatcccagcactttgggaggcctaggcaggcggatcacttgaggtcaggagttctagaccagcctggtcaacatggtgaaaccctgtctctactaaaaatacaaagattagctggacatggtggtgcacaactgtagtcccagctactcgggaggctgaggcacaagaatcacttgaacatgggaggcggaggttgcagagagctgagatcgcgctgctgcacttcagcctgggcgacagagcacgactttgtcccccaaaaaataagtaaataaataataaaagtgatgggacctgatttcaagtagtcaaaatcgcagagacagcaaatgggctgggctatgggccagagggtaaagggatgtaattgtttaatgggtacagagttgtcagttttacaagatgaaaacagttcccaaaactgtatacctgtacatagttaagatggtaaagtttatgatatgtgtattttaccaaaattttttaaatgaaaaactttttttttttttttttttttgagacagagtctcgctctgtcgcccaggctggagtgcaatggcgcaatctcggctcactacaatcttcgcctcccgggttcacaacattctcctgcctcagccttccaagcagctgggactataggcacccgccaccatgcctggctaatttttttttcgtatttttagtagagacggggtttcactgtgttagccaggacagtctcgatctcctgacattgtgatccacctgcctcggcctcccaaagtgctgggattacaggtgtgagccaccgcgcccggcctgaaaaacatttttaagtggtgggacgtgtagggctccacggggcacctagcacaggaaagcgtgtggtaaataaaaggtgactgccagggctgttgaggagctgactagggaaggcctgcttcctagaaaaggggtgaggcgcagggcattggagggaggtgtgcctgggaggtcaggagtcctgccttatgcgggaacctggagcagcaccctccctgctttgggcctcctctgtgaagtgaggcgtagtcccctcctggggccagcaggttgctctgtgacctgggccagcaacctcaaagccacgaggggcctggctccttgcgccccctgctggccgactcgggaataacacacccacaagcccccaagttgctcccaaccaacctggccaagttgctgggttaaggcagcctacgtgccccctgtacccttctgctcttggctgagaaccccttatggcttctccctccctccctccctcctaagttcctggaacctaccttcaccacacccataagctcacagacacagacacagagatgtgtgcacatgctcaggtgcaagctcttgtatttggatccttttgttgttttggtttttttttttgtagagaaagggtgttgttatgttgcccaggctagtcttgaacttctgagctcaagcgatctgcccacctcagcctcccaaaatgctgggattacaggtgtgagccaccatgcccagcctccatgaattattattatttatttcatgcatagaaaattgatgttcagagaggtaaaatggcttgcctcatgtcacactgccaaggtcatcaaagcctgtgttctaatccttcccccgtctctcagcactgccctcctccttgtgtgtctacttggggcctgatcctgggtgtggtaatagaacagacctaccctgtggagggtgcaacataacattcacttctggccgggcatggtggctcatgcctgtaatctcagcactttgggaggccgaggcgggcggatcatgaggtcaggagttcaagaccatcctggccaacatggtgaaaccccatctctactaaagacacacaaaaaaattagccgggcatggtagcgcgcgtctgtaatcccagccactcgggaggctgaggcatgagaatcacttgaacctgggaggcggaggttgcagggagccgagatcatgccattgcactccatcctgggtgataaaaagatagggcgagactctgtgtcaaaaaacaaacaaaccaacattgactcctatgcccagtcttacccggccacacataggcccgatgcactgccagtcccctgcaatggaagccgatcctggtttccagccccacccccaaggctgcaagattgtttaagcatatccgtgtgcagcacaggtgccacccagcttcttgacccccatggagccagtgatctggacacacagaaggcaccgcctttcctgagaactggcagtgcccagagaaggcaaggggccaaggctggggcagggcagagaagagggccacagctgggatctgtttctcctgagtttctgccctgtgctggcaccaggtgtacaatctgctataaggcctgcaggagctcaatgtaagtgttgttattttagtatgttaggaatttcctcacctgttaatgagggtgaggatagcacttgctttacagagttgttgaaaggatccagtgacaaaagtattgggacagagtgagtcctagtaaattaaagctggttgtattattaatattattcttggccaagtacagtggctcacatttgtaatcccagcactgggacgctgcggcaggaggatgccttgagcccaggagtttgagacaagcctgggcaacacagtgagaccacatctctacaaaaaatacaaaaattagctcaattcacttgagatgatgaagacatgacttagaatgttgtcacttcaggaaaaaaagactgatttgatggacacagagtccgatgtgggggagagtgtcagagagagaattgacctaccaggcaactgtgggtttttaactcagtggtcagaaagcagtagagtgggtcccggtagggtgaaatccagctcctcctgtagtcctagaagaagtagcaagatgttgggtctaggacaggaaatggctaacctaaagagaccctttggcccaggatggttcccatcccaagacacccctcagtcctgggccagcagatagttggtcttcatagaacaggcagagggcacagagtgcctcccatgaccagccctgggcttgggcctgcccttgggccgctcatccgtttagctgagttacctgagctaaagcaccagactccctcccttgaggtgacaccaaggaatgtccctcctgggatggcagtaacactaccctttgttgctcaaggcacaggtacttagtttcaggggtcagagtacatacttcaggcctctcctgggaaccgctctcaaatctaaggaacgagagggtgagctctggcatcgccttgtgtgttagcccattctcccactgctataaagaactgcgcaagactgggtcatttataaaggaaagagatttaattgactcacagttcctcatggctggggaggcctcaggaaacttaaaatcatggcagaaggggaagcaaacacgttcttcacatggcggcaggagagagaactgctgagcaaagggggaaaagctctttataaaaccatcagctctcatgagaactcactcattatcgccagcacagcagcatgggggtaactgcccccatgattcaattacctcccactgggtccctcccaggacacgtgggaattatgagaactgcaattcaagatgagatttgggtggggacacagctcaaccccatcaccttggatttgattcctaaggctgttgtaacaaactagccacacttcattgtattgcgtttggcagatatcacggtctttgcaaattgaagctttgtgagaaccttgcaccaagcaagtctattgttcccattgttccaacagaatgtgttcccttagggtctgtgtgtaattcccacaatagttcaaactttatcattattattatgtctgacacggtgatctgtgatcagtgatctttgatattactattgtgcttgttttggggaaccacaaaccatgcccatataagatggtaaacttaataaatgcgtgtgggccggaggcagtggctcacaactgtaatcccagcactttgggaggccgaggtgggcagatcacctaaggtcaggagttcgagaccagtctgaccaacatagtgaaaccccatctctactaaaaatacaaaaattagccaggcatggtggaatgcgactgtaatcccagttacttaggctgaggcaggagaatcgcttgaacccaggaggcggagcttgcagtgagccgagattgcgcaactgcactccaccctgggcgacaaagcaagactccgtttcaaaaaaaaaaaaaaaaggctgaacaaactgaaaaaccagcggctctttttcagttcatcagaaaattaggtcacagggtaacctgctgcccccaaactggagaggcagaaaggtagatacagagaatcatgatttgccagagcagaaaccttccctggaatcagcacctgggtgggaaaacctgaactgcaactgacgaatgtctggcagcgtggatgtgtgctgctggttaatgttaggtggcagctggactggagtaaggaatacctagagaatggtgaaacatgacttctgggtgtgtctgtgagggtgtttccagaggagattggcgtgggagtcagtggactgagtggggaagatccgctctcaatgtgggtggcagtatgcaattggttcacggcttgaataaaaacaaaagaggagaaaattttcctctttctgtctctgtctctcctggagctggaagattctccttctcctgccctttggatatcaaaactctaggctcttcagccttggactgagaattatcccagtggcgtccctggttctgaggcttgcagacttggactgagccacgctactggcacctcttgcaaatagtctctcaggggacttctcagcctccattaattgcgtgagtcaatttccctataaatcccctctcatgcactttgggaggccgaggcgggtgggtcacgaggtcaggagatcgagatcatcctggctaacacggtgaaaccctgtctctactaaaaatacaaaaaattagctgggtgtgatggcgggcacctgtagtcccagctacttaggaggctgaggcaggagaatggtgtgaacctgggaggcagagcttgcagtgagccgagatcgcgccactgcgctccagcctgggcaacagagcgagattctgtctcaaaaaaaaaaaaaaatggctgggcaaggtggctcaccagcacgatctcggctcactgcaacctccacctcctgggttcaagcaattctcctgtctcagcctcctgagtagctgggagattacaggcatgcgccaccacacccagctaatttttgtatttttagtagagatggggtttcaccatgttgaccaggctggtctcaaactcctgacctcaggtgatccacccacctcagcctcccaaagtgctgggattacaggcaggagccactgcacccagctgagagtaacttttttttttgttgttgagacggagtctccctctgttgcccaggctggagtgcagtggcgcgatctcagctcactgcaggttcagcctcctgggttcacgacattctcctgcctcagcctcccgagtagctgggactacaggtgcccaccaccacacctggctaatttctgtatttttagtagagacagggtttcgccgtgttagccaggatggtctcgatctcctgacctcgtgatccgcctgccttggcctcccaaaatgctgggattacaggcgtgagtcaccgtgcctggccaagggtaactatttttaagtatgccagagcattcctccaaaatactctttttctttcttttcttttctttgctttttttttttttttgagatggagtcttgttctgtcacccaggctggagtgcaacgcacaatctcagctcactttagcctccaagcaattcccttgcctcagcctcccgagtagctgggattacaggtatgagccaccatgtccagctaatttttgtgttgttagtacagacaggatttcaccgtgttggccagtctggtctcaaactcctgacctcaagtgatctgcccacctcagcctcccgaagtgctggaattataagcgtgagccaccgggcctggcctaaaacattctttttctttttttgttttttgagatggaatttcacttttgttgcccaggctggagtgcaatggtgcagtggctcactgcaacctccgactctcggattcaagtgattctccagtctcagccttccaagtagctgggattacaggtgcatgccatcacgcctggctaatttttgtagttttagtagagatggggtttcatcatattggtcaggctggtctcagactcctgaccttaggtgatctgcccgccttggcctcccaaagtgctgtgattacaggtatgagccaccatgcccgggcttttttttttttttttttttatacatggtctcactctgttgcccaggctggagtgcagtggagcaattttggctcattgcaacctctgcctcctgagctcaagcgattctcgtacctcagcctcctaagtagctgggactacaggtgcatgtgacttcgcccagctaatttttgtatttttggtagagatggggttttgtcgtgttggccaggctggtctcaaactcctgacctcaggtgacccacccacctcagcctcccaaagtgctgggattacagacgtgagccaccgtgcccagccttggctgtttgtgtatcttttttggaaacattcagatttatgatttgcagatatttccttccattccatgggctgtcttttcattttcttaatgggtatccttgaagcacaaaagttcttaattttgatgaggtccagtttattttttcttttgttgtgtatgctttggatgttatgtctagaaccccaaggtcacagagatttattcctatgttttcttctagttttcttgttttagttcatacatttagttttgttttttgtttgtttgtttgttttgagacggagtctcgctgtgtcgcccaggctggagtgcagtggcgtgatctctgctcactgcaagctccgcctcccgggttcacgccattctcctgcctcagcctccagagcagctgggactgcaggtgcccaccaccacgcccagctaattttttgtatttttagtagagacggggtttcactgtgttagccaggatggtcttgatctcctgaccttatgatccgcctgccctggcctcccaaagtgctgggattacaggcgtgagacaccgtccccagcccatacatttagttatgtgattcactttgaattaatttttgtgtatggggcagggcacatggctcacgcatgtaatttcagcactttgggaagctgagtgaagcggtggcctgtccctccacacctgtgggtatctcatcaggtgggacgagagactgagaaaagaagtaagacacagagatgaagtatagagacaacagtgggcccaggagactggcaagcagcatatcaaggacctgcaccagcatcggtttctgagtttcctcactttttattgattattatttttattatctcagcaagaggaatgcagtaggagagcagggtgataataaggagaaggtcagcaaaaaaacatgtgagcaaaagaatctatgtcataattaagttcaaggggaggtactatgcctgcatgtgcacgtaggccggatttatgtttctccccgcccaaacatctcagtggagtaaagaataacaaggcagcattgctgccaacatgtctcgcctcccgccatagggcggtttttctcctatctcagaattgaacaaatgtataatcaggttttataccgagacattcagttcccaggggcaggcaggagacagtggccttcctctatttcaacttcaagaggctttcctcttttactaatctacctcagcacagaccctttacgggtgttgggctgggggacagtcaggtctttctcatcccacaaggccatatttcagattatcacatggggagaaaccttggacaatacgtggctttccaaggcagaggtccgtgcggctttccgcagtgcgttgtgcccctggtttattgagattagagaatggcgatgacttttaccaagcatactgcttgtaaacattttgttaacaaggcatatcctgcacagccctagatcccttaaaccttgattccagacaacacatgtttttgtgagctcaaagttggggcaaagtggctggggcaaagttacaaattaacaacatctcagcaaagcaattgttcaaggtacaggtcaaaatggaatttcttatgtcttccctttctacatagacacagtaacagtctgatctctctttctttgccgtacatatcccccttttctttttgacaaaaccgccatagtcattatggcctgttttcgctggttgctgtctctctggagctgctggatacacctgtagaccagcaacagagaacagacatacaaggattaatacaaaatttgcaatagtggaacttccagtggttttaacccaagtgatggggttaagatttgtgaggccatcagcagctttcaccattgcctcagtttctggcaccagattgaactgggcttttgatgcctcaaaaatttgttattttaattttaaaatatctaaagtaaggttatcttctcttccttgtagatggcgtctaaccatgtcccagtgatgttcagattcattataggctcgaggtgtaatacaaaaatctgacatattccagtcacactgtaactgaaaaagatattctaagctcatgagcctatctctcattcaaatgacagtttgtctacgatcattaatttggtttgccaatttttggtctatttgagtctgagaattccacaattttgaggagttcttttgccaattatttatatattttgtagtttgaacagaggagtgtaaagcaattccagcagccgcagcagtagctgtgactgcaataagacccataatcactgcaattaaagtaaaaaatgaatcttttggatctagttagaactccttttaatacttctgttaaaatatggatggatggggaagcctcccacggtcggtccatggacacagggatccacacaccctctcttgccctcactggcagaatatggtgctgccaatcaaaagttgaatcaatgcaagtaaacaatctacaattttcacaggttatagtttgggaatctggtttaataactatgtttcctacaactagcatataagagggttttacacaactttgcaaaggaattgtcggattggaatttaggttaatagtataatgtggcttatgatttcttgttccgataacttgatttccagaccaaattctaatgtggtgcgaggccacagtaagctttcataatgctggatgttcaggagcagtaacaggactaactaactttggttgaggtgatgaaatccccttttcaccccatttccatggatagggtgattctagccttctataaacctggtctagcctttcagttaaatcactatcataggccggattagtgggccagacagatggggtctgtgaacatgagtgagtctggcccatacaaccataatataattggttttgaggggcccagtctataatagttccaaatttattgttttgtaataccaccacagtatcagccacatatttttcccaaactaagacttctgggtcttttgattctttgggaatttccttgaggcaaggtccccttaggcctaaattttaatgatctttgataagaagagtcctgtaaattattcatttgtgacccaagtgacattccacttaccatatgataagtaaatttattggtggcactgacagtagatacttctaccaaccaattttgggttgtaggcattaagcatcctggtgctttccccaggcaaataggaggataatgatacccagtggaaatgtttatcatcattccttcttcttcaggttgggcagggccgcggtcatctgtgggtcctggtacccatgcactaatattaacacatacttcaatagaatattatccatccaagtgactgcctgaattaagggcgggaaaggcacataggcccagtaagtataattagctgcagctgctcctgcagacatagtgagacttaccaccattgatacaatcattaaagctgcaagcagcatattctctggagtttgtgttacccttgtgtactttaggcttttttcagctaactgtgtcagcttctttagctgggcccaggtcggcggcttcgcttttttggtggatggcaactttttctgtaagttgtaggtacccaaactggaagctgattttctcctggtgaaacacgagcaaaacctctcccccacgttatcaccttctctattttttatgttttatttttgttgtctttttaccaaatcagtttttcctcatgtgggctgttctttttaccagtaaaatgttgttctgcagaagtagcggtctgatttctataaatgttaaaaaaatttaaagtatagagtgctagattaagttgcatctggggagtgttatattccttactgtccttttcctttttttgtttaaccaattgagctttgagtgttctattacttctttcaattatggcctgtccttgggaattataagggatttctgttgtgtgtgtaattttccactgatttaagaatttttgaaatgctttactacagtatcctggcccattatctgttttaattttttatggaactcccatgacagcaaaacaagataataaatgtcttttaacatgggaagtattttctcctgtctggcaggttgcccatatgaaatgtgaataagtatcaactgtcacatggacaaatgacaattttccaaatgaaggtacatgtgtgacatccatttgccataatgcattgggacataaacctctgggattaactcctgcctcctgagtgggcacatgtaggacttgacactgagtacaatgttgtacaacattttttgcctgttttcatatgatatcaaatttattttttagtcctgatgcatttacatgagtcaaggcacgaagtttttatgcttttatgaatgcagatgatactagcaagtcagcttgttcatttgccttagttaaaggccctggtaaattagtatgtgttcgaatatgagtaatataaaatgggaaatttctttttcttacagtttgttgtaacgaattaaacagctgatttaactgatcatccatactatatttgattagggctgtctcaacatcctttgtagcctgtactacatatgcagaatctgaaacaatgttaataggctgattaaaaccttgtaacactgaaatgacagcaaccaactctgctctttgagctgagtgatattgagtttcaatgacttgttcttttggcccagtttaagccacttttccattgctggaacaatcagtaaacgccatcagagcattttctaaaggtttatatctggtaattttaggtaaaatccaagtaatcaattttaagaactggaagatttttgtttttgggtaatgattgtcaataattcccacaaaatcagcaagaccaatctggcatgcagcagaattgataaaagcttgtctaacctgttccttgtttaaaggaacaatgattttatctgggtcacttccacacaattttactatatgtagtcttgcctgaccaattaatgtagccatttgatctaagtacaatgtaaaagtcttagttgtactgtgaggaaggaatgaccactctgcaagatcagtattttgaacaataatgcctgttggagaatgtgcagtagcaaaaatcaaaagttggagtggggctaaatgatctattctatttacttgtgctgaccgaattttttcttcaactaattcaatttctttagttgcttctggagttaatggttttttactgtttaagtctggatcccctctcaagatagaaaacaaatttgacatggcataagtagggatgcctagagttggccgaatccaattaatatgtcttagcaatttttgaaagtcatttaatgttttttaatgtgtcttttcttatttttattttttgtggtttaattttcctttcctctacctgcattcccaaataatggaaaggagtagaggtctgaatcttatcagatgctattgtcagtcctgcgtttgcaacatctgtctgcagaaatgtgtaacagtcaattaatttgtctcttgtttctgcagcacacaaaatatcatcaacataatgaatgacataacaatctgaaaacttgtctctaactggttgaagaacttgagctacaaaagtctgacaaatagttggactgaggcaacactttccactaaaacctggctggttctttattatttacggctggtatagtaaaagcaaatttttcaaaatcctgttttgccagaggaatggtaaaaaagcagtccttcagatcaattataattaaaggccagtctttggggatcatggccagagagggcatcccgggttggagagcacccatgggttgtattatggcattaacagctcttaagtcagtcagcatgcgccatctgcctgattttttctgaattacaaacacaggagaattctaaagagagaaagtgggtgaaacatgtccttttttaaatagttttttaactattttatgtagcgcccccaacttttccttagagagtggccactgtttgacccatacaggacactgcagggcgagtctgaattgctccttcactgtagtgaactgtaggttgggcaataatgagtgccacgagccaagtcgcagtgtgcctagtttcaggctgcctcccccagcactcactcggctgaggaggaggtggccattgtggttgtagccccaatggccccaatgattctggactttttccttttaattttaatgtttcaggatatattacctcctgtaattgattgtagtcaacactttgcgttgactgagccattaccggctctgctacatatttacaatgtgaactttccgttcctttcttgaactctgtctctgcctcttcttcacaatctatcacacagctttcaggggcatcagaaactgaaatgctatcttcttctatttgaaatggttctaaagttgctttaataatggcccaatcattccatactgtaagtgggatgattttaccttccctacttgcttgttttaattccttgccaattttttcccaatcttttaaatctaaagttccttgttctggaaaccatgggcagaattgttctattgtttgaaatagcgtaattagattttctgtagaagctttaactccccctcttcttaagagaattttaatgaagctgagataagaggcatatttactttcagtttgccccattgttaccctggattcctccgagcgcacaagcatactgcaaggctgaccgtggacgtactcgggaatctctcatcagctgtcctcaatactcacgttctcagcataacttcaccctggagaaaggccccatattgggcgtcagatgaaggggtggcctgcccctccatacctgtgggatatctcgtcaggtgggatgagagactgagaaaagaaataagacacagagacaaagtgtagagaaacaacagtgggcccaggagaccggcatgcagcatatcaaggacctgcaccagtaccggtctctgagtttcctcactttttattgattattatttttattatctcagcaagaggaatgcagtaggagagcagggtgataataaggagaagttcagcaaaaaacatgagcaaaagaatctgtcataattaagttcaaggggaggtactatgcctgcatgtgcatgtaggccggatttatgtttctctccacccaaacatctcagtggagtaaagaatagcaggcagcattgctgccaatgtgtctcgcctcccgccatagggtggtttttctcctatctcagaattgaacaaatgtataatcaggttttatactgagacattcagttcccaggggcaggcaggagacagtggccttcctctatctcaacttcatgaggctttcctcttttactaatccacctcagcacagaccctttacaggtgttgggctgggggacggtcaggtctttctcatcccacgaggccatatttcagactatcacatggggagaaacctcggacaatacgcggctttccaaggcagaggtccctgtggctttctgcagtgcattgtgcccctggtttattgagactagagaatggcgatgacttttaccaagcatactgcttgtaaacattttgttaacaaggcatatcctgcacagccctagatcccttaaaccctggttccctacaacacatgtttttgtgagctcaaagttagggcaaagtggctggggcaaagttacaaattaacaacatctcagcaaagcaattgttcaaggtacaggtcaaaatggaatttcttatgtcttccatttctacatagacacagtaacagtctgatctctctttcttttccctacactgaagaaggaggatcgcttgaagtcaggggttcaagaacagcctgggctggccaggcatggtggctcatgcctgcaatcctaacactgtgggaggccgtcatgagcagaacaacttcaggccaggagttcaagaccagcctggccagtatagcaaaaccccatctctaattaaaatacaaaaattagccaggcatggtggcacacacgtataatcccagctactcaggaggctgaggcaggagaatcacttgaacccaggaagtcgaggctgcagtgagctgagaaggcaccactgcactccagcctgggtaacaacgtgagaccctatctcaaaaaaaaaaaaaaaaaaagaagaaaataaaaaatttatatgtgtgtattctgtgagatagaggtccaaattcattcttttcttttcttttctttttttttttttttgagacagagtctcactttgtctcccaggctggagtgcagtggcgtgatctcggctcactgcaacctccatctcccaagttgaagcaattctctgcctcagcctcctgagtagctgggattacaggtgccaaccaccatgcctggctaattttttgtatttttagtacaccatcttggtttcaccatcttggccaggctggtcttgagctcctaacctcatgatcagcctgcctcggcctcccaaagtgctgggattacaggcataagctgccacgcctggccccaaattcattcatttacatgtggatatttagttgtctcagcaccatttgttcatttgttgaaaagattattatttcccaccccccacccccgctttttttttgagccggtgacttgctctgtcacccagcctggagtgcagtggtgtgatctcggctcactgcaacctccgcctcctgggttccagcgattctcctgcctcagcctcctgggtagctgggactacaggcatgtgccaccatgccctgctaattttgtatttttcgtagaaatggggtttcaccatgttgaccaggctggtatcgaactcctgacctcaggtgatccgtccacctcagcctcccaaattgctggaattacaggcatgagccaccatgcctggcctccccacctttttttttgagacagtctcattttgtcgcttaggctggagtacagtggcacgatcttggctcactgcaacctttgcctcccaggttcaagcagttctcctgcctcagcctcacaagtagctgggactacagtcatgtgccaccacacccagctaattttttgtatttttattagagatggggtttcgctggtctcaaactcctgacctcaaatgatcctcccgccttggcctcccaaagtgttcgtgttacaggcatgagccacacccagcctcccaattttttttttttttttttttttgagacagagtctcactctgtcacccaggctggagtgcagtgagtggcgtgatctcggctcactgcatcctccacctcctaagttcaagtgattcttctgcctcagcctcccagtaactgggattacaggtgcacaccaccatgcctggctaatttttgtatttttagtagagacgaggttttagcatgttggccaggctggtcacaaacttctgacctgaagtgatccactcgcctcagcctcccacagtgctgggattacaggcgtgagccaccatgcctggcccccatttgagtttcttagcatcttatcaaatagcaattgtgaccatttatttctggactgtcagttctattcaattgacttatatatctatctttaagcagtatcacactttcttggttcctgtatgtttgcattaagcttccaaattgtgcagtgtgatttcttcaatttttttcttctttttcaggcatttacttttttttttttttttttttttgagacatatctccctctgtcgcccaggctggagtgcagtggtgggatcatggctcactgtagccttgacctctccaggatcaagtgattctcccactttagcttccccagtagctgggactacaggtgtgcaccatcacacctggtcaatttttgtatttttgtagagacggtgtttcagtatgttgcccaggctggtctcaaactcctgggctcaagagatcctcctgctttggcctcccaaagtgctgagtttacaggtgtgagacacattgccctgcttgaatttgttgattgcatctccatggtgttatttaacatgttcttctgtccctgtattttagtcattcaacagtgtgatctaatttagggccacttttacagcaggaataatttgcaggtggtgtatgtgtttccagagtcagaacatgtttggtttatgctcttggtgatattcagggctatcagtgatcctctcctggatcattttttaattagaggtgatttgtgttttgaaagggtcacttgggttgctggggggtgtattgtatatgagtaacagggttcttataaggacggagtcggataatcatgcaacagagcacttggtgctattcctggcacgcaatgaccatattgttgttgttgttgttgttgttgttgttgttattgttagagctgtgtgtgggggacccaagtcctgagctcggaggcattttctggccagggctgtttcctcccttctcccctgcctctggaaaagtctgcagtgccccaaggctctgggaggcatgttcaggactgcagcagccatctctgtgcacctggtggggccccttcagggaaggaaggctggagccccactcacttggttcttgcaccagactgtaagtgccctaaccccaatactctgccacctgcatggcctggggcttctggggtctggctcgttcctggcttcaaagctgtgcatgagccttctctttcagggagccctctttaactgcagcctgtatgtgggcttctcccttgcccctgcttctctagtctagaacttgtagctctgcatctgaatagtcagcttgggcgctgtagggtgctgcttcccatgatcccctgtgcccatcccagaacccagtacctggtagggactcaataaatgtcaactgagccaggcgcggtggggttcctgggccatggaagacctggcacttactcaaatggtcccaaggcccctccaggacaggggggcctggtgttgagattactgtggctgccaccctgaccaggtccttgccagcttctcttctgaccctgggcaggtacctgagcctcttcaagcctcagtgtcctcatctgttagatggagactattgtggcacctctagtgagagtgcagtgggaactgagcgaggtggaactgagcaaaatcctgagccagggttcactattgaccacagcaggtggctgagaagaatgttggatccccagctccacggcccaccagccatctgggactggcaaacccacaggaacggaaggttcctcagggaccacaaagcccatgtgaggtccctgctgctgaagggattctgaggacaggaggagccaaattacctatccagggtcacccagccaaggtgggttaggacctgagtttggtggctctcaggtctggccaatttctttctttctttttttttttttttttttttttttggtagagtcttgctcgttgggtcgggcaggagtgcagtggctggcacgatcttggcccactgcaatctccatctcccaggttcaagtgattctcaggcctcagcctcctgagtagctgggattacaggcatgtgtcatgacgcccagataagtttctttgtttgtttttcccagactgagtttcactctaatgctcaggctggagtgcagtggtgtgctcttgcctcactgcaatgtctgcctcccaggttcaagtgattcttgtgcctcagcctcccaagtagctgggataacaggtgcgtgctaccacgcccagctaatttttgtatttttagtagagatgggggtttcaccatgttggccaggctggtctcgaactcctgacctcaggtgatctgcccgcctcagcctcccaaagtgctgggattacaggcgtgagccactgtgcccagcccctggccagtttctgcacaccagtggctgaggagggagctggcctgggaggaacaccgggaggggaggggcgagccaggagccaggaccccgggaccctccgaggagcggattagtgcctccctcagagttaggacatggccttgggtccaacaggcctaagtctgagtgtgtgtgttgtgtggccttaaacacatcactccccctcctgcaccctccagcctctgttttccaccttctgttttctcattgataagataggcctgaccaggtcattcagggaatgaaatggaagtgcttagcaagacctctgtaagtggaggctgctgctgtcactgttgccattatcctccctctccgctccacccacctcctgctcctcttctttaaccctcagcccttcctgagtcagactttaacctggccaagtcagggctctgtctcaggacgcatggagccagggctggaagtctccactgggcaggcgccaggcagcccctgcaggttggggaggtggaggctgctggagtcaagaggaaccaggtgagggtgttggagcataacaggcttgggaggcaggcagaaacctgcccttctgcaaactctatctcttccccctcctgggagcagacaggatggcgctgtggcctgaaagcagctgtccctcctgtgtgcaagctcggactgctgcacccagacagattccatctctgaccttccacttgttcgtctccagctcgccatggccaaacagctgcaggcccgaaggctagacgggatcgactacaacccctggtgagccagctgggctggggaggtgtgtgggtgtcccctcgggcatgggttggccatccctgggtttacagcaactcagtagtactccagatggtggcggtacacagactgccagattccagccatagctcaggagagacagggcccgagggagtaggcttggttcaaatctcagctttcttctgcatgactgtgccactaggacaggtgacatacctgctctgagcctcatctccccagctgcaaaatgaagagttatacccacctggagagcgttggggaggaaaaagtaaaatgctgtccaaagccattctacccaggcaccaagctaaggcctttccagggatgactctttctcacttggtatagagtcagataaactaagataagtaaaataagcaagtaagatacagtcagctcttcaccagacatttgcagaggttgatattgttttcttttttgacttgttttattttcattttatttttgagacggagttttgcccttgtcgcccaggctggagtgcaatggtgcggtctcggctcactgcaacctctgcctcctgggttcaaatgattctcctgcttcagcctccaagtagctgggattacaggcgtgcaacacaacgcccagctaattttttttctttttcttttcccccgcaagacagaatcttactctgtcacccaggctggagtgcagtggcatgatctcggctcactgcaacctccccctcacaggttcaagcaattctcctgcctcagcctcccaagtagctgggattacaggcgtgcgccaccacgcccagctaattttttttttttttttgtatttttagtagagatgagatttcaccatgtttgccaggctggtctcgaactcctgacctcgtgatccacccgcctcagcctcccaaagtactgggattacaggcatgagccactgtgcctggccctaatttttatatctttagagaaaatggggtttcagcatgttgtccaggctggtctcaaactcctgacctcaagggatctgccctcctcggccttccaaagtgctggggaatacaggcataagccaccgggcccagccaaaaatgacacattttagacatatttattggtatgcaaattcaactcagccaggtcttcactctgctccaaactagccccaaaccacataccagcctcttcatccagcttcccagcctttctcccacctggagaggtggcccccaggcagggccagaacagaggattatgggtccagagatgatgtgtgcctgggctggtggggccctgttctgcccagagtagggtcaagagcatcaaactttgcttgagatggaagtagaaaggctggctggctgtgccttgtactagctgggaggctttaggcaagtcactccactccttatccccacagtggtccaggaacaagatgtgcctcacaggccattgtgaaggctatatgagcagagcgtttaactgtggtgttgacgaatccaaggaggagtcatgcaatctgtacagggggtctcaactagtatttggaaagaatagagtaggataggacaggacagaaaatactgcagtagattgcaccaagaaggatgaagcttccattccatgtttgtgctccacagggttgatgatgcaaaggtgatttcttggccggtagtggtggctcacgcctgtactgctagcactttgagaggccaaggggggcggtggatcacctgaggtcaggagttcgagaccagcctggccaacatagcaaaaccccatctgtactaaaaatacaaaaattagctgggcgtggtggcgggtgcctgtaatcccagctactcaggaggctgaggcatgagaatcgcttgacctcgggaggcggaggttgcagtgagttgagattgcaccactgcactccagcctaggggatagagcgaaactctgtcaaaaaaaaaaaaaaaagatgatttcttcctatgggtcatggtggaagaacttggaaagcccctgggctgattcctgcgattaacaatgtgcctgactgacctaatctcaatgtaggggaccagctgtgacacttaggcagatcttcaggccaggacagttgctgattgtctagtttttgtttttcttgtgtgtgtatgtgtgtgttttttgttttttgtttttgtttttttaagacagaatctcactcttgttatccaggctgcagtgcaatggtgcgatctcggctcacttcaacctccggttcccgggttcaagtgattcttctgcctcagccttccaagtagctgggattacaggcccctgccaccatgcctgactaacttttgtatttttagtgaagacagagtttcaccatgttggccaggctggtctcaaactcctgacctcaggtgatccgcccacctcggcctcccaaagtgctgggattacaggcgtgagccaccacacctggccggttgtccagtttttctaaacaggccgaagtccaggtcaccatggagggctgggctggtgctgattctccatttgttacccagggtggagtttgtgaaactggccagtgagcatgacgtcgtgaacttgggccagggcttcccggatttcccaccaccagactttgccgtggaagcctttcagcacgctgtcagtggagacttcatgcttaaccagtacaccaagacatttgtgagtctccccatctctcgtggaggcactgggggaggaaggggacagggctttctggacttcaagcccacacagctgtcaggcttcaggggacagagccaggggattctgtatgaccatagttcagtgtttactgagcgtatcctctgtcccagagccttcgcctcgtggtctagtggggatggcagacaagaagccagtaacgacaggcagttgatacatgatgtgatggaggaggatgggatatcgtgcgagtaagaaagagggaatgaaacctggggagggggctggagagatgcacgaagacttcctggaggaggtgacacttaaaccaagtcctgaaagatgagctactggttggattacacaataaatccaaacgttttccggaaaggaccacatagtaaatatgtgacactgcttggattagaacagtggttctttttttctttttcttttttgagacaaggtctcactctgttatccaggctggagtgcaatggtgcgatcatggtccactgcagccttgaccctgccagtctcaagtggtcctcccacctcagcctctggagtaactgggactacaggtgtgcatcaccatgcccagctaattttatttatatatttatttatttatttttgagtcagggtctcactcctgtcacctaggctagagtgtagtgacatgatcacggctcactgcagcctgtacctcatggggctcacatgatatgccatttcctggggctcatgtgatcctcccacctcagcctctagagttgctgggacaacaggggcatgccacctcacccagctaatttagagacagggtttcaccatgttgctcagactggtctgaaactcctgggctcaagtgatcctgccacctcggcctccaaaagtgctgggattacaggcgtgagccactgaaccctcattctttttttttttttttttttgagatggagtctccctctgtcgccaggctggagtgcaggggcgcaatctcggctcactgcaacctccccctcccaggttcaagagattctcctgcctcagcctcccgagtagctgggactataggggtgcgcccccacgcccagctaatttttgttttgttttttttttaagacagtctcgcactgtcgccccggctggagtctggagtgcagcggcacgatctcggctcactgcaacctccgcctccgcctccgcctccgcctcctgggttcaagccattctcctgcctcagcctcttgagtagttgggattacaggcgcccgccaccatgcccagctaatttttgtatttttagtagagacggggtttcaccatgttggccaggctggtctcaaactcccgacctcgtgattcgcctgcctcggcctcccaaagtgctgggattacaggcgtgagccaccgcacctggccattttttgtatttttagtggatactgggtttcaccatgttagtccggttggtctcgatctcttgacctcgtgatccacccacctcagcctcccagagtgctgggattacaggcgtgagccaccgcacccgaccgcactcgttctttttaatggctgcatactgttctgttgcctggatgtgccataatttatttaagcagttctgcactgatggactgcttctgctatctcaatatcataagcaatgccacagcaaatatccctgtgtggacatctttgtatacatatgtatttctctaagataaattcctggaggtaaaactagcaaaagaaagactataaatatttataaatacaataggtggatattgttaagaaacagtgtgtgcctataatcccagctacttgggagtctgaggcaggaagattgtttgagcccaggagtttgaggccagtgcaacatagtgagatcctgtctgaaaaataaacaaacaactaagtaaataattgccctccagtaaggtttactcatttacatccctgccaataggctggtctcagagctggttggaaagttccttctttgatccaaaaaaaaaaaaaatcatttgggtatgtatctttttcttttctttctttctttcttttttttttcttttaactagagacaaaagctgggtatggtggctcacgcctataatcccagcattctgggaggctaaggctggcagatcacctgaggtcaggagttcaagaccagcctgcccaacatggtgagatcccatctctaataaaaattagctgggcgtggtggtgggtgcctgtaatcccaactacttgggaggctgaggcacaagaatcgcttgaacccgggaggcggaggttgcagtgggccgaggtggtgccattgcactccagcctgggtgacaacaacaacaacaacaacaaaatagagacagggtctccttatgttacccaggctggtctcaaactcctgggctcaagcaatcctcccaccttagcctcccaaagtgctgggttacaggcatgagccactgtgcccagcctcattaaatattttacctctttcttgtatgttgcaatatttttctcttcctgttttgaccttgctcatggtgccttttatttttatttaattaattaatttattgtctaagacagagtctcagttttattacccagactggtgtgatcataactcacttcagccttgatctcctgggctcaagcaatcctcctgcctcagcctcccgagtacctgggactacaggcacgtgatactacacctggataatttttttgattttccatcagtagagacagagtccctctgtgttgcccaggctgttctcaaactcctggcctcaagcaaccctcccgcctcatactcccaaatgctaggattacaggcgtgagccacggtgcctggcctgtgcctcttgttgtacagaaaatttttatatttgtgtggccaaatctggtttagtgagttactgagttgagttctagataaagtttcaatcacttggcttagccttgagtatttttgttttgttttgtttgtttttgttttttttgagacggagtctcgctctgtcgcccaggctggagtgcagtggcgcgatctcggctcactgcaagctccgcctcccgggttcacgccattcttctgcctcagcctcccgagtagagctgggactacaggtgcccgccaccatgccagctaattttttgtatttttagtagagacggggtttcaccttgagtattttataagtgtcctcagcaaacaagtttctggatctaatcttcctctcaaaaaggggtgcttacaaagctgcaacatgaggttcctgactgtcaactgtgtgtgactttagacaagtaatttcttctctctgggtctctatttttctacctgtcaaatagtgggcatcaggccaggcacggtggctcacatctgtaatcccagcactttgggaggccaaagcaggcagattacccaaggtcagaagttcgaaaccagtctggccaacatggtgaaaccccgtctccactaaaaatacaaaaattaaccaggcatggtggtgcgtgcctgtagtcccagctacttgggaggctgaggcaggagaatcacttgaacccaggaggcggaggttgcagggagccgcgattgtgccactgcactccagcctgggtgacatgagtgagaccctgtctcaaaataaataaataaataaataaataaataaataaataaataaaagcctctcccgcaaagctgctgggaggatcaagtgggcacaaacatgcttcttaaacttacagatgtggaaagtggggagtttctactgccttgtgggctcttggactgaggttcatggaggcaagcacttcctctggttctctgctaaatccccgccctgggcttcgggcctggcacagaacaggccctgtggcaaatgctggtggaggagatggaagagcttagcactggatatctgagtcagtgcaggcctggtggttggcaccctggagtctgggaccatatagattgtgtgacctttacctcccagagtacacaggatcacaatagcacctgcctctgggttgttgagaggatgagatcaaagaaatcccacaaatagcttggtgtgtagaggaatccagagtgttgaaagctgatctattccacgtcccctggggcccaggctaccagtacctgactttgcccccaggcctgctgctggaaggtgctagaattgcctggatacagctgggccggaggatgggcccaggctgagctggacagttaacccctgctgtcctggcagggttacccaccactgacgaagatcctggcaagtttctttggggagctgctgggtcaggagatagacccgctcaggaatgtgctggtgactgttggtggctatggggccctgttcacagccttccaggccctggtggacgaaggagacgaggtgagtgggcaagacttgggctgagtgggactgagaggtcagggccatgctgactccagctgatttgacccttatatcaggtcatcatcatcgaacccttttttgactgctacgagcccatgacaatgatggcagggggtcgtcctgtgtttgtgtccctgaagccggtaaggatgctaggtagaggatggatgggcagagggatccaaggcgtgggctgagttggaccctgggagttggaaaaggaggaaagaagtgaaggaagccagttcctctaagctgggagggcagaggggaggtgtgtgtgttgggatcccaggggagagaaggtggggatagatgctggggaagacctgcatgtcaggtggttaagtggtaccaccccatgccacctgctcttgcagggtcccatccagaatggagaactgggttccagcagcaactggcagctggaccccatggagctggccggcaaattcacatcacgcaccaaagccctggtcctcaacacccccaacaaccccctgggcaaggtactggagggacctccttccctggccccctgcggacctggtcatgtctcctgcactgttactgagttgctgctgtggggcctccgtttcttcgtttgtgtgtgggagggccacacacaatgagcactgaggaccaagactccagaggtcccaggacaggggcaagaatccccagggaaggcctgagggctgggacagtgaactgggctgggagccaccatcacttcccagtgaccctggaatagtgactatgcctctcgaagtatctcatctgtaatgtgggaacctgagggaactgacctcatggtcagtgttgcagggatccaatgtgatggtgcagaacagcccttagcactgggcttggctgtattcgccatttatttatttttttgagacggagtctcgctctgtctcccaggctggagtgcagtggtgtgatcttggctcattgcaacctctgcctcctgggttcaagcaattctcctgcctcagcctcccgagtagctgggattacaggcacccgccaccatgcccagctaatttttgtgtttttagtagagacggggtttctccatgttggccaggctggtcttaaactcctgacctccagtgttccgcccgcctcggcctcccaaagtgctaggattacaggcgtgagccaccgcacctggccgcagctgtgttctttaacctctctgagtaggcctctgtgtttggggacggtcccagctgcaggtctgtgctctccttgggcatctgcaggtgttctccagggaagagctggagctggtggccagcctttgccagcagcatgacgtggtgtgtatcactgatgaagtctaccagtggatggtctacgacgggcaccagcacatcagcattggtgagccaagccagcctggggcccctcccctgcacattggtgggagggccttgaccccacctgagagtcagcgcaggcctggtagttagaacccagggttatggagccctgcagatcctgtgacctttgcctcccagagtacacagtgtcacagtagcacctgcctccctggttgtcgaaaggatgaggtcaaagaaatcctatgccgagcatggtgggtcacacctgtaatcccagcactttgggaggctgaggctggcagatcacttgaggtcaggagtttgagaccagcctggccaacatggtgaaaccctgtctgtactaaaagtacaaaaattagctgggcatggtggcacgtgcctgtagtcccagctactcaggaagctgaggtaggaggatcactggaacctgggaggcggaggttgcagtgaggcaagatggcgccattgcattcctgcctgggcaacagagcgagactccatctcaaaaaaaaaaaaaacaaagaaagaaatggggggtggagggagggagggagagagagagagagagaaagaaggaaggaaggaaaggaaaggaagaaagaaagaaaaaaaattgtgcaaataacttagtatgtagaggaatccagggtgtcaaaagcctatgcgtgtcccctggggcccagaccaccatcctcccccgtccccctcaccccagtctcagcagctgttctgttcggccttgggcagccagcctccctggcatgtgggaacggaccctgaccatcggcagcgccggcaagaccttcagcgcc

SEQ ID NO: 15650 - DNA, 49095 bp, Homo sapiens
cccgctctcgcctccgcgctagcgccctgctgcttcggggcggaagtagcggagccgggctcggcccccttaaagggacagggactgctgcaacctacggggtgtacttgggaacgaggggtgaagcggcccaggtgagggtgagtagctgtgtcggagcgccacttccccaaggtcaggtgccgaggctgggagggtcggctaacggttccgagcttggttgtgctagagtgcttaatgagtttgatgctactaagtataacggagtggctgcacagaatgattgagccgcccgcgggaatcaactgcgcgtgctgctcgctgattctcgctcggacactggggctggtcctgtctgcacccaaatccccctcccacgaccgcgccggtggagatgatacccgagacaacagaattctggacagatctggggttggaattgggtccccagactccaactctgcagctccataaatcccgctgggtcctcgcaaattccctggctgataacagtaccggcaaccaaattaaaaaataatccatacagtggaatactgtgcagccattaagacgaacaatgtttaatatgcactaatgtagggtgacttctaagataccttaggttaaaaaaggaaacaacagtaaaaacagcgttgggccggttgcggtggctcacgtctgtaatcccagcactttgggaggccgaggcgggcggatcacgaggtcaggagatcgagaccatcctggctaacttggtgaaacctcatctctactaaaaatacaaaaaaatcagccgggcgtggtggtgggcgcctgtagtcccagctactctggaggctgaggcaggagaatggcatgaactcgggaggtggagcttgcagtgagccgagatcgcgccgctgcactccagcctgggcgacagagcgagactccgtctaaaaaaagaaaaaacagcgttgatgggtgctatccatctttgcgtagaaggacgcctgagggtgggcgtatctgcgggtgtgcgcgccagctgtctgataagatgcacaagaagttgttaattgcggttgtctccgacagaattggggtcttgggtacctgggccagggcgagaaatttactaccatgtgcacagatagataattaaaaataagatgatgaagatagtcgtggctcccatccatcacgtgttaagccaatgcctagtttcacttctgttgggaggtcttatttttcccttttaatagaagagaaaagaaccttagagaggttaggaaacttagcaatatcatagccagggccgggcgcggtggttcacacctgtaatcccagcactttgggaggctgaggcgggcggatcacgaggtcagtagatcgagaccatcctggctaacacggtgaaaccccgtctctactaaaaatacaaaaaaattagccgggtgtggtggcgagcgcctgtggtcccagctactcgggaggctgaggcaggagaatggcatgaacctgggaggcagagcttgcagtgagctgagattgggccactgcacttcagcctgggcaacagagcaagactccgtctaaaaaaaaaaaaaaatcatagccaggaagtggagaagctggaatttgaaccctgggagatttacactaatgcccatgatctagcttatccctcgccactgagatgctttttctgttgtcagtcacgcaacacccgtcttggggcctggcacacaacaggcatccagtaactatttattgacatgatgtgtggtgtgaaaagcaaacgttgaaggtcagagcccaggcttaaagtccagggcttgggcacctctttccaacctgtggactgtgggcctgccaggtactccgtgggcctccatgtccccgcctgtaaaatgaacaaccagaaccacagttgtagacagtgaatgttcccacgtattatactttgtattttacacgcagataagtctcattttacagataagtgaggcacagagagattaagaaagttgccagaagggggttcctacaggtctccctccctccctaggaaggctgctgggctcccaggcctctcccttagcttcccaggatcatctgtgctaatgcctgggggacctactctgtgctgggtgagctgccagaggctgaggatctggtggagaacaggtcaagcacatagttcctgtccttggagttgagcgcccccgtgctgagtactttgagggcggaagcccaggtcttgggaccacctgggaggggacatgtggcttagcctgggtggagtcagaaggggcttctccaaggaagggactttcaatgtgactggaaactaggatgtccagaaggagaaatgatgaggctggagactcaaggagagatgggctcctaccctggacttggccttggtgtccactaagaaactgagggtgaccaacaggattggagaatatacaagttagacccattcagtctggcttcagcaggaatctttcctcccggagaatgcctccattaggtgccaaccaccagaacgccacactaacctctccaagctccaaagagtagggcgcctgattttataatccaggtgggggcgataaaggaatgcaggagccttcacagccatgaggcagtcactgtaactcctgccagaacagacctggggccacatcccactcctggatggcactgccagttccctgcataattcctttttttttttttgagacggagtctcactctgtcgcccaggctggagtgcagtggtgcaatctcggctcactgcaagctccacctcccgggttcactccattctcctgcctcagcctcccaagtagctgggactacaggcacccgccaccacgcctggctaattttttgtatttttagtagagacggggtttcaccgtgttagccaggatggtctctatctcctgaccttgtgatccgcccacctcggcctcccaaagtgctgggattacaggcgtgagccaccgcgcccggcctcccggcataatttttaaaatgctcatcctatgccctcattccccagcttgcagctgggggcctcctggtgcttttctgggacttcgagtaagtcatttcccctctctaagcctcagtttccccacctgtaaagctgatgccacctcctccaaggctcccgcgaggctatctgcctatctgttgtgtgttcctttaatgtatgggagtgagattgtggtttttgaatctgggtcctgtgccaggaggaataagtggtgagatacctactgtttgtgtcactcaggtcttccaccaacccctccagcctgtaaacctgccgtctggactccagaagtcatttctctctcctctgccaattcctaagcccagggggactgtgtctgagtgacgcaattgttagatctcctcagacaggctgttctctccaggaaaacattggctcaacaaattgtcaccaaacatttgtcttcagggaattctgttttttttctatcaaaaaaaatttggattcattatataataagagatttttcattttgcttggttactaattttatggaaagcctggtaggtttaaatgttaatagcttgttgactgggtgtggtggttcatgcctataatcccagtaatttggaaggctgaggtgggactatcgcttgagctcaggagttcgagaccaacctgggcaacgtggtaaaaccccatctctatcaaaaatacaaaaattagctgggtgtggtggcacgtgcctgtggtcccagctactctggaggctgaggtacaagaatcgcttgaaactgggaggcagaggttgcagtgagccgagattgtgccactgcactccagcctgggcgatagagcaagactgtctcaaaaaaaaaaaaaagttaatagcttgttgtcattgacaagtggctgtgagccaggacccacagtatattctctgtggattcttgtcaccttcattgtacagatgaggaagctgagcccccaagaggctgcggcctggcatgaccaaggtcccatagctagtttatggtggagctgggactatttgatccaagtccaaggtttggtcttctgtggttattcatgcactagactggtcttcctgggcatggtatccccagttctgtaccctttctctagaggtgccacgatgtgtgttgtctcagtaactgggagtctcctggcattttaagcccagggatgctaaacatccttcaaggctccagatagctctccccagtgaagaactgactcatctcaaattctaagtgtgcccctattgagaagctccaaaaccgaatgtcataattgacttgagtgatgtgacgtggggccaccctgggaaggcatggtcacctcgcctgcccttgtaagcagccatgcaaggtgaagttggacaagacatggctcctgtccccaaggggctggtggtctcctgtcagccctagcacccgcctgagaggagatttcacgggacagaatttggactttggaaataggcaaaccagggtttgaatcacagctggagctctctaggctgagtgagttttccttgttctccttttgagcaaaatagagtaaataataccatcctaatcagctgtgatgaggattagagaatttagcatggggttgggggagagggtcaggcacaggtaggtgctttctgagttcagcaaagggcctgggtggacacagaagcttcagagaggaggtacaggtggggctaggccctgctagggattttggattggagggtatgccaggcaggggaaacagcttgagtgaagatgggcaacatttattcaaaagcaaagggtggctgggcacagtggttcacacctgtaattccagcaatttgggaggtcaaggcaggcagatcaccagaggccagaagttcaagaccagcctggccaacatggtgaaaccccatctctacaaaaatacaaaaattagccgagcatgatggtgggtgcctgtaatcccagctactcgggaggctgaggtgggagaatcacttgaacccgggaggcagaggttgcagtgagccgagatcgtgccattacactccagcctgggtgaaagagtgagactccatctcaaaaaaataaaaataaaaataaattagctgggcgtggtggcgtgcacctgtaatcccggctacttgggaggctgaggcaggagaatcacttgaacccggcaggtgggggttgcagtgagccaagattgtgccactgcactccagcctgggtgacagagtgaagagagaggctctatctcaagaaaaaaaaaaaaaaaaggccgggtgccgtggctcatgcctgtaatctcagcactttgggaggccgaggcaggcggatcacgaggtcaggagattgagaccatcctggctaacatggtgaaaccctgtctctactaaaaatacaaaaaaaattagcagggcgtggtggcgggcgcctgtagtcccagctactcgggaggctgaggcaggagagtggcgtgaacccgggaggtggagcttccagttagctgagatcacgccactgcactccagcctgggcgacagagccagactctgtctcaaaaacagaaaaaaaaaaaaaaaaaagaacaaaggatgactgggtgtggtgtctcatgcctataatccaagctgtaatcccaggactttaggaggccaagaccagaggatcacttgagcccaggagttcaagaccagcctgggtaacatagggagaccctgtctctatttttttttttttttaaaagcaaagaatttgagctgggggttggggcatgcacttatagtcccagatactcaggcggctgaggcaggaggatcacttgagctcaggagttcaaggctcctaggtgacaaagcgagaccctatctctaaaataaaaaaagagtaaagggagggaaggtggaggctgccaagcctggattccagccggctccaaacgccaggctgaggaggctttggactttgtccagtgtcaccacaggcttctgggcagagctggtccaatgggggttgggggacagtggcatagctgacatcagcccctgggttattgacatcagcccctggaatgcatcagtgatgcattccacgggcccaggggtcatccactgccttcgggtcaagcaaatggccagtagctgcccaggctgatagaggtgtgtgttggaggggggcacaggccactggccctcggcccctggcctggcagcagggaggcctcagatcttagatgcctgagagctaccccagaagggtcctcggcacagctatggtccccatgcctagtggtgctgggcctcctcggtgctgccagatcacctgagctgcctccattgcagcagttatcccacacatttttttttttttttgaagcggagtcttgctctgtcacctggacagctgtcaggctggagtgcagtggctcaatcttggctcacttcaacctctgcctctcaggttcaagtgattctcctgcctcagcctcccgagtagctgggactacaggtgcccaccaccacacccggctaatttttgtatttttgtagagacgcggtttcaccatgttggccaggctggtctcgaactcctgacctcaagtgatctgtctgcctcggcctcccaaagtgctgggattacaggcgtgagccaccacgccagtgagccaaggtcacacagctgcactccggcctgggcgacacagcaggactccatctcaaaaacaaaaaccaaaaaaaaaaaaaaaacaaaaaaaaacaaattgaacataaatggaataatggaagaaatagctagctgtggggatggcaactctgcagctgttcacagtttgggaaacctgagatctgcatccagagaaacttcttgaaggcaaacttatcaacataaatgaggaaagtggttctaaagaaaaagataatgacccagaggaaataataccagcaaaacttcacattaaaggaactccctgggctgagcgcagtggctcacgcctgtaatcccagcactttgggaggccgaggtgggcagatcacttgaggtcaggagttcgagaccagcctggccaacatggtgaaaccccatccctactaaaaatacaaaaataagtcgggcatggtggtgcgtgcctgtaatcccagctactcaggaggctgaggcaggagaatcgtttgaacctgggaggcagagattggagtgagccgagatcacgccactgcactccagcctgagtgacagagcgagactccgtctcaaaaaaaaaaaaaaaaaaaaggcaggattatctcaccacaaaatgtacagaacaggaactcccagagatatttcacaacattgaaaacaaaggatgactaaggatgactcgtattcatcaagacatagaagatgtcaggtgcagtggcttacacctgtaatcccagcactttgggaggctaaggcaggatgattgcttgatgccaggagttcaacatcagcctaagcaacatagtaaaacccccatctttacaaaaaaaaaaaaatagctgagcatggtggttcgtgcttattgtctcagcaactcaggagaatgaggtgggaggatttcctgagcccggtaggttgaggctgcagtgagccgagatcacaccactgcactccagccttggcaacaaacatagaagaaatgctcattctgtatcctaaattaaaccactggaagactgcagcactgttcagttcagaatattctttttttttttttggaatgaagtttcatttttgttgcccaggctggagcgcagtggcgtgatctcggctcactgcaacctctgcctcctgggttcaagcgattctcccgtctcagcctcctgagtagctgggatcacaggcgcccgccaccacgcctggctaatttttgtgtatttaatagagacggggtttcaccatgttgaccaggctggtcttgaacttctgacctcaggtgatccacccgcctcggcttcccaaagtgctggggttacaggtgtgaaccaccacgcccggcctcagaatattctttttttttttttttttgagacggagatttgctctgtcacccgggctggagtgcagtggtgcaatctctgctcactgcaacctctgcctcccaggttgaagcgattctcctgcctcagccttccgtgtagctgggattacaggtgtgcatcaccatgcccggctaattttttgtatttgtatttaattttttttttctttttgagatggagtctcgctctgtggagtgcagtgccgctcactgcaacctctatctctcgggttcaagcgattctcctgcctcagcctcccaagtagctgggatgggattacaggcacctgccactacacccagctaattttttttgtaattttagtagagacgggatttcaccatgttggccagcctggtctcaaactcctgacctcaaatgatctgcctgcctaccggcctcccaaagtgctgggattacaggagtgagccatcgcgcctggcccaagctatttgcaataaaattttttccttgataaacttttataacgaaagaaaacgtcttaattttcagtgttgctaatattaaattacagtgtactaagttcttattagttttttttttttttcattttctatacttttttatttttaaatgacagagtctcactttgttgcccaggctagtctccaattcccgggctccagtcatcctcttgccttggcctcccaaagtcctgggactacaggcatgagccaccacacctgggctacatttttaacagatggtaagagagttttaaaaggtcacagaacaattgtcttattaattattattatccaataataattttctcgattattaagttctctttgcacaatttaagtttacatggtcttttttttttttttttttttaaatggagtctcactctgtcacccaggctggagtgcagtagtgcgatcctggctcactagaatctttgcctcccgggttcaagcaattctcctgcctcagcctccgaagtagctgcgattacaggcacatgccaccatgcccggctaattttttttgtattttcagtagggacggggtttcatcatgttgaccaggctggtttcaaactcctgacctcaagtgatctgcctgcctcggcctcccaaagttctaggattacaggcctgagccaccacgtctggccaacatggtctttttttttcttttgagacggagtctcgctctgtcacccaggctagagtgcaaacggtgcgatcttggctcactgcaacctccgcctcccgagttcaagctggtctcctgtctcagcctcccgagtagccgggattacaggtgagtgccaccattcctagctactttttgtattttattagagacgggctttcaccatgttagccaggctggtctcgaactcctgacctcaggtgatccgcccacctcggcctcccaaagtgctgggattacaggcatgagccactgcgcctggcctcaacatggtctttttctgttttgctttgttttgttttttttgagtcggagtctcgctctgtcacccaggctggagtgcagtggcacaatcttggctcactgcagtctccacctcccaggttcatgccattctcctgcctcagcctcccgagtagctgggactacaggtgcacgccaccacgcctggctaattttttgtatttttagtagagacagggtttcaccgtgttagccaggatggtctcaatctcctgacctcgtgatccacccacctcagcctcccaaagtgctgggattacaggtgtgagccaccatgcccagccaattcaacatggtcttttttttttttttttttttgagacagagtttcgctcttgttgcccaggctgccgtgcagtggcacgatctcagctcactgcaacctccgcctcccagttcaagtgattctcctgccccagcctccggagtagctgggactacaggcgtgtgccactatgcccagctaatttttgtattttttttagtagagacaggctttcaccatgttggccaggatggtcttgatctcttgacctcatgatccacccgcctcagcctcccaaagtgctgggattacaggcatgagccaccacgcccagccaacatggtcatttttataatgccacactactgtggaaagtaaagactacctgaatatgtatgtgtatgtgtatatgtatatatatgtatgcatcctcacatatgtatctccacaattgattttgtttattttttgagacaggatctcactctgtcacccaggctggaatgcagtgctgtgattatggctcactgctgcctcgactgcctgggctcaagcaatactcccagctgagcctcctgagtagctgggaccacaggcatgcaccaccacacccagctaatttttaaaaaattatttgtagagacaaggtcttgttatgttgcccaggctggtctggaaatcctgagctccagtcctcctgcctcggcctctcaaagtgctgatattacaggtgtgagccacctttccaggtgtgagccaccacatccagctttctctacaattaaaaaaaatgcaaatagagttatattgttcttcaacctgccctttttgtttgtttttgtttgttttgttttgttttgttttaagacaaggtctcactctgtctcccaagctggagtacagtggcacaatcttggctcactgcagcctcaaccttctgggctcaagcaatcctcccacttcagcttcccgagtagctgggactacagacacgtaccaccgtggccagctaattttttgcattttttgtagagatgggatttcaccatgttgcccaggctgatctcgaactcctgagctcaagcaatctacccgcctttgcctcctgaagtgctgagattacaggtgtgagtcaccgcggccagcctgtctctacaatttaaaaaatgtaaatgggttatattgttcttcaacccttttaaaaaattaccatacttttttttttttttttgtaattgaggtgaaattcacctaacatacaagtaactattttaaggtatacaattcagtggcatttagtgcattcacaatgttgtacaaacattatgtcactgtagtttcaaaactttatcgttcccttaggaaaacactccgtacccatcaaatagtcactccccattacctcctccctgtcctctggttaccactcatctgctttctgtctctatagacttgttattctgaatatttcacagaaaaggaatcatagctatgtgaccttttttgtccggcttctttcacttagtgtgttttgtttgtttgtttgtgacagggtcttgctctgttgtccagactggagtgcagtgtcatgacctcagctcactgcaatctccacttcccaggctcaagcgatcctcccacctcagccatcttattatctgggactacaggcacacaccaccatgcctggctgatttttgtattttttgtagaaacaaggttttgccgtgtttcccaggctggtgtcaaacaatgatcctcccacgtcagccttccaaagtgcagagattatagtcatcagccatgtcgccctggcctcacttaatatatttttgaggttcatctaagttacagcatgtgtcagcacatatttcattccattttgtggctgaataatattccatggtacagatatgttacaatttatccattcatccattgatggacaatttgggtttttttcacctgttggctatgatgaatactgttgatataaacatttgtgtacatgtttctgtgtggacatatgttttcagttcttttgggtatatacctaggagtgaaattgctaggttgtaaggtacttctatatttggacttcataaaaattaaaaagttttgtgtaccaaagaacattatctgccgggcccgggtaattgcagcactttgggaggctgaggcggggggatcacctgaggtcaggatttcaagaccagcctggccaacatggcgaaaccctgtctccactaaaaatacaaaaattagctgggcgtagtggcgaacacctgtagtcccagctactcgggaggctgaggcaggagaatcgcttgaacccaggaggcagaggttgcagtgagctaagatcacgcctctgcactctagcctgggcaacagagtgagactctgtctcaaaaaaaaaaaaaaagtacattatcaagaatgtgatcaggctgggcacaatggctcacacctgtaatccaagcactttggaaggccgaaacgggaggattgctagaggccaggagttaaagcccagcctgggcaacgtggtgagaccccatctctgcaataaaaattttcgaagttgttggtttattttgagttaatttttgtagatggaacgaggtgaaactcctgcttcattcttttatatgtaaatatccagttgtcccagcaccctttgttgaagagactattctttcctctattaaatgggcttggtgccgggtacggtggctcacgccagtaatcccagcactttgggaggccgaggcgggcagatcatgaggtcaggagatcaagaccaccctggctaacacggtgaaaccccgtctctactaaaaatacaaaaaattagccgggcgtggtggctcgcgcctgtagtcccagctatgcaggaggctgaggcaggagaatggtgtgaacccgggaggcagagcttgcagtgagccgagattgtgccattgcactccagcctaggcaacagagcgagactccatctcaaaaaaaaacaggcttggtgcccttgtcaaaaatcaataaggccaggcgcagtggctcccacctgtaatcccagcactttgggaggccaaggcctttgtattgcgtgagtccagaaatttgagaccagcctgggcaacatagtgagacccccgtctctacaaaaaattaaaaaattggccaggcacagtggctcacacctgtaatcctaacactttgggaggccaaggtgggcagatcatgaggtcaggagatcgagaccatcctggccaacatggtgaaaccccgtctctactaaaaatacaaaacttagctgggcatggtggtgtgcgcctatagtcccagctactcaggaggctgaggcaggagaatcgcttgaatcccagaggcagaggttgtagtgagccaagatcgtgccacagcactctagcctggcaacagagcaagactccatctcaaaaaaaaaaaaaaaaaaaaattagccaggcatggtggcatgtgcctgtagtcccagctactcaggaaattgaggcaggaagattgcttgactctatgagaacaaggctgtagtgagccgtgatcgcaccactgcactccatcctgggtgacagagcgagaccctgtctcaaaaaaaaggaaaaaaagaaaaaaatgtccagctacttgggagactgaggtgagagaatcacctgagctcaggatgtcgaggctacagtgaaccgtgattgcacacaccactgttctccagcctgggctacagaatgagaccctgtctcaccaaagaaaaaaaggaaaaaaaaatcagtgggccaggctgggcatgatggctcacgcctgtaatcacagcactttgggaggccgaggtgggtggatcacctatagttccagctactcaggaggctgaggcacaagaatcggcagaggctgcagtgaatcaagatcgtgccattgcactgcagcctgggcaacagagtgagactctgactcaaaaaaaaaaaaattagtgggccatagatgtttgggtttattactgggctctcaattttattccatgggtctatgtctgtctttatggtaataccacactattctaattataagctttgcagggccaagcgcagtggctcacgcctgtaatcccagtactttgggaggccaaggcgggtggctcacgaggtcaggagatcgagaccatcctggctaacatggtgaaaccccgtctctactaaaaatacaaaaaaattagctgggcgtggtggtgggcacctgtagtcccagctactcaggaggctgaggcaggagaatggcgtgaacccgggaggcagagcttgcagtgagccaagatcgcgccactgcactccagcctgggcgacagagcgagactccgtctcaaacaaacaaacaaaaaaacctttgcaataagttttgaaatcaacctgcatttttcacataacctgaatatctttccacgtcagactgctaaaagcaatcttattccttttagtggttgcacaatggttcattctatggttaaaccacgcagtgatacagtgatattgtgatacagcgatactgaactagccccaggttgatggatatcagattgcctccagtttttttctctcatgctgagtgctgcgttaatcatccaagtgtatatttttgtatatacgtgtgaatattcctgtaagatcagcttttagggctgggtgcactggctcacacctgtaatcccagcactttgagaggtcaaggtaggagaactgcttgagcccagcagtacaagaccagcctgggcaatgtagtcagaccttgtctctactaaaaataaaaagttagcccagcatggtggcgtgcacatgtggtcccagctacttgggaagctgaggtgggaggatggcttgagccccagaggtgtaagctgcaatgagccataattgtgccactgcactccagactgagtgacagagcaagaccctgtctcaaaacaaacaaacaaaaaacttttaggagaggaagtgttgagtcaaagagtggtatgtgttattattaaattgccctccaaaacttacaccagtgaacactcttaacctagtgcttgcttttcaaatcacaaattctcaccttttagtacattgtaggatcagtttggtgggtctcaagtttgtcttggcccatctgagaggcaaaaaatagtacttcgctttcatttacgtatcactaattatgactaattttcagcatcctttcaaggttattgacttttttttttttttgagacagagtctcgctctgtcacccagactggagtgcagtggcacgatctcagttcaccacaacctccgcctcctgggctcaagcgattctcctgcctcagcctcccaagcagctgggattacaggcgcacatcacggctaatattttttatatttttagtagagacagggtttcaccatgttggccaggctggttttgaacacctggcctcaagtgatctgcccgccttagcctcctaaagtgctgggattacaggcatgagccactgcgcccggcgactattttcttttcttttcttttctttttgagacagagtctcgctctgttgcccaggctggagtgcaatggcacgatctcagctcactgcaacctccacttcccaggttcaagtgattatctcacctcagcttcccgagtagctgggattacaggtgcctgccaccacacccggctaatttttgtattttagtagagacagggtttcaccatgttggccaggctggtctcaaactcctgacctcaggtgatccgcctgcctcagcctcccaaagtgctgggattacaggcgtgagccaccacacccagcgactatttgcttttgtgaatttcccatttatatctttttcacactttttcttattgagatgctggtcttttgttgtcgatttatacaaatatttgcatattaaggctcatattatattaaaatggcccagttacttgtttgtctccttgattagattgtgcgctccttggaggaaaggaaggtatcctatcacccttgtatacatggtggctagcttagggaatgaatagcacataataggaattcactgaggagatgtacacttaccatatggcaggctctgtgcaagatgttgagaataaaaagatgaacagaagagaatctttgttctaacaaagcttacagtctggtgcaagcgatagacattcattctcattctgcaggtttattgagcagctgctctgtgccaggtgcataacgcccattggaagagccagcctattaggatgagaaaaatgtcaggactgggacttcgctaacctggtcctgggaaatctgggtgggtcagttccccatccctggttatcagtatccccatcaataaaatgtgagccactggaccaaattctctcatttcccattgagcatccatgcatctgtgctgctttggcttttggaaagtaggagtcagagtcctgagttcaaatattggctctgtgctgggtgtggtggctcacgcctgtaatcacagcactttgggaagccgaggtgggtggatcacctgacgtcaggagtttgagaccagcctggacaacgtagtgaaaccccacctctactaaaaatacaaaattagcctggtgtggtggtgcatgcctgtaatcccagctacttgggaggctgaggcacgagaatcgcttgaacccgggaggcagaggttgcagtgagccaagatcgcaccattgcactccagcctgggcaacaagagcgaaactctgtctcaaaaaaaaaaaaaaaaaaaatatatatatatatatatatatatatatatatatatatatatatatatatatgtaggctctgctacttgttagctgtggccttgggtgtgtgacttagcctttttttttttttttggtgtgggagggatgtggggagggacatggtcttgctttgtcactcaggctgcagtgcagtagtgcaattatggctcacttcagccccaacctccaggctcaagtgatcctcccacctcagcctcccgagtagctgggactacagacgtgcaccaccactcccagataatttattattttttgtagagattgagtctcactacgttgcccaggctggtctcgaactcctgggctcaagggatcctcctgccttggcctctcttgcaggcataagccactgtacctgaccacttagcctcttgaaggaatctttcttataggattaaaagtgatgggaagccaggagcagtgactcacacctctaatcccagcactttgggaggcctaggcaggcggatcacttgaggtcaggagttctagaccagcctggtcaacatggtgaaaccctgtctctactaaaaatacaaagattagctggacatggtggtgcacaactgtagtcccagctactcgggaggctgaggcacaagaatcacttgaacatgggaggcggaggttgcagagagctgagatcgcgctgctgcacttcagcctgggcgacagagcacgactttgtcccccaaaaaataagtaaataaataataaaagtgatgggacctgatttcaagtagtcaaaatcgcagagacagcaaatgggctgggctatgggccagagggtaaagggatgtaattgtttaatgggtacagagttgtcagttttacaagatgaaaacagttcccaaaactgtatacctgtacatagttaagatggtaaagtttatgatatgtgtattttaccaaaattttttaaatgaaaaactttttttttttttttttttttgagacagagtctcgctctgtcgcccaggctggagtgcaatggcgcaatctcggctcactacaatcttcgcctcccgggttcacaacattctcctgcctcagccttccaagcagctgggactataggcacccgccaccatgcctggctaatttttttttcgtatttttagtagagacggggtttcactgtgttagccaggacagtctcgatctcctgacattgtgatccacctgcctcggcctcccaaagtgctgggattacaggtgtgagccaccgcgcccggcctgaaaaacatttttaagtggtgggacgtgtagggctccacggggcacctagcacaggaaagcgtgtggtaaataaaaggtgactgccagggctgttgaggagctgactagggaaggcctgcttcctagaaaaggggtgaggcgcagggcattggagggaggtgtgcctgggaggtcaggagtcctgccttatgcgggaacctggagcagcaccctccctgctttgggcctcctctgtgaagtgaggcgtagtcccctcctggggccagcaggttgctctgtgacctgggccagcaacctcaaagccacgaggggcctggctccttgcgccccctgctggccgactcgggaataacacacccacaagcccccaagttgctcccaaccaacctggccaagttgctgggttaaggcagcctacgtgccccctgtacccttctgctcttggctgagaaccccttatggcttctccctccctccctccctcctaagttcctggaacctaccttcaccacacccataagctcacagacacagacacagagatgtgtgcacatgctcaggtgcaagctcttgtatttggatccttttgttgttttggtttttttttttgtagagaaagggtgttgttatgttgcccaggctagtcttgaacttctgagctcaagcgatctgcccacctcagcctcccaaaatgctgggattacaggtgtgagccaccatgcccagcctccatgaattattattatttatttcatgcatagaaaattgatgttcagagaggtaaaatggcttgcctcatgtcacactgccaaggtcatcaaagcctgtgttctaatccttcccccgtctctcagcactgccctcctccttgtgtgtctacttggggcctgatcctgggtgtggtaatagaacagacctaccctgtggagggtgcaacataacattcacttctggccgggcatggtggctcatgcctgtaatctcagcactttgggaggccgaggcgggcggatcatgaggtcaggagttcaagaccatcctggccaacatggtgaaaccccatctctactaaagacacacaaaaaaattagccgggcatggtagcgcgcgtctgtaatcccagccactcgggaggctgaggcatgagaatcacttgaacctgggaggcggaggttgcagggagccgagatcatgccattgcactccatcctgggtgataaaaagatagggcgagactctgtgtcaaaaaacaaacaaaccaacattgactcctatgcccagtcttacccggccacacataggcccgatgcactgccagtcccctgcaatggaagccgatcctggtttccagccccacccccaaggctgcaagattgtttaagcatatccgtgtgcagcacaggtgccacccagcttcttgacccccatggagccagtgatctggacacacagaaggcaccgcctttcctgagaactggcagtgcccagagaaggcaaggggccaaggctggggcagggcagagaagagggccacagctgggatctgtttctcctgagtttctgccctgtgctggcaccaggtgtacaatctgctataaggcctgcaggagctcaatgtaagtgttgttattttagtatgttaggaatttcctcacctgttaatgagggtgaggatagcacttgctttacagagttgttgaaaggatccagtgacaaaagtattgggacagagtgagtcctagtaaattaaagctggttgtattattaatattattcttggccaagtacagtggctcacatttgtaatcccagcactgggacgctgcggcaggaggatgccttgagcccaggagtttgagacaagcctgggcaacacagtgagaccacatctctacaaaaaatacaaaaattagctcaattcacttgagatgatgaagacatgacttagaatgttgtcacttcaggaaaaaaagactgatttgatggacacagagtccgatgtgggggagagtgtcagagagagaattgacctaccaggcaactgtgggtttttaactcagtggtcagaaagcagtagagtgggtcccggtagggtgaaatccagctcctcctgtagtcctagaagaagtagcaagatgttgggtctaggacaggaaatggctaacctaaagagaccctttggcccaggatggttcccatcccaagacacccctcagtcctgggccagcagatagttggtcttcatagaacaggcagagggcacagagtgcctcccatgaccagccctgggcttgggcctgcccttgggccgctcatccgtttagctgagttacctgagctaaagcaccagactccctcccttgaggtgacaccaaggaatgtccctcctgggatggcagtaacactaccctttgttgctcaaggcacaggtacttagtttcaggggtcagagtacatacttcaggcctctcctgggaaccgctctcaaatctaaggaacgagagggtgagctctggcatcgccttgtgtgttagcccattctcccactgctataaagaactgcgcaagactgggtcatttataaaggaaagagatttaattgactcacagttcctcatggctggggaggcctcaggaaacttaaaatcatggcagaaggggaagcaaacacgttcttcacatggcggcaggagagagaactgctgagcaaagggggaaaagctctttataaaaccatcagctctcatgagaactcactcattatcgccagcacagcagcatgggggtaactgcccccatgattcaattacctcccactgggtccctcccaggacacgtgggaattatgagaactgcaattcaagatgagatttgggtggggacacagctcaaccccatcaccttggatttgattcctaaggctgttgtaacaaactagccacacttcattgtattgcgtttggcagatatcacggtctttgcaaattgaagctttgtgagaaccttgcaccaagcaagtctattgttcccattgttccaacagaatgtgttcccttagggtctgtgtgtaattcccacaatagttcaaactttatcattattattatgtctgacacggtgatctgtgatcagtgatctttgatattactattgtgcttgttttggggaaccacaaaccatgcccatataagatggtaaacttaataaatgcgtgtgggccggaggcagtggctcacaactgtaatcccagcactttgggaggccgaggtgggcagatcacctaaggtcaggagttcgagaccagtctgaccaacatagtgaaaccccatctctactaaaaatacaaaaattagccaggcatggtggaatgcgactgtaatcccagttacttaggctgaggcaggagaatcgcttgaacccaggaggcggagcttgcagtgagccgagattgcgcaactgcactccaccctgggcgacaaagcaagactccgtttcaaaaaaaaaaaaaaaaggctgaacaaactgaaaaaccagcggctctttttcagttcatcagaaaattaggtcacagggtaacctgctgcccccaaactggagaggcagaaaggtagatacagagaatcatgatttgccagagcagaaaccttccctggaatcagcacctgggtgggaaaacctgaactgcaactgacgaatgtctggcagcgtggatgtgtgctgctggttaatgttaggtggcagctggactggagtaaggaatacctagagaatggtgaaacatgacttctgggtgtgtctgtgagggtgtttccagaggagattggcgtgggagtcagtggactgagtggggaagatccgctctcaatgtgggtggcagtatgcaattggttcacggcttgaataaaaacaaaagaggagaaaattttcctctttctgtctctgtctctcctggagctggaagattctccttctcctgccctttggatatcaaaactctaggctcttcagccttggactgagaattatcccagtggcgtccctggttctgaggcttgcagacttggactgagccacgctactggcacctcttgcaaatagtctctcaggggacttctcagcctccattaattgcgtgagtcaatttccctataaatcccctctcatgcactttgggaggccgaggcgggtgggtcacgaggtcaggagatcgagatcatcctggctaacacggtgaaaccctgtctctactaaaaatacaaaaaattagctgggtgtgatggcgggcacctgtagtcccagctacttaggaggctgaggcaggagaatggtgtgaacctgggaggcagagcttgcagtgagccgagatcgcgccactgcgctccagcctgggcaacagagcgagattctgtctcaaaaaaaaaaaaaaatggctgggcaaggtggctcaccagcacgatctcggctcactgcaacctccacctcctgggttcaagcaattctcctgtctcagcctcctgagtagctgggagattacaggcatgcgccaccacacccagctaatttttgtatttttagtagagatggggtttcaccatgttgaccaggctggtctcaaactcctgacctcaggtgatccacccacctcagcctcccaaagtgctgggattacaggcaggagccactgcacccagctgagagtaacttttttttttgttgttgagacggagtctccctctgttgcccaggctggagtgcagtggcgcgatctcagctcactgcaggttcagcctcctgggttcacgacattctcctgcctcagcctcccgagtagctgggactacaggtgcccaccaccacacctggctaatttctgtatttttagtagagacagggtttcgccgtgttagccaggatggtctcgatctcctgacctcgtgatccgcctgccttggcctcccaaaatgctgggattacaggcgtgagtcaccgtgcctggccaagggtaactatttttaagtatgccagagcattcctccaaaatactctttttctttcttttcttttctttgctttttttttttttttgagatggagtcttgttctgtcacccaggctggagtgcaacgcacaatctcagctcactttagcctccaagcaattcccttgcctcagcctcccgagtagctgggattacaggtatgagccaccatgtccagctaatttttgtgttgttagtacagacaggatttcaccgtgttggccagtctggtctcaaactcctgacctcaagtgatctgcccacctcagcctcccgaagtgctggaattataagcgtgagccaccgggcctggcctaaaacattctttttctttttttgttttttgagatggaatttcacttttgttgcccaggctggagtgcaatggtgcagtggctcactgcaacctccgactctcggattcaagtgattctccagtctcagccttccaagtagctgggattacaggtgcatgccatcacgcctggctaatttttgtagttttagtagagatggggtttcatcatattggtcaggctggtctcagactcctgaccttaggtgatctgcccgccttggcctcccaaagtgctgtgattacaggtatgagccaccatgcccgggcttttttttttttttttttttatacatggtctcactctgttgcccaggctggagtgcagtggagcaattttggctcattgcaacctctgcctcctgagctcaagcgattctcgtacctcagcctcctaagtagctgggactacaggtgcatgtgacttcgcccagctaatttttgtatttttggtagagatggggttttgtcgtgttggccaggctggtctcaaactcctgacctcaggtgacccacccacctcagcctcccaaagtgctgggattacagacgtgagccaccgtgcccagccttggctgtttgtgtatcttttttggaaacattcagatttatgatttgcagatatttccttccattccatgggctgtcttttcattttcttaatgggtatccttgaagcacaaaagttcttaattttgatgaggtccagtttattttttcttttgttgtgtatgctttggatgttatgtctagaaccccaaggtcacagagatttattcctatgttttcttctagttttcttgttttagttcatacatttagttttgttttttgtttgtttgtttgttttgagacggagtctcgctgtgtcgcccaggctggagtgcagtggcgtgatctctgctcactgcaagctccgcctcccgggttcacgccattctcctgcctcagcctccagagcagctgggactgcaggtgcccaccaccacgcccagctaattttttgtatttttagtagagacggggtttcactgtgttagccaggatggtcttgatctcctgaccttatgatccgcctgccctggcctcccaaagtgctgggattacaggcgtgagacaccgtccccagcccatacatttagttatgtgattcactttgaattaatttttgtgtatggggcagggcacatggctcacgcatgtaatttcagcactttgggaagctgagtgaagcggtggcctgtccctccacacctgtgggtatctcatcaggtgggacgagagactgagaaaagaagtaagacacagagatgaagtatagagacaacagtgggcccaggagactggcaagcagcatatcaaggacctgcaccagcatcggtttctgagtttcctcactttttattgattattatttttattatctcagcaagaggaatgcagtaggagagcagggtgataataaggagaaggtcagcaaaaaaacatgtgagcaaaagaatctatgtcataattaagttcaaggggaggtactatgcctgcatgtgcacgtaggccggatttatgtttctccccgcccaaacatctcagtggagtaaagaataacaaggcagcattgctgccaacatgtctcgcctcccgccatagggcggtttttctcctatctcagaattgaacaaatgtataatcaggttttataccgagacattcagttcccaggggcaggcaggagacagtggccttcctctatttcaacttcaagaggctttcctcttttactaatctacctcagcacagaccctttacgggtgttgggctgggggacagtcaggtctttctcatcccacaaggccatatttcagattatcacatggggagaaaccttggacaatacgtggctttccaaggcagaggtccgtgcggctttccgcagtgcgttgtgcccctggtttattgagattagagaatggcgatgacttttaccaagcatactgcttgtaaacattttgttaacaaggcatatcctgcacagccctagatcccttaaaccttgattccagacaacacatgtttttgtgagctcaaagttggggcaaagtggctggggcaaagttacaaattaacaacatctcagcaaagcaattgttcaaggtacaggtcaaaatggaatttcttatgtcttccctttctacatagacacagtaacagtctgatctctctttctttgccgtacatatcccccttttctttttgacaaaaccgccatagtcattatggcctgttttcgctggttgctgtctctctggagctgctggatacacctgtagaccagcaacagagaacagacatacaaggattaatacaaaatttgcaatagtggaacttccagtggttttaacccaagtgatggggttaagatttgtgaggccatcagcagctttcaccattgcctcagtttctggcaccagattgaactgggcttttgatgcctcaaaaatttgttattttaattttaaaatatctaaagtaaggttatcttctcttccttgtagatggcgtctaaccatgtcccagtgatgttcagattcattataggctcgaggtgtaatacaaaaatctgacatattccagtcacactgtaactgaaaaagatattctaagctcatgagcctatctctcattcaaatgacagtttgtctacgatcattaatttggtttgccaatttttggtctatttgagtctgagaattccacaattttgaggagttcttttgccaattatttatatattttgtagtttgaacagaggagtgtaaagcaattccagcagccgcagcagtagctgtgactgcaataagacccataatcactgcaattaaagtaaaaaatgaatcttttggatctagttagaactccttttaatacttctgttaaaatatggatggatggggaagcctcccacggtcggtccatggacacagggatccacacaccctctcttgccctcactggcagaatatggtgctgccaatcaaaagttgaatcaatgcaagtaaacaatctacaattttcacaggttatagtttgggaatctggtttaataactatgtttcctacaactagcatataagagggttttacacaactttgcaaaggaattgtcggattggaatttaggttaatagtataatgtggcttatgatttcttgttccgataacttgatttccagaccaaattctaatgtggtgcgaggccacagtaagctttcataatgctggatgttcaggagcagtaacaggactaactaactttggttgaggtgatgaaatccccttttcaccccatttccatggatagggtgattctagccttctataaacctggtctagcctttcagttaaatcactatcataggccggattagtgggccagacagatggggtctgtgaacatgagtgagtctggcccatacaaccataatataattggttttgaggggcccagtctataatagttccaaatttattgttttgtaataccaccacagtatcagccacatatttttcccaaactaagacttctgggtcttttgattctttgggaatttccttgaggcaaggtccccttaggcctaaattttaatgatctttgataagaagagtcctgtaaattattcatttgtgacccaagtgacattccacttaccatatgataagtaaatttattggtggcactgacagtagatacttctaccaaccaattttgggttgtaggcattaagcatcctggtgctttccccaggcaaataggaggataatgatacccagtggaaatgtttatcatcattccttcttcttcaggttgggcagggccgcggtcatctgtgggtcctggtacccatgcactaatattaacacatacttcaatagaatattatccatccaagtgactgcctgaattaagggcgggaaaggcacataggcccagtaagtataattagctgcagctgctcctgcagacatagtgagacttaccaccattgatacaatcattaaagctgcaagcagcatattctctggagtttgtgttacccttgtgtactttaggcttttttcagctaactgtgtcagcttctttagctgggcccaggtcggcggcttcgcttttttggtggatggcaactttttctgtaagttgtaggtacccaaactggaagctgattttctcctggtgaaacacgagcaaaacctctcccccacgttatcaccttctctattttttatgttttatttttgttgtctttttaccaaatcagtttttcctcatgtgggctgttctttttaccagtaaaatgttgttctgcagaagtagcggtctgatttctataaatgttaaaaaaatttaaagtatagagtgctagattaagttgcatctggggagtgttatattccttactgtccttttcctttttttgtttaaccaattgagctttgagtgttctattacttctttcaattatggcctgtccttgggaattataagggatttctgttgtgtgtgtaattttccactgatttaagaatttttgaaatgctttactacagtatcctggcccattatctgttttaattttttatggaactcccatgacagcaaaacaagataataaatgtcttttaacatgggaagtattttctcctgtctggcaggttgcccatatgaaatgtgaataagtatcaactgtcacatggacaaatgacaattttccaaatgaaggtacatgtgtgacatccatttgccataatgcattgggacataaacctctgggattaactcctgcctcctgagtgggcacatgtaggacttgacactgagtacaatgttgtacaacattttttgcctgttttcatatgatatcaaatttattttttagtcctgatgcatttacatgagtcaaggcacgaagtttttatgcttttatgaatgcagatgatactagcaagtcagcttgttcatttgccttagttaaaggccctggtaaattagtatgtgttcgaatatgagtaatataaaatgggaaatttctttttcttacagtttgttgtaacgaattaaacagctgatttaactgatcatccatactatatttgattagggctgtctcaacatcctttgtagcctgtactacatatgcagaatctgaaacaatgttaataggctgattaaaaccttgtaacactgaaatgacagcaaccaactctgctctttgagctgagtgatattgagtttcaatgacttgttcttttggcccagtttaagccacttttccattgctggaacaatcagtaaacgccatcagagcattttctaaaggtttatatctggtaattttaggtaaaatccaagtaatcaattttaagaactggaagatttttgtttttgggtaatgattgtcaataattcccacaaaatcagcaagaccaatctggcatgcagcagaattgataaaagcttgtctaacctgttccttgtttaaaggaacaatgattttatctgggtcacttccacacaattttactatatgtagtcttgcctgaccaattaatgtagccatttgatctaagtacaatgtaaaagtcttagttgtactgtgaggaaggaatgaccactctgcaagatcagtattttgaacaataatgcctgttggagaatgtgcagtagcaaaaatcaaaagttggagtggggctaaatgatctattctatttacttgtgctgaccgaattttttcttcaactaattcaatttctttagttgcttctggagttaatggttttttactgtttaagtctggatcccctctcaagatagaaaacaaatttgacatggcataagtagggatgcctagagttggccgaatccaattaatatgtcttagcaatttttgaaagtcatttaatgttttttaatgtgtcttttcttatttttattttttgtggtttaattttcctttcctctacctgcattcccaaataatggaaaggagtagaggtctgaatcttatcagatgctattgtcagtcctgcgtttgcaacatctgtctgcagaaatgtgtaacagtcaattaatttgtctcttgtttctgcagcacacaaaatatcatcaacataatgaatgacataacaatctgaaaacttgtctctaactggttgaagaacttgagctacaaaagtctgacaaatagttggactgaggcaacactttccactaaaacctggctggttctttattatttacggctggtatagtaaaagcaaatttttcaaaatcctgttttgccagaggaatggtaaaaaagcagtccttcagatcaattataattaaaggccagtctttggggatcatggccagagagggcatcccgggttggagagcacccatgggttgtattatggcattaacagctcttaagtcagtcagcatgcgccatctgcctgattttttctgaattacaaacacaggagaattctaaagagagaaagtgggtgaaacatgtccttttttaaatagttttttaactattttatgtagcgcccccaacttttccttagagagtggccactgtttgacccatacaggacactgcagggcgagtctgaattgctccttcactgtagtgaactgtaggttgggcaataatgagtgccacgagccaagtcgcagtgtgcctagtttcaggctgcctcccccagcactcactcggctgaggaggaggtggccattgtggttgtagccccaatggccccaatgattctggactttttccttttaattttaatgtttcaggatatattacctcctgtaattgattgtagtcaacactttgcgttgactgagccattaccggctctgctacatatttacaatgtgaactttccgttcctttcttgaactctgtctctgcctcttcttcacaatctatcacacagctttcaggggcatcagaaactgaaatgctatcttcttctatttgaaatggttctaaagttgctttaataatggcccaatcattccatactgtaagtgggatgattttaccttccctacttgcttgttttaattccttgccaattttttcccaatcttttaaatctaaagttccttgttctggaaaccatgggcagaattgttctattgtttgaaatagcgtaattagattttctgtagaagctttaactccccctcttcttaagagaattttaatgaagctgagataagaggcatatttactttcagtttgccccattgttaccctggattcctccgagcgcacaagcatactgcaaggctgaccgtggacgtactcgggaatctctcatcagctgtcctcaatactcacgttctcagcataacttcaccctggagaaaggccccatattgggcgtcagatgaaggggtggcctgcccctccatacctgtgggatatctcgtcaggtgggatgagagactgagaaaagaaataagacacagagacaaagtgtagagaaacaacagtgggcccaggagaccggcatgcagcatatcaaggacctgcaccagtaccggtctctgagtttcctcactttttattgattattatttttattatctcagcaagaggaatgcagtaggagagcagggtgataataaggagaagttcagcaaaaaacatgagcaaaagaatctgtcataattaagttcaaggggaggtactatgcctgcatgtgcatgtaggccggatttatgtttctctccacccaaacatctcagtggagtaaagaatagcaggcagcattgctgccaatgtgtctcgcctcccgccatagggtggtttttctcctatctcagaattgaacaaatgtataatcaggttttatactgagacattcagttcccaggggcaggcaggagacagtggccttcctctatctcaacttcatgaggctttcctcttttactaatccacctcagcacagaccctttacaggtgttgggctgggggacggtcaggtctttctcatcccacgaggccatatttcagactatcacatggggagaaacctcggacaatacgcggctttccaaggcagaggtccctgtggctttctgcagtgcattgtgcccctggtttattgagactagagaatggcgatgacttttaccaagcatactgcttgtaaacattttgttaacaaggcatatcctgcacagccctagatcccttaaaccctggttccctacaacacatgtttttgtgagctcaaagttagggcaaagtggctggggcaaagttacaaattaacaacatctcagcaaagcaattgttcaaggtacaggtcaaaatggaatttcttatgtcttccatttctacatagacacagtaacagtctgatctctctttcttttccctacactgaagaaggaggatcgcttgaagtcaggggttcaagaacagcctgggctggccaggcatggtggctcatgcctgcaatcctaacactgtgggaggccgtcatgagcagaacaacttcaggccaggagttcaagaccagcctggccagtatagcaaaaccccatctctaattaaaatacaaaaattagccaggcatggtggcacacacgtataatcccagctactcaggaggctgaggcaggagaatcacttgaacccaggaagtcgaggctgcagtgagctgagaaggcaccactgcactccagcctgggtaacaacgtgagaccctatctcaaaaaaaaaaaaaaaaaaagaagaaaataaaaaatttatatgtgtgtattctgtgagatagaggtccaaattcattcttttcttttcttttctttttttttttttttgagacagagtctcactttgtctcccaggctggagtgcagtggcgtgatctcggctcactgcaacctccatctcccaagttgaagcaattctctgcctcagcctcctgagtagctgggattacaggtgccaaccaccatgcctggctaattttttgtatttttagtacaccatcttggtttcaccatcttggccaggctggtcttgagctcctaacctcatgatcagcctgcctcggcctcccaaagtgctgggattacaggcataagctgccacgcctggccccaaattcattcatttacatgtggatatttagttgtctcagcaccatttgttcatttgttgaaaagattattatttcccaccccccacccccgctttttttttgagccggtgacttgctctgtcacccagcctggagtgcagtggtgtgatctcggctcactgcaacctccgcctcctgggttccagcgattctcctgcctcagcctcctgggtagctgggactacaggcatgtgccaccatgccctgctaattttgtatttttcgtagaaatggggtttcaccatgttgaccaggctggtatcgaactcctgacctcaggtgatccgtccacctcagcctcccaaattgctggaattacaggcatgagccaccatgcctggcctccccacctttttttttgagacagtctcattttgtcgcttaggctggagtacagtggcacgatcttggctcactgcaacctttgcctcccaggttcaagcagttctcctgcctcagcctcacaagtagctgggactacagtcatgtgccaccacacccagctaattttttgtatttttattagagatggggtttcgctggtctcaaactcctgacctcaaatgatcctcccgccttggcctcccaaagtgttcgtgttacaggcatgagccacacccagcctcccaattttttttttttttttttttttgagacagagtctcactctgtcacccaggctggagtgcagtgagtggcgtgatctcggctcactgcatcctccacctcctaagttcaagtgattcttctgcctcagcctcccagtaactgggattacaggtgcacaccaccatgcctggctaatttttgtatttttagtagagacgaggttttagcatgttggccaggctggtcacaaacttctgacctgaagtgatccactcgcctcagcctcccacagtgctgggattacaggcgtgagccaccatgcctggcccccatttgagtttcttagcatcttatcaaatagcaattgtgaccatttatttctggactgtcagttctattcaattgacttatatatctatctttaagcagtatcacactttcttggttcctgtatgtttgcattaagcttccaaattgtgcagtgtgatttcttcaatttttttcttctttttcaggcatttacttttttttttttttttttttttgagacatatctccctctgtcgcccaggctggagtgcagtggtgggatcatggctcactgtagccttgacctctccaggatcaagtgattctcccactttagcttccccagtagctgggactacaggtgtgcaccatcacacctggtcaatttttgtatttttgtagagacggtgtttcagtatgttgcccaggctggtctcaaactcctgggctcaagagatcctcctgctttggcctcccaaagtgctgagtttacaggtgtgagacacattgccctgcttgaatttgttgattgcatctccatggtgttatttaacatgttcttctgtccctgtattttagtcattcaacagtgtgatctaatttagggccacttttacagcaggaataatttgcaggtggtgtatgtgtttccagagtcagaacatgtttggtttatgctcttggtgatattcagggctatcagtgatcctctcctggatcattttttaattagaggtgatttgtgttttgaaagggtcacttgggttgctggggggtgtattgtatatgagtaacagggttcttataaggacggagtcggataatcatgcaacagagcacttggtgctattcctggcacgcaatgaccatattgttgttgttgttgttgttgttgttgttgttattgttagagctgtgtgtgggggacccaagtcctgagctcggaggcattttctggccagggctgtttcctcccttctcccctgcctctggaaaagtctgcagtgccccaaggctctgggaggcatgttcaggactgcagcagccatctctgtgcacctggtggggccccttcagggaaggaaggctggagccccactcacttggttcttgcaccagactgtaagtgccctaaccccaatactctgccacctgcatggcctggggcttctggggtctggctcgttcctggcttcaaagctgtgcatgagccttctctttcagggagccctctttaactgcagcctgtatgtgggcttctcccttgcccctgcttctctagtctagaacttgtagctctgcatctgaatagtcagcttgggcgctgtagggtgctgcttcccatgatcccctgtgcccatcccagaacccagtacctggtagggactcaataaatgtcaactgagccaggcgcggtggggttcctgggccatggaagacctggcacttactcaaatggtcccaaggcccctccaggacaggggggcctggtgttgagattactgtggctgccaccctgaccaggtccttgccagcttctcttctgaccctgggcaggtacctgagcctcttcaagcctcagtgtcctcatctgttagatggagactattgtggcacctctagtgagagtgcagtgggaactgagcgaggtggaactgagcaaaatcctgagccagggttcactattgaccacagcaggtggctgagaagaatgttggatccccagctccacggcccaccagccatctgggactggcaaacccacaggaacggaaggttcctcagggaccacaaagcccatgtgaggtccctgctgctgaagggattctgaggacaggaggagccaaattacctatccagggtcacccagccaaggtgggttaggacctgagtttggtggctctcaggtctggccaatttctttctttctttttttttttttttttttttttttggtagagtcttgctcgttgggtcgggcaggagtgcagtggctggcacgatcttggcccactgcaatctccatctcccaggttcaagtgattctcaggcctcagcctcctgagtagctgggattacaggcatgtgtcatgacgcccagataagtttctttgtttgtttttcccagactgagtttcactctaatgctcaggctggagtgcagtggtgtgctcttgcctcactgcaatgtctgcctcccaggttcaagtgattcttgtgcctcagcctcccaagtagctgggataacaggtgcgtgctaccacgcccagctaatttttgtatttttagtagagatgggggtttcaccatgttggccaggctggtctcgaactcctgacctcaggtgatctgcccgcctcagcctcccaaagtgctgggattacaggcgtgagccactgtgcccagcccctggccagtttctgcacaccagtggctgaggagggagctggcctgggaggaacaccgggaggggaggggcgagccaggagccaggaccccgggaccctccgaggagcggattagtgcctccctcagagttaggacatggccttgggtccaacaggcctaagtctgagtgtgtgtgttgtgtggccttaaacacatcactccccctcctgcaccctccagcctctgttttccaccttctgttttctcattgataagataggcctgaccaggtcattcagggaatgaaatggaagtgcttagcaagacctctgtaagtggaggctgctgctgtcactgttgccattatcctccctctccgctccacccacctcctgctcctcttctttaaccctcagcccttcctgagtcagactttaacctggccaagtcagggctctgtctcaggacgcatggagccagggctggaagtctccactgggcaggcgccaggcagcccctgcaggttggggaggtggaggctgctggagtcaagaggaaccaggtgagggtgttggagcataacaggcttgggaggcaggcagaaacctgcccttctgcaaactctatctcttccccctcctgggagcagacaggatggcgctgtggcctgaaagcagctgtccctcctgtgtgcaagctcggactgctgcacccagacagattccatctctgaccttccacttgttcgtctccagctcgccatggccaaacagctgcaggcccgaaggctagacgggatcgactacaacccctggtgagccagctgggctggggaggtgtgtgggtgtcccctcgggcatgggttggccatccctgggtttacagcaactcagtagtactccagatggtggcggtacacagactgccagattccagccatagctcaggagagacagggcccgagggagtaggcttggttcaaatctcagctttcttctgcatgactgtgccactaggacaggtgacatacctgctctgagcctcatctccccagctgcaaaatgaagagttatacccacctggagagcgttggggaggaaaaagtaaaatgctgtccaaagccattctacccaggcaccaagctaaggcctttccagggatgactctttctcacttggtatagagtcagataaactaagataagtaaaataagcaagtaagatacagtcagctcttcaccagacatttgcagaggttgatattgttttcttttttgacttgttttattttcattttatttttgagacggagttttgcccttgtcgcccaggctggagtgcaatggtgcggtctcggctcactgcaacctctgcctcctgggttcaaatgattctcctgcttcagcctccaagtagctgggattacaggcgtgcaacacaacgcccagctaattttttttctttttcttttcccccgcaagacagaatcttactctgtcacccaggctggagtgcagtggcatgatctcggctcactgcaacctccccctcacaggttcaagcaattctcctgcctcagcctcccaagtagctgggattacaggcgtgcgccaccacgcccagctaattttttttttttttttgtatttttagtagagatgagatttcaccatgtttgccaggctggtctcgaactcctgacctcgtgatccacccgcctcagcctcccaaagtactgggattacaggcatgagccactgtgcctggccctaatttttatatctttagagaaaatggggtttcagcatgttgtccaggctggtctcaaactcctgacctcaagggatctgccctcctcggccttccaaagtgctggggaatacaggcataagccaccgggcccagccaaaaatgacacattttagacatatttattggtatgcaaattcaactcagccaggtcttcactctgctccaaactagccccaaaccacataccagcctcttcatccagcttcccagcctttctcccacctggagaggtggcccccaggcagggccagaacagaggattatgggtccagagatgatgtgtgcctgggctggtggggccctgttctgcccagagtagggtcaagagcatcaaactttgcttgagatggaagtagaaaggctggctggctgtgccttgtactagctgggaggctttaggcaagtcactccactccttatccccacagtggtccaggaacaagatgtgcctcacaggccattgtgaaggctatatgagcagagcgtttaactgtggtgttgacgaatccaaggaggagtcatgcaatctgtacagggggtctcaactagtatttggaaagaatagagtaggataggacaggacagaaaatactgcagtagattgcaccaagaaggatgaagcttccattccatgtttgtgctccacagggttgatgatgcaaaggtgatttcttggccggtagtggtggctcacgcctgtactgctagcactttgagaggccaaggggggcggtggatcacctgaggtcaggagttcgagaccagcctggccaacatagcaaaaccccatctgtactaaaaatacaaaaattagctgggcgtggtggcgggtgcctgtaatcccagctactcaggaggctgaggcatgagaatcgcttgacctcgggaggcggaggttgcagtgagttgagattgcaccactgcactccagcctaggggatagagcgaaactctgtcaaaaaaaaaaaaaaaagatgatttcttcctatgggtcatggtggaagaacttggaaagcccctgggctgattcctgcgattaacaatgtgcctgactgacctaatctcaatgtaggggaccagctgtgacacttaggcagatcttcaggccaggacagttgctgattgtctagtttttgtttttcttgtgtgtgtatgtgtgtgttttttgttttttgtttttgtttttttaagacagaatctcactcttgttatccaggctgcagtgcaatggtgcgatctcggctcacttcaacctccggttcccgggttcaagtgattcttctgcctcagccttccaagtagctgggattacaggcccctgccaccatgcctgactaacttttgtatttttagtgaagacagagtttcaccatgttggccaggctggtctcaaactcctgacctcaggtgatccgcccacctcggcctcccaaagtgctgggattacaggcgtgagccaccacacctggccggttgtccagtttttctaaacaggccgaagtccaggtcaccatggagggctgggctggtgctgattctccatttgttacccagggtggagtttgtgaaactggccagtgagcatgacgtcgtgaacttgggccagggcttcccggatttcccaccaccagactttgccgtggaagcctttcagcacgctgtcagtggagacttcatgcttaaccagtacaccaagacatttgtgagtctccccatctctcgtggaggcactgggggaggaaggggacagggctttctggacttcaagcccacacagctgtcaggcttcaggggacagagccaggggattctgtatgaccatagttcagtgtttactgagcgtatcctctgtcccagagccttcgcctcgtggtctagtggggatggcagacaagaagccagtaacgacaggcagttgatacatgatgtgatggaggaggatgggatatcgtgcgagtaagaaagagggaatgaaacctggggagggggctggagagatgcacgaagacttcctggaggaggtgacacttaaaccaagtcctgaaagatgagctactggttggattacacaataaatccaaacgttttccggaaaggaccacatagtaaatatgtgacactgcttggattagaacagtggttctttttttctttttcttttttgagacaaggtctcactctgttatccaggctggagtgcaatggtgcgatcatggtccactgcagccttgaccctgccagtctcaagtggtcctcccacctcagcctctggagtaactgggactacaggtgtgcatcaccatgcccagctaattttatttatatatttatttatttatttttgagtcagggtctcactcctgtcacctaggctagagtgtagtgacatgatcacggctcactgcagcctgtacctcatggggctcacatgatatgccatttcctggggctcatgtgatcctcccacctcagcctctagagttgctgggacaacaggggcatgccacctcacccagctaatttagagacagggtttcaccatgttgctcagactggtctgaaactcctgggctcaagtgatcctgccacctcggcctccaaaagtgctgggattacaggcgtgagccactgaaccctcattctttttttttttttttttttgagatggagtctccctctgtcgccaggctggagtgcaggggcgcaatctcggctcactgcaacctccccctcccaggttcaagagattctcctgcctcagcctcccgagtagctgggactataggggtgcgcccccacgcccagctaatttttgttttgttttttttttaagacagtctcgcactgtcgccccggctggagtctggagtgcagcggcacgatctcggctcactgcaacctccgcctccgcctccgcctccgcctcctgggttcaagccattctcctgcctcagcctcttgagtagttgggattacaggcgcccgccaccatgcccagctaatttttgtatttttagtagagacggggtttcaccatgttggccaggctggtctcaaactcccgacctcgtgattcgcctgcctcggcctcccaaagtgctgggattacaggcgtgagccaccgcacctggccattttttgtatttttagtggatactgggtttcaccatgttagtccggttggtctcgatctcttgacctcgtgatccacccacctcagcctcccagagtgctgggattacaggcgtgagccaccgcacccgaccgcactcgttctttttaatggctgcatactgttctgttgcctggatgtgccataatttatttaagcagttctgcactgatggactgcttctgctatctcaatatcataagcaatgccacagcaaatatccctgtgtggacatctttgtatacatatgtatttctctaagataaattcctggaggtaaaactagcaaaagaaagactataaatatttataaatacaataggtggatattgttaagaaacagtgtgtgcctataatcccagctacttgggagtctgaggcaggaagattgtttgagcccaggagtttgaggccagtgcaacatagtgagatcctgtctgaaaaataaacaaacaactaagtaaataattgccctccagtaaggtttactcatttacatccctgccaataggctggtctcagagctggttggaaagttccttctttgatccaaaaaaaaaaaaaatcatttgggtatgtatctttttcttttctttctttctttcttttttttttcttttaactagagacaaaagctgggtatggtggctcacgcctataatcccagcattctgggaggctaaggctggcagatcacctgaggtcaggagttcaagaccagcctgcccaacatggtgagatcccatctctaataaaaattagctgggcgtggtggtgggtgcctgtaatcccaactacttgggaggctgaggcacaagaatcgcttgaacccgggaggcggaggttgcagtgggccgaggtggtgccattgcactccagcctgggtgacaacaacaacaacaacaacaaaatagagacagggtctccttatgttacccaggctggtctcaaactcctgggctcaagcaatcctcccaccttagcctcccaaagtgctgggttacaggcatgagccactgtgcccagcctcattaaatattttacctctttcttgtatgttgcaatatttttctcttcctgttttgaccttgctcatggtgccttttatttttatttaattaattaatttattgtctaagacagagtctcagttttattacccagactggtgtgatcataactcacttcagccttgatctcctgggctcaagcaatcctcctgcctcagcctcccgagtacctgggactacaggcacgtgatactacacctggataatttttttgattttccatcagtagagacagagtccctctgtgttgcccaggctgttctcaaactcctggcctcaagcaaccctcccgcctcatactcccaaatgctaggattacaggcgtgagccacggtgcctggcctgtgcctcttgttgtacagaaaatttttatatttgtgtggccaaatctggtttagtgagttactgagttgagttctagataaagtttcaatcacttggcttagccttgagtatttttgttttgttttgtttgtttttgttttttttgagacggagtctcgctctgtcgcccaggctggagtgcagtggcgcgatctcggctcactgcaagctccgcctcccgggttcacgccattcttctgcctcagcctcccgagtagagctgggactacaggtgcccgccaccatgccagctaattttttgtatttttagtagagacggggtttcaccttgagtattttataagtgtcctcagcaaacaagtttctggatctaatcttcctctcaaaaaggggtgcttacaaagctgcaacatgaggttcctgactgtcaactgtgtgtgactttagacaagtaatttcttctctctgggtctctatttttctacctgtcaaatagtgggcatcaggccaggcacggtggctcacatctgtaatcccagcactttgggaggccaaagcaggcagattacccaaggtcagaagttcgaaaccagtctggccaacatggtgaaaccccgtctccactaaaaatacaaaaattaaccaggcatggtggtgcgtgcctgtagtcccagctacttgggaggctgaggcaggagaatcacttgaacccaggaggcggaggttgcagggagccgcgattgtgccactgcactccagcctgggtgacatgagtgagaccctgtctcaaaataaataaataaataaataaataaataaataaataaataaaagcctctcccgcaaagctgctgggaggatcaagtgggcacaaacatgcttcttaaacttacagatgtggaaagtggggagtttctactgccttgtgggctcttggactgaggttcatggaggcaagcacttcctctggttctctgctaaatccccgccctgggcttcgggcctggcacagaacaggccctgtggcaaatgctggtggaggagatggaagagcttagcactggatatctgagtcagtgcaggcctggtggttggcaccctggagtctgggaccatatagattgtgtgacctttacctcccagagtacacaggatcacaatagcacctgcctctgggttgttgagaggatgagatcaaagaaatcccacaaatagcttggtgtgtagaggaatccagagtgttgaaagctgatctattccacgtcccctggggcccaggctaccagtacctgactttgcccccaggcctgctgctggaaggtgctagaattgcctggatacagctgggccggaggatgggcccaggctgagctggacagttaacccctgctgtcctggcagggttacccaccactgacgaagatcctggcaagtttctttggggagctgctgggtcaggagatagacccgctcaggaatgtgctggtgactgttggtggctatggggccctgttcacagccttccaggccctggtggacgaaggagacgaggtgagtgggcaagacttgggctgagtgggactgagaggtcagggccatgctgactccagctgatttgacccttatatcaggtcatcatcatcgaacccttttttgactgctacgagcccatgacaatgatggcagggggtcgtcctgtgtttgtgtccctgaagccggtaaggatgctaggtagaggatggatgggcagagggatccaaggcgtgggctgagttggaccctgggagttggaaaaggaggaaagaagtgaaggaagccagttcctctaagctgggagggcagaggggaggtgtgtgtgttgggatcccaggggagagaaggtggggatagatgctggggaagacctgcatgtcaggtggttaagtggtaccaccccatgccacctgctcttgcagggtcccatccagaatggagaactgggttccagcagcaactggcagctggaccccatggagctggccggcaaattcacatcacgcaccaaagccctggtcctcaacacccccaacaaccccctgggcaaggtactggagggacctccttccctggccccctgcggacctggtcatgtctcctgcactgttactgagttgctgctgtggggcctccgtttcttcgtttgtgtgtgggagggccacacacaatgagcactgaggaccaagactccagaggtcccaggacaggggcaagaatccccagggaaggcctgagggctgggacagtgaactgggctgggagccaccatcacttcccagtgaccctggaatagtgactatgcctctcgaagtatctcatctgtaatgtgggaacctgagggaactgacctcatggtcagtgttgcagggatccaatgtgatggtgcagaacagcccttagcactgggcttggctgtattcgccatttatttatttttttgagacggagtctcgctctgtctcccaggctggagtgcagtggtgtgatcttggctcattgcaacctctgcctcctgggttcaagcaattctcctgcctcagcctcccgagtagctgggattacaggcacccgccaccatgcccagctaatttttgtgtttttagtagagacggggtttctccatgttggccaggctggtcttaaactcctgacctccagtgttccgcccgcctcggcctcccaaagtgctaggattacaggcgtgagccaccgcacctggccgcagctgtgttctttaacctctctgagtaggcctctgtgtttggggacggtcccagctgcaggtctgtgctctccttgggcatctgcaggtgttctccagggaagagctggagctggtggccagcctttgccagcagcatgacgtggtgtgtatcactgatgaagtctaccagtggatggtctacgacgggcaccagcacatcagcattggtgagccaagccagcctggggcccctcccctgcacattggtgggagggccttgaccccacctgagagtcagcgcaggcctggtagttagaacccagggttatggagccctgcagatcctgtgacctttgcctcccagagtacacagtgtcacagtagcacctgcctccctggttgtcgaaaggatgaggtcaaagaaatcctatgccgagcatggtgggtcacacctgtaatcccagcactttgggaggctgaggctggcagatcacttgaggtcaggagtttgagaccagcctggccaacatggtgaaaccctgtctgtactaaaagtacaaaaattagctgggcatggtggcacgtgcctgtagtcccagctactcaggaagctgaggtaggaggatcactggaacctgggaggcggaggttgcagtgaggcaagatggcgccattgcattcctgcctgggcaacagagcgagactccatctcaaaaaaaaaaaaaacaaagaaagaaatggggggtggagggagggagggagagagagagagagagaaagaaggaaggaaggaaaggaaaggaagaaagaaagaaaaaaaattgtgcaaataacttagtatgtagaggaatccagggtgtcaaaagcctatgcgtgtcccctggggcccagaccaccatcctcccccgtccccctcaccccagtctcagcagctgttctgttcggccttgggcagccagcctccctggcatgtgggaacggaccctgaccatcggcagcgccggcaagaccttcagcgccactggctggaaggtgagttgctgagggtgggaggtcaccaccccctgcaagatccttggcaagtgaggtgggcctgagaatgaagaaggctttagccaggtctggaaggacctctccccctacctgcgcccctgctgcaggtgggctgggtcctgggtccagatcacatcatgaagcacctgcggaccgtgcaccagaactccgtcttccactgccccacgcagagccaggtgaagaggggcaggacgtcacgggggagtggggggacaacaaaagagcccaggctggcccccgcgtcagggaacagctgatctatctgtgtgtccatctgccctgcccaggctgcagtagccgagagctttgaacgggagcagctgctcttccgccaacccagcagctactttgtgcagttcccgcaggccatgcagcgctgccgtgaccacatgatacgtagcctacagtcagtgggcctgaagcccatcatccctcagggcagctacttcctcatcacagacatctcagacttcagtgagtgagacttgccggtctgggcagggcgcaggggctggaggctgcagggggctcagtgtggcctctgtctcccagagaggaagatgcctgacttgcctggagctgtggatgagccctatgacagacgcttcgtcaagtggatgatcaagaacaaggtgggctgggcctctgccaggcagccatgtatggtttcacaggttgtgtgctgctcaagggtgcccaggcaagaggctcctgggctagatcttagtccagcctctgccgtcaaccttggggcagggttgtatccacttcagagaatgaggaggctgtttctttttttctttcttttttttttttggttgagatggagtctcactcttgcccaggctggagtgcagtggcgcgatcttggctcactgcaagctctgccccccaggttcacgccattctcctgcctcagcctcccgagtagctgggaccacaggctacttttttttgcccggctaattttttttgtatttttggtagagacggggtttcaccatgttagccaggttggtcttgatctcctgaccttgtaatccacctgcctcggcctcccaaagtgctgggattacaggcgtgagccactgctcctggcctttttttttttttttttttttttgagacagagtctcactctgtcgcctaggtgggagtgcagtggcgcaatctcagcacactgcaacctccacctccagggttcaagcgattctcctcccttagcctcctgagtagttgggtaactgggattacaggcatgtacaaccacgcctggctaatttttgtatttttagtagagacggggtttcaccatgttggtcaggctagtctccaactcctgacctcagatgatccactccccttggcctcccaaagtgctgggattacaggcgtgagccaccgtgcctggcctgaggaacctgtttctaacttgcacagagatgctgtgtgggctggcaggatttcctgcctctttggatctccatcttcccatctgtacagtgaggagttggcccattaactcttgagttcatccaggtttgatctgtgactctaaggctttgttcttctctggctctgccctgacctgctccatgatcctccctctgtcagcctccctctgccctctatacccagggagggacttggaatgatgttctgggattcttttcttctgactttgtgtttgtttttgttttggatggattttctctctttcgcccaggctgcggtgaagtggcgcaatctggctcactgcaacctccacccccgggttcaagcaattctcctgcctcagcctcccaagtagctgggattacaggcatgcgccaccacacccggccaatttttgtatttttggtagagacggggtttagccatgttggccaggctggtcttgaactcctgacctcaggtgatccacccgtctcagcctcccaaagtgctgggattataggcgtgagccaccgcacctggccttgttcctctgactttgatgcagctctaggtgctggattggagctaactctccttccccgcctggtcgtgggaacctctctgtcccctccggagccaaggcctgctgggccacgaggccgtgttgagacatgtccttcctcctccccagggcttggtggccatccctgtctccatcttctatagtgtgccacatcagaagcactttgaccactatatccgcttctgttttgtgaaggtaaagggcagggctgggggaggaaagacctcacagagcttcccaaggccggctgggcacatggggagagtgtaggactaatctgtgctggcgcaggatgaagccacgctccaggccatggacgagaagctgcggaagtggaaggtggaactctagccctgaagtcacgccttggccctgacatccccacatgcccgcagagatcctctttgagtgtctgtctttgtccaggtttcagacatttctaggttggggaagatgctattgggaaacctcttctccgtgacacagaatgttctgggtgggagccgcccttcttcatcttagagaaccaagtgcctcctgtctgaaaggtgagggtggcctgacctgggcctctccctgcccctccataggtgggtttgtagggtcttgtgttgcttctggtctctccaggcttggctgagacggacggtagacttccaccatgtaccgatcacatcccagctctgcatggcccctgctaaggctcaggtataacctcaccttccctggctcatcttggccttggggagttgcctttaggcttgagtcctcaagcctctccttttcgtccataataaaatgtttaagttattaagatccttattgacggcttctctctgcttcacactcatgctgatggctgatctaacttgtgaagaatgcccagaagaacctcagacacccccacaactttgtacaaatggttactgtagtcacatagtggcacaaccaggcctagcacccaaggccctcaaatgaattcctcactattaa

SEQ ID NO: 15651 - DNA, 44195 bp, Homo sapiens
aacctacggggtgtacttgggaacgaggggtgaagcggcccaggtgagggtgagtagctgtgtcggagcgccacttccccaaggtcaggtgccgaggctgggagggtcggctaacggttccgagcttggttgtgctagagtgcttaatgagtttgatgctactaagtataacggagtggctgcacagaatgattgagccgcccgcgggaatcaactgcgcgtgctgctcgctgattctcgctcggacactggggctggtcctgtctgcacccaaatccccctcccacgaccgcgccggtggagatgatacccgagacaacagaattctggacagatctggggttggaattgggtccccagactccaactctgcagctccataaatcccgctgggtcctcgcaaattccctggctgataacagtaccggcaaccaaattaaaaaataatccatacagtggaatactgtgcagccattaagacgaacaatgtttaatatgcactaatgtagggtgacttctaagataccttaggttaaaaaaggaaacaacagtaaaaacagcgttgggccggttgcggtggctcacgtctgtaatcccagcactttgggaggccgaggcgggcggatcacgaggtcaggagatcgagaccatcctggctaacttggtgaaacctcatctctactaaaaatacaaaaaaatcagccgggcgtggtggtgggcgcctgtagtcccagctactctggaggctgaggcaggagaatggcatgaactcgggaggtggagcttgcagtgagccgagatcgcgccgctgcactccagcctgggcgacagagcgagactccgtctaaaaaaagaaaaaacagcgttgatgggtgctatccatctttgcgtagaaggacgcctgagggtgggcgtatctgcgggtgtgcgcgccagctgtctgataagatgcacaagaagttgttaattgcggttgtctccgacagaattggggtcttgggtacctgggccagggcgagaaatttactaccatgtgcacagatagataattaaaaataagatgatgaagatagtcgtggctcccatccatcacgtgttaagccaatgcctagtttcacttctgttgggaggtcttatttttcccttttaatagaagagaaaagaaccttagagaggttaggaaacttagcaatatcatagccagggccgggcgcggtggttcacacctgtaatcccagcactttgggaggctgaggcgggcggatcacgaggtcagtagatcgagaccatcctggctaacacggtgaaaccccgtctctactaaaaatacaaaaaaattagccgggtgtggtggcgagcgcctgtggtcccagctactcgggaggctgaggcaggagaatggcatgaacctgggaggcagagcttgcagtgagctgagattgggccactgcacttcagcctgggcaacagagcaagactccgtctaaaaaaaaaaaaaaatcatagccaggaagtggagaagctggaatttgaaccctgggagatttacactaatgcccatgatctagcttatccctcgccactgagatgctttttctgttgtcagtcacgcaacacccgtcttggggcctggcacacaacaggcatccagtaactatttattgacatgatgtgtggtgtgaaaagcaaacgttgaaggtcagagcccaggcttaaagtccagggcttgggcacctctttccaacctgtggactgtgggcctgccaggtactccgtgggcctccatgtccccgcctgtaaaatgaacaaccagaaccacagttgtagacagtgaatgttcccacgtattatactttgtattttacacgcagataagtctcattttacagataagtgaggcacagagagattaagaaagttgccagaagggggttcctacaggtctccctccctccctaggaaggctgctgggctcccaggcctctcccttagcttcccaggatcatctgtgctaatgcctgggggacctactctgtgctgggtgagctgccagaggctgaggatctggtggagaacaggtcaagcacatagttcctgtccttggagttgagcgcccccgtgctgagtactttgagggcggaagcccaggtcttgggaccacctgggaggggacatgtggcttagcctgggtggagtcagaaggggcttctccaaggaagggactttcaatgtgactggaaactaggatgtccagaaggagaaatgatgaggctggagactcaaggagagatgggctcctaccctggacttggccttggtgtccactaagaaactgagggtgaccaacaggattggagaatatacaagttagacccattcagtctggcttcagcaggaatctttcctcccggagaatgcctccattaggtgccaaccaccagaacgccacactaacctctccaagctccaaagagtagggcgcctgattttataatccaggtgggggcgataaaggaatgcaggagccttcacagccatgaggcagtcactgtaactcctgccagaacagacctggggccacatcccactcctggatggcactgccagttccctgcataattcctttttttttttttgagacggagtctcactctgtcgcccaggctggagtgcagtggtgcaatctcggctcactgcaagctccacctcccgggttcactccattctcctgcctcagcctcccaagtagctgggactacaggcacccgccaccacgcctggctaattttttgtatttttagtagagacggggtttcaccgtgttagccaggatggtctctatctcctgaccttgtgatccgcccacctcggcctcccaaagtgctgggattacaggcgtgagccaccgcgcccggcctcccggcataatttttaaaatgctcatcctatgccctcattccccagcttgcagctgggggcctcctggtgcttttctgggacttcgagtaagtcatttcccctctctaagcctcagtttccccacctgtaaagctgatgccacctcctccaaggctcccgcgaggctatctgcctatctgttgtgtgttcctttaatgtatgggagtgagattgtggtttttgaatctgggtcctgtgccaggaggaataagtggtgagatacctactgtttgtgtcactcaggtcttccaccaacccctccagcctgtaaacctgccgtctggactccagaagtcatttctctctcctctgccaattcctaagcccagggggactgtgtctgagtgacgcaattgttagatctcctcagacaggctgttctctccaggaaaacattggctcaacaaattgtcaccaaacatttgtcttcagggaattctgttttttttctatcaaaaaaaatttggattcattatataataagagatttttcattttgcttggttactaattttatggaaagcctggtaggtttaaatgttaatagcttgttgactgggtgtggtggttcatgcctataatcccagtaatttggaaggctgaggtgggactatcgcttgagctcaggagttcgagaccaacctgggcaacgtggtaaaaccccatctctatcaaaaatacaaaaattagctgggtgtggtggcacgtgcctgtggtcccagctactctggaggctgaggtacaagaatcgcttgaaactgggaggcagaggttgcagtgagccgagattgtgccactgcactccagcctgggcgatagagcaagactgtctcaaaaaaaaaaaaaagttaatagcttgttgtcattgacaagtggctgtgagccaggacccacagtatattctctgtggattcttgtcaccttcattgtacagatgaggaagctgagcccccaagaggctgcggcctggcatgaccaaggtcccatagctagtttatggtggagctgggactatttgatccaagtccaaggtttggtcttctgtggttattcatgcactagactggtcttcctgggcatggtatccccagttctgtaccctttctctagaggtgccacgatgtgtgttgtctcagtaactgggagtctcctggcattttaagcccagggatgctaaacatccttcaaggctccagatagctctccccagtgaagaactgactcatctcaaattctaagtgtgcccctattgagaagctccaaaaccgaatgtcataattgacttgagtgatgtgacgtggggccaccctgggaaggcatggtcacctcgcctgcccttgtaagcagccatgcaaggtgaagttggacaagacatggctcctgtccccaaggggctggtggtctcctgtcagccctagcacccgcctgagaggagatttcacgggacagaatttggactttggaaataggcaaaccagggtttgaatcacagctggagctctctaggctgagtgagttttccttgttctccttttgagcaaaatagagtaaataataccatcctaatcagctgtgatgaggattagagaatttagcatggggttgggggagagggtcaggcacaggtaggtgctttctgagttcagcaaagggcctgggtggacacagaagcttcagagaggaggtacaggtggggctaggccctgctagggattttggattggagggtatgccaggcaggggaaacagcttgagtgaagatgggcaacatttattcaaaagcaaagggtggctgggcacagtggttcacacctgtaattccagcaatttgggaggtcaaggcaggcagatcaccagaggccagaagttcaagaccagcctggccaacatggtgaaaccccatctctacaaaaatacaaaaattagccgagcatgatggtgggtgcctgtaatcccagctactcgggaggctgaggtgggagaatcacttgaacccgggaggcagaggttgcagtgagccgagatcgtgccattacactccagcctgggtgaaagagtgagactccatctcaaaaaaataaaaataaaaataaattagctgggcgtggtggcgtgcacctgtaatcccggctacttgggaggctgaggcaggagaatcacttgaacccggcaggtgggggttgcagtgagccaagattgtgccactgcactccagcctgggtgacagagtgaagagagaggctctatctcaagaaaaaaaaaaaaaaaaggccgggtgccgtggctcatgcctgtaatctcagcactttgggaggccgaggcaggcggatcacgaggtcaggagattgagaccatcctggctaacatggtgaaaccctgtctctactaaaaatacaaaaaaaattagcagggcgtggtggcgggcgcctgtagtcccagctactcgggaggctgaggcaggagagtggcgtgaacccgggaggtggagcttccagttagctgagatcacgccactgcactccagcctgggcgacagagccagactctgtctcaaaaacagaaaaaaaaaaaaaaaaaagaacaaaggatgactgggtgtggtgtctcatgcctataatccaagctgtaatcccaggactttaggaggccaagaccagaggatcacttgagcccaggagttcaagaccagcctgggtaacatagggagaccctgtctctatttttttttttttttaaaagcaaagaatttgagctgggggttggggcatgcacttatagtcccagatactcaggcggctgaggcaggaggatcacttgagctcaggagttcaaggctcctaggtgacaaagcgagaccctatctctaaaataaaaaaagagtaaagggagggaaggtggaggctgccaagcctggattccagccggctccaaacgccaggctgaggaggctttggactttgtccagtgtcaccacaggcttctgggcagagctggtccaatgggggttgggggacagtggcatagctgacatcagcccctgggttattgacatcagcccctggaatgcatcagtgatgcattccacgggcccaggggtcatccactgccttcgggtcaagcaaatggccagtagctgcccaggctgatagaggtgtgtgttggaggggggcacaggccactggccctcggcccctggcctggcagcagggaggcctcagatcttagatgcctgagagctaccccagaagggtcctcggcacagctatggtccccatgcctagtggtgctgggcctcctcggtgctgccagatcacctgagctgcctccattgcagcagttatcccacacatttttttttttttttgaagcggagtcttgctctgtcacctggacagctgtcaggctggagtgcagtggctcaatcttggctcacttcaacctctgcctctcaggttcaagtgattctcctgcctcagcctcccgagtagctgggactacaggtgcccaccaccacacccggctaatttttgtatttttgtagagacgcggtttcaccatgttggccaggctggtctcgaactcctgacctcaagtgatctgtctgcctcggcctcccaaagtgctgggattacaggcgtgagccaccacgccagtgagccaaggtcacacagctgcactccggcctgggcgacacagcaggactccatctcaaaaacaaaaaccaaaaaaaaaaaaaaaacaaaaaaaaacaaattgaacataaatggaataatggaagaaatagctagctgtggggatggcaactctgcagctgttcacagtttgggaaacctgagatctgcatccagagaaacttcttgaaggcaaacttatcaacataaatgaggaaagtggttctaaagaaaaagataatgacccagaggaaataataccagcaaaacttcacattaaaggaactccctgggctgagcgcagtggctcacgcctgtaatcccagcactttgggaggccgaggtgggcagatcacttgaggtcaggagttcgagaccagcctggccaacatggtgaaaccccatccctactaaaaatacaaaaataagtcgggcatggtggtgcgtgcctgtaatcccagctactcaggaggctgaggcaggagaatcgtttgaacctgggaggcagagattggagtgagccgagatcacgccactgcactccagcctgagtgacagagcgagactccgtctcaaaaaaaaaaaaaaaaaaaaggcaggattatctcaccacaaaatgtacagaacaggaactcccagagatatttcacaacattgaaaacaaaggatgactaaggatgactcgtattcatcaagacatagaagatgtcaggtgcagtggcttacacctgtaatcccagcactttgggaggctaaggcaggatgattgcttgatgccaggagttcaacatcagcctaagcaacatagtaaaacccccatctttacaaaaaaaaaaaaatagctgagcatggtggttcgtgcttattgtctcagcaactcaggagaatgaggtgggaggatttcctgagcccggtaggttgaggctgcagtgagccgagatcacaccactgcactccagccttggcaacaaacatagaagaaatgctcattctgtatcctaaattaaaccactggaagactgcagcactgttcagttcagaatattctttttttttttttggaatgaagtttcatttttgttgcccaggctggagcgcagtggcgtgatctcggctcactgcaacctctgcctcctgggttcaagcgattctcccgtctcagcctcctgagtagctgggatcacaggcgcccgccaccacgcctggctaatttttgtgtatttaatagagacggggtttcaccatgttgaccaggctggtcttgaacttctgacctcaggtgatccacccgcctcggcttcccaaagtgctggggttacaggtgtgaaccaccacgcccggcctcagaatattctttttttttttttttttgagacggagatttgctctgtcacccgggctggagtgcagtggtgcaatctctgctcactgcaacctctgcctcccaggttgaagcgattctcctgcctcagccttccgtgtagctgggattacaggtgtgcatcaccatgcccggctaattttttgtatttgtatttaattttttttttctttttgagatggagtctcgctctgtggagtgcagtgccgctcactgcaacctctatctctcgggttcaagcgattctcctgcctcagcctcccaagtagctgggatgggattacaggcacctgccactacacccagctaattttttttgtaattttagtagagacgggatttcaccatgttggccagcctggtctcaaactcctgacctcaaatgatctgcctgcctaccggcctcccaaagtgctgggattacaggagtgagccatcgcgcctggcccaagctatttgcaataaaattttttccttgataaacttttataacgaaagaaaacgtcttaattttcagtgttgctaatattaaattacagtgtactaagttcttattagttttttttttttttcattttctatacttttttatttttaaatgacagagtctcactttgttgcccaggctagtctccaattcccgggctccagtcatcctcttgccttggcctcccaaagtcctgggactacaggcatgagccaccacacctgggctacatttttaacagatggtaagagagttttaaaaggtcacagaacaattgtcttattaattattattatccaataataattttctcgattattaagttctctttgcacaatttaagtttacatggtcttttttttttttttttttttaaatggagtctcactctgtcacccaggctggagtgcagtagtgcgatcctggctcactagaatctttgcctcccgggttcaagcaattctcctgcctcagcctccgaagtagctgcgattacaggcacatgccaccatgcccggctaattttttttgtattttcagtagggacggggtttcatcatgttgaccaggctggtttcaaactcctgacctcaagtgatctgcctgcctcggcctcccaaagttctaggattacaggcctgagccaccacgtctggccaacatggtctttttttttcttttgagacggagtctcgctctgtcacccaggctagagtgcaaacggtgcgatcttggctcactgcaacctccgcctcccgagttcaagctggtctcctgtctcagcctcccgagtagccgggattacaggtgagtgccaccattcctagctactttttgtattttattagagacgggctttcaccatgttagccaggctggtctcgaactcctgacctcaggtgatccgcccacctcggcctcccaaagtgctgggattacaggcatgagccactgcgcctggcctcaacatggtctttttctgttttgctttgttttgttttttttgagtcggagtctcgctctgtcacccaggctggagtgcagtggcacaatcttggctcactgcagtctccacctcccaggttcatgccattctcctgcctcagcctcccgagtagctgggactacaggtgcacgccaccacgcctggctaattttttgtatttttagtagagacagggtttcaccgtgttagccaggatggtctcaatctcctgacctcgtgatccacccacctcagcctcccaaagtgctgggattacaggtgtgagccaccatgcccagccaattcaacatggtcttttttttttttttttttttgagacagagtttcgctcttgttgcccaggctgccgtgcagtggcacgatctcagctcactgcaacctccgcctcccagttcaagtgattctcctgccccagcctccggagtagctgggactacaggcgtgtgccactatgcccagctaatttttgtattttttttagtagagacaggctttcaccatgttggccaggatggtcttgatctcttgacctcatgatccacccgcctcagcctcccaaagtgctgggattacaggcatgagccaccacgcccagccaacatggtcatttttataatgccacactactgtggaaagtaaagactacctgaatatgtatgtgtatgtgtatatgtatatatatgtatgcatcctcacatatgtatctccacaattgattttgtttattttttgagacaggatctcactctgtcacccaggctggaatgcagtgctgtgattatggctcactgctgcctcgactgcctgggctcaagcaatactcccagctgagcctcctgagtagctgggaccacaggcatgcaccaccacacccagctaatttttaaaaaattatttgtagagacaaggtcttgttatgttgcccaggctggtctggaaatcctgagctccagtcctcctgcctcggcctctcaaagtgctgatattacaggtgtgagccacctttccaggtgtgagccaccacatccagctttctctacaattaaaaaaaatgcaaatagagttatattgttcttcaacctgccctttttgtttgtttttgtttgttttgttttgttttgttttaagacaaggtctcactctgtctcccaagctggagtacagtggcacaatcttggctcactgcagcctcaaccttctgggctcaagcaatcctcccacttcagcttcccgagtagctgggactacagacacgtaccaccgtggccagctaattttttgcattttttgtagagatgggatttcaccatgttgcccaggctgatctcgaactcctgagctcaagcaatctacccgcctttgcctcctgaagtgctgagattacaggtgtgagtcaccgcggccagcctgtctctacaatttaaaaaatgtaaatgggttatattgttcttcaacccttttaaaaaattaccatacttttttttttttttttgtaattgaggtgaaattcacctaacatacaagtaactattttaaggtatacaattcagtggcatttagtgcattcacaatgttgtacaaacattatgtcactgtagtttcaaaactttatcgttcccttaggaaaacactccgtacccatcaaatagtcactccccattacctcctccctgtcctctggttaccactcatctgctttctgtctctatagacttgttattctgaatatttcacagaaaaggaatcatagctatgtgaccttttttgtccggcttctttcacttagtgtgttttgtttgtttgtttgtgacagggtcttgctctgttgtccagactggagtgcagtgtcatgacctcagctcactgcaatctccacttcccaggctcaagcgatcctcccacctcagccatcttattatctgggactacaggcacacaccaccatgcctggctgatttttgtattttttgtagaaacaaggttttgccgtgtttcccaggctggtgtcaaacaatgatcctcccacgtcagccttccaaagtgcagagattatagtcatcagccatgtcgccctggcctcacttaatatatttttgaggttcatctaagttacagcatgtgtcagcacatatttcattccattttgtggctgaataatattccatggtacagatatgttacaatttatccattcatccattgatggacaatttgggtttttttcacctgttggctatgatgaatactgttgatataaacatttgtgtacatgtttctgtgtggacatatgttttcagttcttttgggtatatacctaggagtgaaattgctaggttgtaaggtacttctatatttggacttcataaaaattaaaaagttttgtgtaccaaagaacattatctgccgggcccgggtaattgcagcactttgggaggctgaggcggggggatcacctgaggtcaggatttcaagaccagcctggccaacatggcgaaaccctgtctccactaaaaatacaaaaattagctgggcgtagtggcgaacacctgtagtcccagctactcgggaggctgaggcaggagaatcgcttgaacccaggaggcagaggttgcagtgagctaagatcacgcctctgcactctagcctgggcaacagagtgagactctgtctcaaaaaaaaaaaaaaagtacattatcaagaatgtgatcaggctgggcacaatggctcacacctgtaatccaagcactttggaaggccgaaacgggaggattgctagaggccaggagttaaagcccagcctgggcaacgtggtgagaccccatctctgcaataaaaattttcgaagttgttggtttattttgagttaatttttgtagatggaacgaggtgaaactcctgcttcattcttttatatgtaaatatccagttgtcccagcaccctttgttgaagagactattctttcctctattaaatgggcttggtgccgggtacggtggctcacgccagtaatcccagcactttgggaggccgaggcgggcagatcatgaggtcaggagatcaagaccaccctggctaacacggtgaaaccccgtctctactaaaaatacaaaaaattagccgggcgtggtggctcgcgcctgtagtcccagctatgcaggaggctgaggcaggagaatggtgtgaacccgggaggcagagcttgcagtgagccgagattgtgccattgcactccagcctaggcaacagagcgagactccatctcaaaaaaaaacaggcttggtgcccttgtcaaaaatcaataaggccaggcgcagtggctcccacctgtaatcccagcactttgggaggccaaggcctttgtattgcgtgagtccagaaatttgagaccagcctgggcaacatagtgagacccccgtctctacaaaaaattaaaaaattggccaggcacagtggctcacacctgtaatcctaacactttgggaggccaaggtgggcagatcatgaggtcaggagatcgagaccatcctggccaacatggtgaaaccccgtctctactaaaaatacaaaacttagctgggcatggtggtgtgcgcctatagtcccagctactcaggaggctgaggcaggagaatcgcttgaatcccagaggcagaggttgtagtgagccaagatcgtgccacagcactctagcctggcaacagagcaagactccatctcaaaaaaaaaaaaaaaaaaaaattagccaggcatggtggcatgtgcctgtagtcccagctactcaggaaattgaggcaggaagattgcttgactctatgagaacaaggctgtagtgagccgtgatcgcaccactgcactccatcctgggtgacagagcgagaccctgtctcaaaaaaaaggaaaaaaagaaaaaaatgtccagctacttgggagactgaggtgagagaatcacctgagctcaggatgtcgaggctacagtgaaccgtgattgcacacaccactgttctccagcctgggctacagaatgagaccctgtctcaccaaagaaaaaaaggaaaaaaaaatcagtgggccaggctgggcatgatggctcacgcctgtaatcacagcactttgggaggccgaggtgggtggatcacctatagttccagctactcaggaggctgaggcacaagaatcggcagaggctgcagtgaatcaagatcgtgccattgcactgcagcctgggcaacagagtgagactctgactcaaaaaaaaaaaaattagtgggccatagatgtttgggtttattactgggctctcaattttattccatgggtctatgtctgtctttatggtaataccacactattctaattataagctttgcagggccaagcgcagtggctcacgcctgtaatcccagtactttgggaggccaaggcgggtggctcacgaggtcaggagatcgagaccatcctggctaacatggtgaaaccccgtctctactaaaaatacaaaaaaattagctgggcgtggtggtgggcacctgtagtcccagctactcaggaggctgaggcaggagaatggcgtgaacccgggaggcagagcttgcagtgagccaagatcgcgccactgcactccagcctgggcgacagagcgagactccgtctcaaacaaacaaacaaaaaaacctttgcaataagttttgaaatcaacctgcatttttcacataacctgaatatctttccacgtcagactgctaaaagcaatcttattccttttagtggttgcacaatggttcattctatggttaaaccacgcagtgatacagtgatattgtgatacagcgatactgaactagccccaggttgatggatatcagattgcctccagtttttttctctcatgctgagtgctgcgttaatcatccaagtgtatatttttgtatatacgtgtgaatattcctgtaagatcagcttttagggctgggtgcactggctcacacctgtaatcccagcactttgagaggtcaaggtaggagaactgcttgagcccagcagtacaagaccagcctgggcaatgtagtcagaccttgtctctactaaaaataaaaagttagcccagcatggtggcgtgcacatgtggtcccagctacttgggaagctgaggtgggaggatggcttgagccccagaggtgtaagctgcaatgagccataattgtgccactgcactccagactgagtgacagagcaagaccctgtctcaaaacaaacaaacaaaaaacttttaggagaggaagtgttgagtcaaagagtggtatgtgttattattaaattgccctccaaaacttacaccagtgaacactcttaacctagtgcttgcttttcaaatcacaaattctcaccttttagtacattgtaggatcagtttggtgggtctcaagtttgtcttggcccatctgagaggcaaaaaatagtacttcgctttcatttacgtatcactaattatgactaattttcagcatcctttcaaggttattgacttttttttttttttgagacagagtctcgctctgtcacccagactggagtgcagtggcacgatctcagttcaccacaacctccgcctcctgggctcaagcgattctcctgcctcagcctcccaagcagctgggattacaggcgcacatcacggctaatattttttatatttttagtagagacagggtttcaccatgttggccaggctggttttgaacacctggcctcaagtgatctgcccgccttagcctcctaaagtgctgggattacaggcatgagccactgcgcccggcgactattttcttttcttttcttttctttttgagacagagtctcgctctgttgcccaggctggagtgcaatggcacgatctcagctcactgcaacctccacttcccaggttcaagtgattatctcacctcagcttcccgagtagctgggattacaggtgcctgccaccacacccggctaatttttgtattttagtagagacagggtttcaccatgttggccaggctggtctcaaactcctgacctcaggtgatccgcctgcctcagcctcccaaagtgctgggattacaggcgtgagccaccacacccagcgactatttgcttttgtgaatttcccatttatatctttttcacactttttcttattgagatgctggtcttttgttgtcgatttatacaaatatttgcatattaaggctcatattatattaaaatggcccagttacttgtttgtctccttgattagattgtgcgctccttggaggaaaggaaggtatcctatcacccttgtatacatggtggctagcttagggaatgaatagcacataataggaattcactgaggagatgtacacttaccatatggcaggctctgtgcaagatgttgagaataaaaagatgaacagaagagaatctttgttctaacaaagcttacagtctggtgcaagcgatagacattcattctcattctgcaggtttattgagcagctgctctgtgccaggtgcataacgcccattggaagagccagcctattaggatgagaaaaatgtcaggactgggacttcgctaacctggtcctgggaaatctgggtgggtcagttccccatccctggttatcagtatccccatcaataaaatgtgagccactggaccaaattctctcatttcccattgagcatccatgcatctgtgctgctttggcttttggaaagtaggagtcagagtcctgagttcaaatattggctctgtgctgggtgtggtggctcacgcctgtaatcacagcactttgggaagccgaggtgggtggatcacctgacgtcaggagtttgagaccagcctggacaacgtagtgaaaccccacctctactaaaaatacaaaattagcctggtgtggtggtgcatgcctgtaatcccagctacttgggaggctgaggcacgagaatcgcttgaacccgggaggcagaggttgcagtgagccaagatcgcaccattgcactccagcctgggcaacaagagcgaaactctgtctcaaaaaaaaaaaaaaaaaaaatatatatatatatatatatatatatatatatatatatatatatatatatatgtaggctctgctacttgttagctgtggccttgggtgtgtgacttagcctttttttttttttttggtgtgggagggatgtggggagggacatggtcttgctttgtcactcaggctgcagtgcagtagtgcaattatggctcacttcagccccaacctccaggctcaagtgatcctcccacctcagcctcccgagtagctgggactacagacgtgcaccaccactcccagataatttattattttttgtagagattgagtctcactacgttgcccaggctggtctcgaactcctgggctcaagggatcctcctgccttggcctctcttgcaggcataagccactgtacctgaccacttagcctcttgaaggaatctttcttataggattaaaagtgatgggaagccaggagcagtgactcacacctctaatcccagcactttgggaggcctaggcaggcggatcacttgaggtcaggagttctagaccagcctggtcaacatggtgaaaccctgtctctactaaaaatacaaagattagctggacatggtggtgcacaactgtagtcccagctactcgggaggctgaggcacaagaatcacttgaacatgggaggcggaggttgcagagagctgagatcgcgctgctgcacttcagcctgggcgacagagcacgactttgtcccccaaaaaataagtaaataaataataaaagtgatgggacctgatttcaagtagtcaaaatcgcagagacagcaaatgggctgggctatgggccagagggtaaagggatgtaattgtttaatgggtacagagttgtcagttttacaagatgaaaacagttcccaaaactgtatacctgtacatagttaagatggtaaagtttatgatatgtgtattttaccaaaattttttaaatgaaaaactttttttttttttttttttttgagacagagtctcgctctgtcgcccaggctggagtgcaatggcgcaatctcggctcactacaatcttcgcctcccgggttcacaacattctcctgcctcagccttccaagcagctgggactataggcacccgccaccatgcctggctaatttttttttcgtatttttagtagagacggggtttcactgtgttagccaggacagtctcgatctcctgacattgtgatccacctgcctcggcctcccaaagtgctgggattacaggtgtgagccaccgcgcccggcctgaaaaacatttttaagtggtgggacgtgtagggctccacggggcacctagcacaggaaagcgtgtggtaaataaaaggtgactgccagggctgttgaggagctgactagggaaggcctgcttcctagaaaaggggtgaggcgcagggcattggagggaggtgtgcctgggaggtcaggagtcctgccttatgcgggaacctggagcagcaccctccctgctttgggcctcctctgtgaagtgaggcgtagtcccctcctggggccagcaggttgctctgtgacctgggccagcaacctcaaagccacgaggggcctggctccttgcgccccctgctggccgactcgggaataacacacccacaagcccccaagttgctcccaaccaacctggccaagttgctgggttaaggcagcctacgtgccccctgtacccttctgctcttggctgagaaccccttatggcttctccctccctccctccctcctaagttcctggaacctaccttcaccacacccataagctcacagacacagacacagagatgtgtgcacatgctcaggtgcaagctcttgtatttggatccttttgttgttttggtttttttttttgtagagaaagggtgttgttatgttgcccaggctagtcttgaacttctgagctcaagcgatctgcccacctcagcctcccaaaatgctgggattacaggtgtgagccaccatgcccagcctccatgaattattattatttatttcatgcatagaaaattgatgttcagagaggtaaaatggcttgcctcatgtcacactgccaaggtcatcaaagcctgtgttctaatccttcccccgtctctcagcactgccctcctccttgtgtgtctacttggggcctgatcctgggtgtggtaatagaacagacctaccctgtggagggtgcaacataacattcacttctggccgggcatggtggctcatgcctgtaatctcagcactttgggaggccgaggcgggcggatcatgaggtcaggagttcaagaccatcctggccaacatggtgaaaccccatctctactaaagacacacaaaaaaattagccgggcatggtagcgcgcgtctgtaatcccagccactcgggaggctgaggcatgagaatcacttgaacctgggaggcggaggttgcagggagccgagatcatgccattgcactccatcctgggtgataaaaagatagggcgagactctgtgtcaaaaaacaaacaaaccaacattgactcctatgcccagtcttacccggccacacataggcccgatgcactgccagtcccctgcaatggaagccgatcctggtttccagccccacccccaaggctgcaagattgtttaagcatatccgtgtgcagcacaggtgccacccagcttcttgacccccatggagccagtgatctggacacacagaaggcaccgcctttcctgagaactggcagtgcccagagaaggcaaggggccaaggctggggcagggcagagaagagggccacagctgggatctgtttctcctgagtttctgccctgtgctggcaccaggtgtacaatctgctataaggcctgcaggagctcaatgtaagtgttgttattttagtatgttaggaatttcctcacctgttaatgagggtgaggatagcacttgctttacagagttgttgaaaggatccagtgacaaaagtattgggacagagtgagtcctagtaaattaaagctggttgtattattaatattattcttggccaagtacagtggctcacatttgtaatcccagcactgggacgctgcggcaggaggatgccttgagcccaggagtttgagacaagcctgggcaacacagtgagaccacatctctacaaaaaatacaaaaattagctcaattcacttgagatgatgaagacatgacttagaatgttgtcacttcaggaaaaaaagactgatttgatggacacagagtccgatgtgggggagagtgtcagagagagaattgacctaccaggcaactgtgggtttttaactcagtggtcagaaagcagtagagtgggtcccggtagggtgaaatccagctcctcctgtagtcctagaagaagtagcaagatgttgggtctaggacaggaaatggctaacctaaagagaccctttggcccaggatggttcccatcccaagacacccctcagtcctgggccagcagatagttggtcttcatagaacaggcagagggcacagagtgcctcccatgaccagccctgggcttgggcctgcccttgggccgctcatccgtttagctgagttacctgagctaaagcaccagactccctcccttgaggtgacaccaaggaatgtccctcctgggatggcagtaacactaccctttgttgctcaaggcacaggtacttagtttcaggggtcagagtacatacttcaggcctctcctgggaaccgctctcaaatctaaggaacgagagggtgagctctggcatcgccttgtgtgttagcccattctcccactgctataaagaactgcgcaagactgggtcatttataaaggaaagagatttaattgactcacagttcctcatggctggggaggcctcaggaaacttaaaatcatggcagaaggggaagcaaacacgttcttcacatggcggcaggagagagaactgctgagcaaagggggaaaagctctttataaaaccatcagctctcatgagaactcactcattatcgccagcacagcagcatgggggtaactgcccccatgattcaattacctcccactgggtccctcccaggacacgtgggaattatgagaactgcaattcaagatgagatttgggtggggacacagctcaaccccatcaccttggatttgattcctaaggctgttgtaacaaactagccacacttcattgtattgcgtttggcagatatcacggtctttgcaaattgaagctttgtgagaaccttgcaccaagcaagtctattgttcccattgttccaacagaatgtgttcccttagggtctgtgtgtaattcccacaatagttcaaactttatcattattattatgtctgacacggtgatctgtgatcagtgatctttgatattactattgtgcttgttttggggaaccacaaaccatgcccatataagatggtaaacttaataaatgcgtgtgggccggaggcagtggctcacaactgtaatcccagcactttgggaggccgaggtgggcagatcacctaaggtcaggagttcgagaccagtctgaccaacatagtgaaaccccatctctactaaaaatacaaaaattagccaggcatggtggaatgcgactgtaatcccagttacttaggctgaggcaggagaatcgcttgaacccaggaggcggagcttgcagtgagccgagattgcgcaactgcactccaccctgggcgacaaagcaagactccgtttcaaaaaaaaaaaaaaaaggctgaacaaactgaaaaaccagcggctctttttcagttcatcagaaaattaggtcacagggtaacctgctgcccccaaactggagaggcagaaaggtagatacagagaatcatgatttgccagagcagaaaccttccctggaatcagcacctgggtgggaaaacctgaactgcaactgacgaatgtctggcagcgtggatgtgtgctgctggttaatgttaggtggcagctggactggagtaaggaatacctagagaatggtgaaacatgacttctgggtgtgtctgtgagggtgtttccagaggagattggcgtgggagtcagtggactgagtggggaagatccgctctcaatgtgggtggcagtatgcaattggttcacggcttgaataaaaacaaaagaggagaaaattttcctctttctgtctctgtctctcctggagctggaagattctccttctcctgccctttggatatcaaaactctaggctcttcagccttggactgagaattatcccagtggcgtccctggttctgaggcttgcagacttggactgagccacgctactggcacctcttgcaaatagtctctcaggggacttctcagcctccattaattgcgtgagtcaatttccctataaatcccctctcatgcactttgggaggccgaggcgggtgggtcacgaggtcaggagatcgagatcatcctggctaacacggtgaaaccctgtctctactaaaaatacaaaaaattagctgggtgtgatggcgggcacctgtagtcccagctacttaggaggctgaggcaggagaatggtgtgaacctgggaggcagagcttgcagtgagccgagatcgcgccactgcgctccagcctgggcaacagagcgagattctgtctcaaaaaaaaaaaaaaatggctgggcaaggtggctcaccagcacgatctcggctcactgcaacctccacctcctgggttcaagcaattctcctgtctcagcctcctgagtagctgggagattacaggcatgcgccaccacacccagctaatttttgtatttttagtagagatggggtttcaccatgttgaccaggctggtctcaaactcctgacctcaggtgatccacccacctcagcctcccaaagtgctgggattacaggcaggagccactgcacccagctgagagtaacttttttttttgttgttgagacggagtctccctctgttgcccaggctggagtgcagtggcgcgatctcagctcactgcaggttcagcctcctgggttcacgacattctcctgcctcagcctcccgagtagctgggactacaggtgcccaccaccacacctggctaatttctgtatttttagtagagacagggtttcgccgtgttagccaggatggtctcgatctcctgacctcgtgatccgcctgccttggcctcccaaaatgctgggattacaggcgtgagtcaccgtgcctggccaagggtaactatttttaagtatgccagagcattcctccaaaatactctttttctttcttttcttttctttgctttttttttttttttgagatggagtcttgttctgtcacccaggctggagtgcaacgcacaatctcagctcactttagcctccaagcaattcccttgcctcagcctcccgagtagctgggattacaggtatgagccaccatgtccagctaatttttgtgttgttagtacagacaggatttcaccgtgttggccagtctggtctcaaactcctgacctcaagtgatctgcccacctcagcctcccgaagtgctggaattataagcgtgagccaccgggcctggcctaaaacattctttttctttttttgttttttgagatggaatttcacttttgttgcccaggctggagtgcaatggtgcagtggctcactgcaacctccgactctcggattcaagtgattctccagtctcagccttccaagtagctgggattacaggtgcatgccatcacgcctggctaatttttgtagttttagtagagatggggtttcatcatattggtcaggctggtctcagactcctgaccttaggtgatctgcccgccttggcctcccaaagtgctgtgattacaggtatgagccaccatgcccgggcttttttttttttttttttttatacatggtctcactctgttgcccaggctggagtgcagtggagcaattttggctcattgcaacctctgcctcctgagctcaagcgattctcgtacctcagcctcctaagtagctgggactacaggtgcatgtgacttcgcccagctaatttttgtatttttggtagagatggggttttgtcgtgttggccaggctggtctcaaactcctgacctcaggtgacccacccacctcagcctcccaaagtgctgggattacagacgtgagccaccgtgcccagccttggctgtttgtgtatcttttttggaaacattcagatttatgatttgcagatatttccttccattccatgggctgtcttttcattttcttaatgggtatccttgaagcacaaaagttcttaattttgatgaggtccagtttattttttcttttgttgtgtatgctttggatgttatgtctagaaccccaaggtcacagagatttattcctatgttttcttctagttttcttgttttagttcatacatttagttttgttttttgtttgtttgtttgttttgagacggagtctcgctgtgtcgcccaggctggagtgcagtggcgtgatctctgctcactgcaagctccgcctcccgggttcacgccattctcctgcctcagcctccagagcagctgggactgcaggtgcccaccaccacgcccagctaattttttgtatttttagtagagacggggtttcactgtgttagccaggatggtcttgatctcctgaccttatgatccgcctgccctggcctcccaaagtgctgggattacaggcgtgagacaccgtccccagcccatacatttagttatgtgattcactttgaattaatttttgtgtatggggcagggcacatggctcacgcatgtaatttcagcactttgggaagctgagtgaagcggtggcctgtccctccacacctgtgggtatctcatcaggtgggacgagagactgagaaaagaagtaagacacagagatgaagtatagagacaacagtgggcccaggagactggcaagcagcatatcaaggacctgcaccagcatcggtttctgagtttcctcactttttattgattattatttttattatctcagcaagaggaatgcagtaggagagcagggtgataataaggagaaggtcagcaaaaaaacatgtgagcaaaagaatctatgtcataattaagttcaaggggaggtactatgcctgcatgtgcacgtaggccggatttatgtttctccccgcccaaacatctcagtggagtaaagaataacaaggcagcattgctgccaacatgtctcgcctcccgccatagggcggtttttctcctatctcagaattgaacaaatgtataatcaggttttataccgagacattcagttcccaggggcaggcaggagacagtggccttcctctatttcaacttcaagaggctttcctcttttactaatctacctcagcacagaccctttacgggtgttgggctgggggacagtcaggtctttctcatcccacaaggccatatttcagattatcacatggggagaaaccttggacaatacgtggctttccaaggcagaggtccgtgcggctttccgcagtgcgttgtgcccctggtttattgagattagagaatggcgatgacttttaccaagcatactgcttgtaaacattttgttaacaaggcatatcctgcacagccctagatcccttaaaccttgattccagacaacacatgtttttgtgagctcaaagttggggcaaagtggctggggcaaagttacaaattaacaacatctcagcaaagcaattgttcaaggtacaggtcaaaatggaatttcttatgtcttccctttctacatagacacagtaacagtctgatctctctttctttgccgtacatatcccccttttctttttgacaaaaccgccatagtcattatggcctgttttcgctggttgctgtctctctggagctgctggatacacctgtagaccagcaacagagaacagacatacaaggattaatacaaaatttgcaatagtggaacttccagtggttttaacccaagtgatggggttaagatttgtgaggccatcagcagctttcaccattgcctcagtttctggcaccagattgaactgggcttttgatgcctcaaaaatttgttattttaattttaaaatatctaaagtaaggttatcttctcttccttgtagatggcgtctaaccatgtcccagtgatgttcagattcattataggctcgaggtgtaatacaaaaatctgacatattccagtcacactgtaactgaaaaagatattctaagctcatgagcctatctctcattcaaatgacagtttgtctacgatcattaatttggtttgccaatttttggtctatttgagtctgagaattccacaattttgaggagttcttttgccaattatttatatattttgtagtttgaacagaggagtgtaaagcaattccagcagccgcagcagtagctgtgactgcaataagacccataatcactgcaattaaagtaaaaaatgaatcttttggatctagttagaactccttttaatacttctgttaaaatatggatggatggggaagcctcccacggtcggtccatggacacagggatccacacaccctctcttgccctcactggcagaatatggtgctgccaatcaaaagttgaatcaatgcaagtaaacaatctacaattttcacaggttatagtttgggaatctggtttaataactatgtttcctacaactagcatataagagggttttacacaactttgcaaaggaattgtcggattggaatttaggttaatagtataatgtggcttatgatttcttgttccgataacttgatttccagaccaaattctaatgtggtgcgaggccacagtaagctttcataatgctggatgttcaggagcagtaacaggactaactaactttggttgaggtgatgaaatccccttttcaccccatttccatggatagggtgattctagccttctataaacctggtctagcctttcagttaaatcactatcataggccggattagtgggccagacagatggggtctgtgaacatgagtgagtctggcccatacaaccataatataattggttttgaggggcccagtctataatagttccaaatttattgttttgtaataccaccacagtatcagccacatatttttcccaaactaagacttctgggtcttttgattctttgggaatttccttgaggcaaggtccccttaggcctaaattttaatgatctttgataagaagagtcctgtaaattattcatttgtgacccaagtgacattccacttaccatatgataagtaaatttattggtggcactgacagtagatacttctaccaaccaattttgggttgtaggcattaagcatcctggtgctttccccaggcaaataggaggataatgatacccagtggaaatgtttatcatcattccttcttcttcaggttgggcagggccgcggtcatctgtgggtcctggtacccatgcactaatattaacacatacttcaatagaatattatccatccaagtgactgcctgaattaagggcgggaaaggcacataggcccagtaagtataattagctgcagctgctcctgcagacatagtgagacttaccaccattgatacaatcattaaagctgcaagcagcatattctctggagtttgtgttacccttgtgtactttaggcttttttcagctaactgtgtcagcttctttagctgggcccaggtcggcggcttcgcttttttggtggatggcaactttttctgtaagttgtaggtacccaaactggaagctgattttctcctggtgaaacacgagcaaaacctctcccccacgttatcaccttctctattttttatgttttatttttgttgtctttttaccaaatcagtttttcctcatgtgggctgttctttttaccagtaaaatgttgttctgcagaagtagcggtctgatttctataaatgttaaaaaaatttaaagtatagagtgctagattaagttgcatctggggagtgttatattccttactgtccttttcctttttttgtttaaccaattgagctttgagtgttctattacttctttcaattatggcctgtccttgggaattataagggatttctgttgtgtgtgtaattttccactgatttaagaatttttgaaatgctttactacagtatcctggcccattatctgttttaattttttatggaactcccatgacagcaaaacaagataataaatgtcttttaacatgggaagtattttctcctgtctggcaggttgcccatatgaaatgtgaataagtatcaactgtcacatggacaaatgacaattttccaaatgaaggtacatgtgtgacatccatttgccataatgcattgggacataaacctctgggattaactcctgcctcctgagtgggcacatgtaggacttgacactgagtacaatgttgtacaacattttttgcctgttttcatatgatatcaaatttattttttagtcctgatgcatttacatgagtcaaggcacgaagtttttatgcttttatgaatgcagatgatactagcaagtcagcttgttcatttgccttagttaaaggccctggtaaattagtatgtgttcgaatatgagtaatataaaatgggaaatttctttttcttacagtttgttgtaacgaattaaacagctgatttaactgatcatccatactatatttgattagggctgtctcaacatcctttgtagcctgtactacatatgcagaatctgaaacaatgttaataggctgattaaaaccttgtaacactgaaatgacagcaaccaactctgctctttgagctgagtgatattgagtttcaatgacttgttcttttggcccagtttaagccacttttccattgctggaacaatcagtaaacgccatcagagcattttctaaaggtttatatctggtaattttaggtaaaatccaagtaatcaattttaagaactggaagatttttgtttttgggtaatgattgtcaataattcccacaaaatcagcaagaccaatctggcatgcagcagaattgataaaagcttgtctaacctgttccttgtttaaaggaacaatgattttatctgggtcacttccacacaattttactatatgtagtcttgcctgaccaattaatgtagccatttgatctaagtacaatgtaaaagtcttagttgtactgtgaggaaggaatgaccactctgcaagatcagtattttgaacaataatgcctgttggagaatgtgcagtagcaaaaatcaaaagttggagtggggctaaatgatctattctatttacttgtgctgaccgaattttttcttcaactaattcaatttctttagttgcttctggagttaatggttttttactgtttaagtctggatcccctctcaagatagaaaacaaatttgacatggcataagtagggatgcctagagttggccgaatccaattaatatgtcttagcaatttttgaaagtcatttaatgttttttaatgtgtcttttcttatttttattttttgtggtttaattttcctttcctctacctgcattcccaaataatggaaaggagtagaggtctgaatcttatcagatgctattgtcagtcctgcgtttgcaacatctgtctgcagaaatgtgtaacagtcaattaatttgtctcttgtttctgcagcacacaaaatatcatcaacataatgaatgacataacaatctgaaaacttgtctctaactggttgaagaacttgagctacaaaagtctgacaaatagttggactgaggcaacactttccactaaaacctggctggttctttattatttacggctggtatagtaaaagcaaatttttcaaaatcctgttttgccagaggaatggtaaaaaagcagtccttcagatcaattataattaaaggccagtctttggggatcatggccagagagggcatcccgggttggagagcacccatgggttgtattatggcattaacagctcttaagtcagtcagcatgcgccatctgcctgattttttctgaattacaaacacaggagaattctaaagagagaaagtgggtgaaacatgtccttttttaaatagttttttaactattttatgtagcgcccccaacttttccttagagagtggccactgtttgacccatacaggacactgcagggcgagtctgaattgctccttcactgtagtgaactgtaggttgggcaataatgagtgccacgagccaagtcgcagtgtgcctagtttcaggctgcctcccccagcactcactcggctgaggaggaggtggccattgtggttgtagccccaatggccccaatgattctggactttttccttttaattttaatgtttcaggatatattacctcctgtaattgattgtagtcaacactttgcgttgactgagccattaccggctctgctacatatttacaatgtgaactttccgttcctttcttgaactctgtctctgcctcttcttcacaatctatcacacagctttcaggggcatcagaaactgaaatgctatcttcttctatttgaaatggttctaaagttgctttaataatggcccaatcattccatactgtaagtgggatgattttaccttccctacttgcttgttttaattccttgccaattttttcccaatcttttaaatctaaagttccttgttctggaaaccatgggcagaattgttctattgtttgaaatagcgtaattagattttctgtagaagctttaactccccctcttcttaagagaattttaatgaagctgagataagaggcatatttactttcagtttgccccattgttaccctggattcctccgagcgcacaagcatactgcaaggctgaccgtggacgtactcgggaatctctcatcagctgtcctcaatactcacgttctcagcataacttcaccctggagaaaggccccatattgggcgtcagatgaaggggtggcctgcccctccatacctgtgggatatctcgtcaggtgggatgagagactgagaaaagaaataagacacagagacaaagtgtagagaaacaacagtgggcccaggagaccggcatgcagcatatcaaggacctgcaccagtaccggtctctgagtttcctcactttttattgattattatttttattatctcagcaagaggaatgcagtaggagagcagggtgataataaggagaagttcagcaaaaaacatgagcaaaagaatctgtcataattaagttcaaggggaggtactatgcctgcatgtgcatgtaggccggatttatgtttctctccacccaaacatctcagtggagtaaagaatagcaggcagcattgctgccaatgtgtctcgcctcccgccatagggtggtttttctcctatctcagaattgaacaaatgtataatcaggttttatactgagacattcagttcccaggggcaggcaggagacagtggccttcctctatctcaacttcatgaggctttcctcttttactaatccacctcagcacagaccctttacaggtgttgggctgggggacggtcaggtctttctcatcccacgaggccatatttcagactatcacatggggagaaacctcggacaatacgcggctttccaaggcagaggtccctgtggctttctgcagtgcattgtgcccctggtttattgagactagagaatggcgatgacttttaccaagcatactgcttgtaaacattttgttaacaaggcatatcctgcacagccctagatcccttaaaccctggttccctacaacacatgtttttgtgagctcaaagttagggcaaagtggctggggcaaagttacaaattaacaacatctcagcaaagcaattgttcaaggtacaggtcaaaatggaatttcttatgtcttccatttctacatagacacagtaacagtctgatctctctttcttttccctacactgaagaaggaggatcgcttgaagtcaggggttcaagaacagcctgggctggccaggcatggtggctcatgcctgcaatcctaacactgtgggaggccgtcatgagcagaacaacttcaggccaggagttcaagaccagcctggccagtatagcaaaaccccatctctaattaaaatacaaaaattagccaggcatggtggcacacacgtataatcccagctactcaggaggctgaggcaggagaatcacttgaacccaggaagtcgaggctgcagtgagctgagaaggcaccactgcactccagcctgggtaacaacgtgagaccctatctcaaaaaaaaaaaaaaaaaaagaagaaaataaaaaatttatatgtgtgtattctgtgagatagaggtccaaattcattcttttcttttcttttctttttttttttttttgagacagagtctcactttgtctcccaggctggagtgcagtggcgtgatctcggctcactgcaacctccatctcccaagttgaagcaattctctgcctcagcctcctgagtagctgggattacaggtgccaaccaccatgcctggctaattttttgtatttttagtacaccatcttggtttcaccatcttggccaggctggtcttgagctcctaacctcatgatcagcctgcctcggcctcccaaagtgctgggattacaggcataagctgccacgcctggccccaaattcattcatttacatgtggatatttagttgtctcagcaccatttgttcatttgttgaaaagattattatttcccaccccccacccccgctttttttttgagccggtgacttgctctgtcacccagcctggagtgcagtggtgtgatctcggctcactgcaacctccgcctcctgggttccagcgattctcctgcctcagcctcctgggtagctgggactacaggcatgtgccaccatgccctgctaattttgtatttttcgtagaaatggggtttcaccatgttgaccaggctggtatcgaactcctgacctcaggtgatccgtccacctcagcctcccaaattgctggaattacaggcatgagccaccatgcctggcctccccacctttttttttgagacagtctcattttgtcgcttaggctggagtacagtggcacgatcttggctcactgcaacctttgcctcccaggttcaagcagttctcctgcctcagcctcacaagtagctgggactacagtcatgtgccaccacacccagctaattttttgtatttttattagagatggggtttcgctggtctcaaactcctgacctcaaatgatcctcccgccttggcctcccaaagtgttcgtgttacaggcatgagccacacccagcctcccaattttttttttttttttttttttgagacagagtctcactctgtcacccaggctggagtgcagtgagtggcgtgatctcggctcactgcatcctccacctcctaagttcaagtgattcttctgcctcagcctcccagtaactgggattacaggtgcacaccaccatgcctggctaatttttgtatttttagtagagacgaggttttagcatgttggccaggctggtcacaaacttctgacctgaagtgatccactcgcctcagcctcccacagtgctgggattacaggcgtgagccaccatgcctggcccccatttgagtttcttagcatcttatcaaatagcaattgtgaccatttatttctggactgtcagttctattcaattgacttatatatctatctttaagcagtatcacactttcttggttcctgtatgtttgcattaagcttccaaattgtgcagtgtgatttcttcaatttttttcttctttttcaggcatttacttttttttttttttttttttttgagacatatctccctctgtcgcccaggctggagtgcagtggtgggatcatggctcactgtagccttgacctctccaggatcaagtgattctcccactttagcttccccagtagctgggactacaggtgtgcaccatcacacctggtcaatttttgtatttttgtagagacggtgtttcagtatgttgcccaggctggtctcaaactcctgggctcaagagatcctcctgctttggcctcccaaagtgctgagtttacaggtgtgagacacattgccctgcttgaatttgttgattgcatctccatggtgttatttaacatgttcttctgtccctgtattttagtcattcaacagtgtgatctaatttagggccacttttacagcaggaataatttgcaggtggtgtatgtgtttccagagtcagaacatgtttggtttatgctcttggtgatattcagggctatcagtgatcctctcctggatcattttttaattagaggtgatttgtgttttgaaagggtcacttgggttgctggggggtgtattgtatatgagtaacagggttcttataaggacggagtcggataatcatgcaacagagcacttggtgctattcctggcacgcaatgaccatattgttgttgttgttgttgttgttgttgttgttattgttagagctgtgtgtgggggacccaagtcctgagctcggaggcattttctggccagggctgtttcctcccttctcccctgcctctggaaaagtctgcagtgccccaaggctctgggaggcatgttcaggactgcagcagccatctctgtgcacctggtggggccccttcagggaaggaaggctggagccccactcacttggttcttgcaccagactgtaagtgccctaaccccaatactctgccacctgcatggcctggggcttctggggtctggctcgttcctggcttcaaagctgtgcatgagccttctctttcagggagccctctttaactgcagcctgtatgtgggcttctcccttgcccctgcttctctagtctagaacttgtagctctgcatctgaatagtcagcttgggcgctgtagggtgctgcttcccatgatcccctgtgcccatcccagaacccagtacctggtagggactcaataaatgtcaactgagccaggcgcggtggggttcctgggccatggaagacctggcacttactcaaatggtcccaaggcccctccaggacaggggggcctggtgttgagattactgtggctgccaccctgaccaggtccttgccagcttctcttctgaccctgggcaggtacctgagcctcttcaagcctcagtgtcctcatctgttagatggagactattgtggcacctctagtgagagtgcagtgggaactgagcgaggtggaactgagcaaaatcctgagccagggttcactattgaccacagcaggtggctgagaagaatgttggatccccagctccacggcccaccagccatctgggactggcaaacccacaggaacggaaggttcctcagggaccacaaagcccatgtgaggtccctgctgctgaagggattctgaggacaggaggagccaaattacctatccagggtcacccagccaaggtgggttaggacctgagtttggtggctctcaggtctggccaatttctttctttctttttttttttttttttttttttttggtagagtcttgctcgttgggtcgggcaggagtgcagtggctggcacgatcttggcccactgcaatctccatctcccaggttcaagtgattctcaggcctcagcctcctgagtagctgggattacaggcatgtgtcatgacgcccagataagtttctttgtttgtttttcccagactgagtttcactctaatgctcaggctggagtgcagtggtgtgctcttgcctcactgcaatgtctgcctcccaggttcaagtgattcttgtgcctcagcctcccaagtagctgggataacaggtgcgtgctaccacgcccagctaatttttgtatttttagtagagatgggggtttcaccatgttggccaggctggtctcgaactcctgacctcaggtgatctgcccgcctcagcctcccaaagtgctgggattacaggcgtgagccactgtgcccagcccctggccagtttctgcacaccagtggctgaggagggagctggcctgggaggaacaccgggaggggaggggcgagccaggagccaggaccccgggaccctccgaggagcggattagtgcctccctcagagttaggacatggccttgggtccaacaggcctaagtctgagtgtgtgtgttgtgtggccttaaacacatcactccccctcctgcaccctccagcctctgttttccaccttctgttttctcattgataagataggcctgaccaggtcattcagggaatgaaatggaagtgcttagcaagacctctgtaagtggaggctgctgctgtcactgttgccattatcctccctctccgctccacccacctcctgctcctcttctttaaccctcagcccttcctgagtcagactttaacctggccaagtcagggctctgtctcaggacgcatggagccagggctggaagtctccactgggcaggcgccaggcagcccctgcaggttggggaggtggaggctgctggagtcaagaggaaccaggtgagggtgttggagcataacaggcttgggaggcaggcagaaacctgcccttctgcaaactctatctcttccccctcctgggagcagacaggatggcgctgtggcctgaaagcagctgtccctcctgtgtgcaagctcggactgctgcacccagacagattccatctctgaccttccacttgttcgtctccagctcgccatggccaaacagctgcaggcccgaaggctagacgggatcgactacaacccctggtgagccagctgggctggggaggtgtgtgggtgtcccctcgggcatgggttggccatccctgggtttacagcaactcagtagtactccagatggtggcggtacacagactgccagattccagccatagctcaggagagacagggcccgagggagtaggcttggttcaaatctcagctttcttctgcatgactgtgccactaggacaggtgacatacctgctctgagcctcatctccccagctgcaaaatgaagagttatacccacctggagagcgttggggaggaaaaagtaaaatgctgtccaaagccattctacccaggcaccaagctaaggcctttccagggatgactctttctcacttggtatagagtcagataaactaagataagtaaaataagcaagtaagatacagtcagctcttcaccagacatttgcagaggttgatattgttttcttttttgacttgttttattttcattttatttttgagacggagttttgcccttgtcgcccaggctggagtgcaatggtgcggtctcggctcactgcaacctctgcctcctgggttcaaatgattctcctgcttcagcctccaagtagctgggattacaggcgtgcaacacaacgcccagctaattttttttctttttcttttcccccgcaagacagaatcttactctgtcacccaggctggagtgcagtggcatgatctcggctcactgcaacctccccctcacaggttcaagcaattctcctgcctcagcctcccaagtagctgggattacaggcgtgcgccaccacgcccagctaattttttttttttttttgtatttttagtagagatgagatttcaccatgtttgccaggctggtctcgaactcctgacctcgtgatccacccgcctcagcctcccaaagtactgggattacaggcatgagccactgtgcctggccctaatttttatatctttagagaaaatggggtttcagcatgttgtccaggctggtctcaaactcctgacctcaagggatctgccctcctcggccttccaaagtgctggggaatacaggcataagccaccgggcccagccaaaaatgacacattttagacatatttattggtatgcaaattcaactcagccaggtcttcactctgctccaaactagccccaaaccacataccagcctcttcatccagcttcccagcctttctcccacctggagaggtggcccccaggcagggccagaacagaggattatgggtccagagatgatgtgtgcctgggctggtggggccctgttctgcccagagtagggtcaagagcatcaaactttgcttgagatggaagtagaaaggctggctggctgtgccttgtactagctgggaggctttaggcaagtcactccactccttatccccacagtggtccaggaacaagatgtgcctcacaggccattgtgaaggctatatgagcagagcgtttaactgtggtgttgacgaatccaaggaggagtcatgcaatctgtacagggggtctcaactagtatttggaaagaatagagtaggataggacaggacagaaaatactgcagtagattgcaccaagaaggatgaagcttccattccatgtttgtgctccacagggttgatgatgcaaaggtgatttcttggccggtagtggtggctcacgcctgtactgctagcactttgagaggccaaggggggcggtggatcacctgaggtcaggagttcgagaccagcctggccaacatagcaaaaccccatctgtactaaaaatacaaaaattagctgggcgtggtggcgggtgcctgtaatcccagctactcaggaggctgaggcatgagaatcgcttgacctcgggaggcggaggttgcagtgagttgagattgcaccactgcactccagcctaggggatagagcgaaactctgtcaaaaaaaaaaaaaaaagatgatttcttcctatgggtcatggtggaagaacttggaaagcccctgggctgattcctgcgattaacaatgtgcctgactgacctaatctcaatgtaggggaccagctgtgacacttaggcagatcttcaggccaggacagttgctgattgtctagtttttgtttttcttgtgtgtgtatgtgtgtgttttttgttttttgtttttgtttttttaagacagaatctcactcttgttatccaggctgcagtgcaatggtgcgatctcggctcacttcaacctccggttcccgggttcaagtgattcttctgcctcagccttccaagtagctgggattacaggcccctgccaccatgcctgactaacttttgtatttttagtgaagacagagtttcaccatgttggccaggctggtctcaaactcctgacctcaggtgatccgcccacctcggcctcccaaagtgctgggattacaggcgtgagccaccacacctggccggttgtccagtttttctaaacaggccgaagtccaggtcaccatggagggctgggctggtgctgattctccatttgttacccagggtggagtttgtgaaactggccagtgagcatgacgtcgtgaacttgggccagggcttcccggatttcccaccaccagactttgccgtggaagcctttcagcacgctgtcagtggagacttcatgcttaaccagtacaccaagacatttgtgagtctccccatctctcgtggaggcactgggggaggaaggggacagggctttctggacttcaagcccacacagctgtcaggcttcaggggacagagccaggggattctgtatgaccatagttcagtgtttactgagcgtatcctctgtcccagagccttcgcctcgtggtctagtggggatggcagacaagaagccagtaacgacaggcagttgatacatgatgtgatggaggaggatgggatatcgtgcgagtaagaaagagggaatgaaacctggggagggggctggagagatgcacgaagacttcctggaggaggtgacacttaaaccaagtcctgaaagatgagctactggttggattacacaataaatccaaacgttttccggaaaggaccacatagtaaatatgtgacactgcttggattagaacagtggttctttttttctttttcttttttgagacaaggtctcactctgttatccaggctggagtgcaatggtgcgatcatggtccactgcagccttgaccctgccagtctcaagtggtcctcccacctcagcctctggagtaactgggactacaggtgtgcatcaccatgcccagctaattttatttatatatttatttatttatttttgagtcagggtctcactcctgtcacctaggctagagtgtagtgacatgatcacggctcactgcagcctgtacctcatggggctcacatgatatgccatttcctggggctcatgtgatcctcccacctcagcctctagagttgctgggacaacaggggcatgccacctcacccagctaatttagagacagggtttcaccatgttgctcagactggtctgaaactcctgggctcaagtgatcctgccacctcggcctccaaaagtgctgggattacaggcgtgagccactgaaccctcattctttttttttttttttttttgagatggagtctccctctgtcgccaggctggagtgcaggggcgcaatctcggctcactgcaacctccccctcccaggttcaagagattctcctgcctcagcctcccgagtagctgggactataggggtgcgcccccacgcccagctaatttttgttttgttttttttttaagacagtctcgcactgtcgccccggctggagtctggagtgcagcggcacgatctcggctcactgcaacctccgcctccgcctccgcctccgcctcctgggttcaagccattctcctgcctcagcctcttgagtagttgggattacaggcgcccgccaccatgcccagctaatttttgtatttttagtagagacggggtttcaccatgttggccaggctggtctcaaactcccgacctcgtgattcgcctgcctcggcctcccaaagtgctgggattacaggcgtgagccaccgcacctggccattttttgtatttttagtggatactgggtttcaccatgttagtccggttggtctcgatctcttgacctcgtgatccacccacctcagcctcccagagtgctgggattacaggcgtgagccaccgcacccgaccgcactcgttctttttaatggctgcatactgttctgttgcctggatgtgccataatttatttaagcagttctgcactgatggactgcttctgctatctcaatatcataagcaatgccacagcaaatatccctgtgtggacatctttgtatacatatgtatttctctaagataaattcctggaggtaaaactagcaaaagaaagactataaatatttataaatacaataggtggatattgttaagaaacagtgtgtgcctataatcccagctacttgggagtctgaggcaggaagattgtttgagcccaggagtttgaggccagtgcaacatagtgagatcctgtctgaaaaataaacaaacaactaagtaaataattgccctccagtaaggtttactcatttacatccctgccaataggctggtctcagagctggttggaaagttccttctttgatccaaaaaaaaaaaaaatcatttgggtatgtatctttttcttttctttctttctttcttttttttttcttttaactagagacaaaagctgggtatggtggctcacgcctataatcccagcattctgggaggctaaggctggcagatcacctgaggtcaggagttcaagaccagcctgcccaacatggtgagatcccatctctaataaaaattagctgggcgtggtggtgggtgcctgtaatcccaactacttgggaggctgaggcacaagaatcgcttgaacccgggaggcggaggttgcagtgggccgaggtggtgccattgcactccagcctgggtgacaacaacaacaacaacaacaaaatagagacagggtctccttatgttacccaggctggtctcaaactcctgggctcaagcaatcctcccaccttagcctcccaaagtgctgggttacaggcatgagccactgtgcccagcctcattaaatattttacctctttcttgtatgttgcaatatttttctcttcctgttttgaccttgctcatggtgccttttatttttatttaattaattaatttattgtctaagacagagtctcagttttattacccagactggtgtgatcataactcacttcagccttgatctcctgggctcaagcaatcctcctgcctcagcctcccgagtacctgggactacaggcacgtgatactacacctggataatttttttgattttccatcagtagagacagagtccctctgtgttgcccaggctgttctcaaactcctggcctcaagcaaccctcccgcctcatactcccaaatgctaggattacaggcgtgagccacggtgcctggcctgtgcctcttgttgtacagaaaatttttatatttgtgtggccaaatctggtttagtgagttactgagttgagttctagataaagtttcaatcacttggcttagccttgagtatttttgttttgttttgtttgtttttgttttttttgagacggagtctcgctctgtcgcccaggctggagtgcagtggcgcgatctcggctcactgcaagctccgcctcccgggttcacgccattcttctgcctcagcctcccgagtagagctgggactacaggtgcccgccaccatgccagctaattttttgtatttttagtagagacggggtttcaccttgagtattttataagtgtcctcagcaaacaagtttctggatctaatcttcctctcaaaaaggggtgcttacaaagctgcaacatgaggttcctgactgtcaactgtgtgtgactttagacaagtaatttcttctctctgggtctctatttttctacctgtcaaatagtgggcatcaggccaggcacggtggctcacatctgtaatcccagcactttgggaggccaaagcaggcagattacccaaggtcagaagttcgaaaccagtctggccaacatggtgaaaccccgtctccactaaaaatacaaaaattaaccaggcatggtggtgcgtgcctgtagtcccagctacttgggaggctgaggcaggagaatcacttgaacccaggaggcggaggttgcagggagccgcgattgtgccactgcactccagcctgggtgacatgagtgagaccctgtctcaaaataaataaataaataaataaataaataaataaataaataaaagcctctcccgcaaagctgctgggaggatcaagtgggcacaaacatgcttcttaaacttacagatgtggaaagtggggagtttctactgccttgtgggctcttggactgaggttcatggaggcaagcacttcctctggttctctgctaaatccccgccctgggcttcgggcctggcacagaacaggccctgtggcaaatgctggtggaggagatggaagagcttagcactggatatctgagtcagtgcaggcctggtggttggcaccctggagtctgggaccatatagattgtgtgacctttacctcccagagtacacaggatcacaatagcacctgcctctgggttgttgagaggatgagatcaaagaaatcccacaaatagcttggtgtgtagaggaatccagagtgttgaaagctgatctattccacgtcccctggggcccaggctaccagtacctgactttgcccccaggcctgctgctggaaggtgctagaattgcctggatacagctgggccggaggatgggcccaggctgagctggacagttaacccctgctgtcctggcagggttacccaccactgacgaagatcctggcaagtttctttggggagctgctgggtcaggagatagacccgctcaggaatgtgctggtgactgttggtggctatggggccctgttcacagccttccaggccctggtggacgaaggagacgaggtgagtgggcaagacttgggctgagtgggactgagaggtcagggccatgctgactccagctgatttgacccttatatcaggtcatcatcatcgaacccttttttgactgctacgagcccatgacaatgatggcagggggtcgtcctgtgtttgtgtccctgaagccggtaaggatgctaggtagaggatggatgggcagagggatccaaggcgtgggctgagttggaccctgggagttggaaaaggaggaaagaagtgaaggaagccagttcctctaagctgggagggcagaggggaggtgtgtgtgttgggatcccaggggagagaaggtggggatagatgctggggaagacctgcatgtcaggtggttaagtggtaccaccccatgccacctgctcttgcagggtcccatccagaatggagaactgggttccagcagcaactggcagctggaccccatggagctg

SEQ ID NO: 15652 - DNA, 85300 bp, Homo sapiens; identical to SEQ ID NO: 1209

SEQ ID NO: 15653 - DNA, 82936 bp, Homo sapiens
gagcggggccggcagagcgcgcggcgtcggtgcccttgaccatggcggcggctgcgcttctgctggggctggcgctgctggcaccgcgggcggccggcgcgggcatgggcgcgtgctatgacggcgcagggcgcccgcagcgctgcctgccggtgttcgagaacgcggcgtttgggcggctcgcccaggcctcgcacacgtgcggcagcccgcccgaggacttctgtccccacgtgggcgccgcgggcgcgggggctcattgccagcgctgcgacgccgccgacccccagcgccaccacaacgcctcctacctcaccgacttccacagccaggacgagagcacctggtggcagagcccgtccatggccttcggcgtgcagtaccccacctcggtcaacatcaccctccgcctaggtaagcgcgggctgggggcaccgccaccgcaccccgtgtccccactccactgggggtctgaggctgaggcctgagctgctgtgcgcccaggttgggctgcaggacccagatatggtgttggatggaggggctcagaaataggaattaggctgggtgcggtggctcactcctgaaatcccagcactttgggaggccgagatgggagggtcgcttgagcccaggagttcaagatcagcctgggcaacgtagtgagatcccatctttacaaaaaataaagaaaaataggccgggcgcggtggctgacgtctgtaatcccagcactttgggaggccgaggcgggcggatcacctgaggtcaggagttcgagaccagcctggccaacatggtgaaaacccgtctctactaaaaatagaaaatttggccgggcgtggtggtaggtgcctgtagttccagctactcaggaggctggggcaggagaatcgcttgaacccgggaggtggaggttgccgtgagccgaggtcgcaccaccgttctccagcctgggcaacagagctaactccgtctcaaaaaaaaaaaaaaaaaaaaaaaaaagctgggcgtggtggtgcacacctatggtcccagctactcaagaggctgaggcaggaggatcacttaagactgagaggttgaggctgcatgaaatatgatagtgccactgtgctacagcctgggctacagagtgagaccttatctcttaataaaaagaaagaatgaaaaaaagaagaaaaaaaaacaggacctgtacccctagatagccagaaggatagactgaggggtgccccgtggggcgggagaggcagggagtcacttgctgagctttggttctaggttgcaattataatcccctgtaatggttttccatcctagaccagaactgttggggaggtgacacaccaaggactgaattggtcaccctctagggcaggggctcctgatcttgggtcttctggtcaacttcaggtattcagtggacccctgaagctgcctgcagtcctcgggtgggttctggaagatagaagctgtgatgttcatcactgcacaggcaaagtttaaccctctggggaggaggactaagtttcttcgtgctgctgggcagctgcgcccggtggcatggcctctctgccctgctcatgacttgccgaggtgcagaagcccttagatctccaggaatcagaatctggagtctggacccagccccggttctcagcccctgcccccactgcagggagctggaatgctctctcctccctccgtgttcagcccgattcccatgtcctctgtggccgggtaagcgccaagtgtctttcctgttgcagcctccactgccctttcaggaggggctggtatcactggttagactcccttatcttcgaggtcagcctcccaaagctttgaaaactcaaattatttttataactcatttttgctgctaaacctgacctgaggctatttataagctatgtttatgctagtgagaatgaatattcattcgctttgctactgaaatctcatttgagtacagccggcagccccagaccccactgggggtattagcacaatatatggtataaggcctgcatcgtctttctaaaagctgaaaaatgttcaattcccaaacacatttggagcctaggagtttggattagggatgatgggactgtatcccatgtttcagctgagaaaattgaggctcagagaggttgttttgcccaaaggcacagagctgctaagtgagcatctgagcgtggacatccatggacatcagaggtcagagcataaactctttgatgtgagttccgccacccatcaactgagtcagctccacctcagcctggtgacagtgtcctggggagggctgggaagtgacattggagtggggtgcggggaggaccgtgagcccgctctgcagagcacacaggtactggctgccacctcagaaactcccttcttctggggccacgtcaccttctctcagcctatctggatcactaggtggggcttctgaatgggacgagggggaggggacaggaagccagtggggaggggggaggctgggggagctgtctggatggagctggcaggaccccaaggccacaggggaaggaatctgggacagggtggggagttgttggggagacacagtgctccatgacaaagggtatcacatgtgtcctgggaacccaggggccaaggaaagagctcagcccaggcacaaacaaggtgggaggaagttgggagaaatggccaagtttttggatttgaggtagttcctgtttactgtgcatctactgtgtgccaggccctgtgctgagctgtgcaccctcgtggaactctgcctagaaccttagaagcagagtggttctgatccttctaaaagcaaggaacctgagagcctccacactgtgaatgtagagagcgaacacacacacacatacacacacacacacacacacacacacacactccctgctgtgtcttatcccggtgagcattcttcctgttttgtcgccgaaaaccaggcatataggagagagtccacaagtgtgagtgacagggtcacctcctctgtcctgtgctctggggccagctcagcattctcttttgcctgctctgggaggcagaataggatagaaatcacgaaaggaggctttggacttaggcccagcagagccactcactgggcaagcggagtcccctctctcagcctcagtttccttacctgtaccgtacggataagagtcgccacttcctgagcagctgttcgggttcatgagcccgggtcggagccatggcagtccctgtgtgtgaccagcgtggctgctgagacagctcagggctgaggctcccttgcggggattgagaaatgctcgtcccggccgccctgcctcctcaaagacatcctgacgctggtctctgtttacgcacaaggggcgccgggggcccagcgcagccccagatttggcctctttttggtttcctatgacttaggtttgctccaggctaagccatggcttgcataatagcgggggaaggagaggcctgggattgtcggtgtcccctgtggaggccgtctgatgacctctcctcctggtccttaggccacctctgctggctctgtccccccactgctccctctccttgaaggctcatgggaagggagagtgggcggccagctctggcccggggtctcctagagggaatggggtgaggggcagggaaggagatggaggtcgccgcattcccagccccccgtggctcctggacatctgttccggatcctcccgtcatctctgagctgagccttcctgtctgggatgaaaggcagcagtgggctctggcagccccagcccaccaccaaggcccagggaggccacggggctggggcctgggagtcagtggggtgttgggggagtggacagtgacgggggtacagaccattccggggctctcaccgtgtaccaaggactcgcccaggcggcatcccaaaccggcatgctttgttcttttacagacagcaaaactgaggcactgagggtgagatcagttgcttggggtcgcacaactcaataaatggtggcccccgggaccctccccctaactgctgtacttgggaatgaagagggtccaggctaggctggtccacatgcttgaagcctcggtcctgggaggaacagtatgggctgtggctttcggtgggctgggggagtctcctcccggcttgcacttggatcgctgagaatctcctggaaccacaaaaagacctgagtcccccaagcagatgagttctgccctccctcccccgcaggtcccggatgtccctgcatggagttgacttcttcttgctttcatttagccgtttgcttggtggtcacccagccttggctcactggccacaggatgcagctgtgaacagggccatgtgcggcccctgtcctgaggggctcagggcccaccagaaggcagcctttactgagcagtgctgagaacgaggatgtatgctcagaacatgcactggtgcgcacgagcctcatctctagggtcaggaagggtctcgctgagacctgaaggatggtaggagctgaccaaagagggaaggatgttcttcgacctgccgggcctggatggcctgagtgcagacaccgagaagacgctggggtctggccagccacagcgaggagccgggtcccagggtgctggacattagggggaccctgtggcccctgaggggtcctggagccagctgggtctcctgagccttggctccgttctgtcttcctgtcgagtgggcggctgcgattgccttggcctgggccagtgctgggggccaagtcctccctcctgctccctgggggttctggctggaacgctgggccctgagcagggcaggaggtcaaggcagcggctggttagcctccatccacccacagaactgccctccaggcccctgggcccagctggccttggccacctctttctctctgggcctcccaggactaatccaggagatgcagggctaggaagtggcaaagcccaggatgggtgtagccagcctcccatggcctctgcatcatccctgtccacttcccacactgcccttcagcaaggccttggctgggccgaggcactctctctcctccagcgccttacatgtgctgtggcttcggcccagcgcacttctcctcccaccttcagcctaactcatgtcttgttcatccacaaaaccattgcatgtctgccgatccctgtgctgagccctggggatgtctgtctgccccactcagcttagaggtgcctcctctggaaaacccctcacccctctaaggttgggcagaaggcctgcccacgcatccttgcagcccctaatcctccttccaccagagtctggattacactgcgtgagggcttggtctgtttacgtccatccctatctctgggctgccagagggaatgcctgttttcacacctgtgccccagtagtgcccagcctgcatttgcccactgcacagggtgctgggtaaaggttggtcaggcgaatgaatggaagagcagctcaaatttcattgaggctgggtgaggctcacacctgtaaccccagcactttgggaggcagagacgggaagatcacttgaaccagaagttcagggtcagcctggacaacaaagtgagaccctgtctttacaaaaataaaaatagaaatgaaaaaattagccgggcgcgggggcaagtgcctgtagtcccagctacttggaaggctgaggtgggaggatcgctggagcctgggagttcgaggctgtagtgatcacaccactgcactccagcctgggcaacagagcgagaccctgtctcagaaaaaagaaaaatgtagttgaacaaatgcttcgtgcctgggactgttccaagtgcttccaaggcatttgctcatttagccctgttattgttatgcctattttgcaaatggggaaaccaaggcactacattgcacagtcacttgcccagtgaacccgagggagttcagctattttgcccaaggccacagagccaggaattggtggggctgggctgtgaaccccagggttgcaagattgcactgtgtttcctcgctcagagcaagggagtgaggaattcatggatgaagggcccccagccttgcaggtgcctcccgtactcctaagccacggtgttcacagcagtgccgccgtcctcccagcccaaccctgccctgccctgctctcccttgcccaggcttcagctgcttggtctacctcccttccctgtggccccttgtccccgggcaagccctcccagcagccatgcccttccccagctcatgccctggctttgcttatttgaatcatagtcgacatccaggactccacctgcacccctcgccctgactcggtctccacctgagccctcgactgggtaatttgagcagccgccttgacaccaaccactctgaatgtcatgcaagggcccccgtgtgcaaaggctatgcaagggcccctgtgtgcatagcagcattttcttttcttttttatttttttgagacggagactcgctccaccgcccaggctggagtgcaatggtgcgatctcagctcactgcaacctccacctcccaggttcaagcgattctcctgcttcagcctcccaagtagctgagattacaggttcctgccaccacacccagctaattttttgtatttttttgtagttacggggtttcaccatgttggccagactggtctcgaactcctgacctcaggtgatctgccctcctctgtctcccaaagtgctgggaatacaggcgtgagccacggcacctgacccataacagcatttccacaatagccaaaggcaaggcagcctaagtgtccaccgaggggtgaatgatgagcaagagcaaatgtggtccatccatccagtagaatattactcagccctgaaaaaggagattctcacacagccacagtatagacgaaccctgaggacattatgctaagggaaagaagccagccaaaaaagaacaaatactgtagggttccgctgatatgagaggcaccctgggatagtcaagtccacagagacagaaggtagaatgctggttgccaggggctgggggaggggcaatggagagtgactgtttcatggggacagagtttcagtttgggaagatgaaagagttctggagatggatggtggtgaaggttgcacaacaatgtgagctgtgcaaatgggtaagatggtaaatgtcatgttatacatatttcaccacaataaaagaaggtttggggaaaagtacatgtcagccccgtgggaaggcagcttggcaacatggttgaagacccacaagaatattcctggcctttggcaaaggaatcctacttctgggaattcaaataagggaagggtcctaatgcatgaaaacattcatcgaggcgttctttatagtagggaaaaatgggaaccataagggactagttaagtaaattgtaggacataaattctcatggtgattggagccattcagtgcaacagctgacaaagggtttgtaatacacagggagcgcttaagtcaaaatgttgaatgaagaaaaagacacaagttggtatatgtggaatcatcagatttatattttaaaatccctaaagagtaggcaaaaaaagaaagacatcaaactggtaagcgtgtttgtcctcaggacttgcagtgacttttcttccattttccgtgtttctacattttcccagtattctctcatgaagcttgttctaatttaaaaactggagaaaacacatttctacgattttttttttaaaaagcacccgccttgctatgttctgttttaagatgtttttcaaagttctggtgcagcacagcttggcaccgtaactcccaaccccttaaaagaaagcgtgcggagcaaacagggtccggatctgggggcggcctggtgtctgcgcctgtttggagcagaggcttcgggccttggaacgaggtggggggctggcccagatgtgtattcgctaaaggatgctgtgcgcgggctgctgcgggtcaccggcgcagactccttggtaaacatctagcagccagacacctctcgggaggggagcttggagccacttgaaaggtagctggcagctagaagcgtgatcggaaaaaggcagtcactgggagttcatgcaaacgagcggcctcacgcgataggaaacatcccggcttttctgtccttgccaaaccaggaggtgagagaagatgcagcaatatcacagagacatggcagggactttttgttacaagagttaattagaggccgggtgcggtccttacgcctgtaatcccagcactttgggaggccgaggccggcggatcacttgaggtcatgagttcgagaccagcctagccaacatggtgaaaccctttctctattaaaaaaaaaaaaaattaaccaagcgttgtgttgggcgcctgtaatcccagctacttgggaggctgaggcaggagaatcgcttgaaccggaggcagaggttgcagtgagccgagatcgggccattgcactgcagcctggatgacagcaagactgtctcaaaaaaaaaaaaaaaaaaaaaaaaggccaggtgcagtagttcacacctgtaatcccagcactttgggaggctgaggcgggcggatcaccttcggtcaagagttcgagaccagcctggccaacatggcaaaaccccgtctctactaaaaatacaaaaattagccaggtgtggtggcgtgtgcctgtaatcccagctacccaggagtctgaggcaggagaaccactggaacccgggaggcagaggctgcagtgaaccgagatcgcaccactgcactccagcctgggcgacagagcaagactccatctcaaaaaataaataaatacataaataaaagaaagcagcttaatccctcctttgtgatgaaaaagtttcttccaaaggcaacaaaaaggttgggaaaggagtggccccaagatctttttttttttttttcttgagttggagtctcactctagcccaagctggagtgaagtggcatgatctcggctcactgcaacctctgcctcctacgttcgagcgattctcatgcctcagcctcccgtgtagctgggattacaggtgcatgccaccatgcccggctaattttttgtattttagtagaaacgaggtttcaccatgttgcccagggtggtctcgaactcctgagctcaggtgatccccctgcctcggcctcccaaagtgctgggattacaggtgtgagccactgcgcccggcccccaagatcttttaaacagcgacgagaattaaaatctgcagccctagcccagaccctcacaagctccaggggccaatgaggcttctgggtgattgagacagctgtgttcctatcaggaaagccgagccaagatgtcatccttgactgttagctggtggtgacactgcttgggagtacttggcttccctcacctccaggccgcccaatatgctgttctctctgtctagaattctgttccctctgctctcctcgcctgtctagctcccatgcacccctgctcatcccacccgcttactggaccacatgccccaaacttacttctcaccacctcctccctctccatgctcctgccagcctgaactacaggcttcaccacaaggtggccacagctttgccaacatcctgcctggtgtggaatgcaccttctcctcaccttccctggctaatggctgctcatccttggaaccataggtttgagcgccttgttgatgctcccacagcctccctgggctactttgtcctgttctataaagacctgcctgtctcatctgggcacggtggctcacgcctctaatcccagcactttgggaggccgaggcaggcaaatcacttgaggtcaggagtttgagactagcctggcctacatggtgaaatcccatctctacagaaatacaaaaattagccaggcttggtggtgcacgcttgtaatccctgctactcaggaggctgaggcaggagaatggcttgaatccaggggacggaggttgaagtgagccaagatcacgccactgcactccagcctaggcaacagagtgagactttgtctcaaaacaaacaaacaaacaaacaaaaacaagacctgcctctctctccctacctgtaacctccccttggggcaggtgccatgaatccttatagctgagcatggcacctagcacacaagaggtgcccaataaatgcttgcccgatgaatgagtagactcgaggcaggatttgtaccttcaaggagtttataatccagtgagagagtggagacagcaggcagtcctgacagtgtggatcacattgtcccaagtgtgcctggaagtcatgatccctggatgagtctctgtttcacactagccagcatttagtgagcacctgctatgtgccacgtgctttgccaagtactttactcacactgtatggctgagatccccaaacacttcatttactagtgaggagtcaggctcagggagcagaaggacttcctcagtgtcatgcccaaagtcactgctcaaaacctgggtgccctcctactcaggagtccatggagccccagagagaaggggctgcctaggaagggggtgaagggggtgctggtgcccatggagacatggaggtcccacccgcccccctcccagtcttcacctgctggctgagccagcagctgggcacagcagagcctcccccggccgggccccgcaccgcccacgccaaacagcaggagcgccaagctgtgtcctctccagccagctggaacataaagcccatcaagaatgacaccgggacagtcataaaatcaagctggcccacatccggcactgaccaagcagaatgagctcagtacgaagaggcttattttgggaaaatggaaacaaaacaaagccctataattggagccatctgggcagcagtggcctagggagtggggcgggaggggctagggtggaaagctgggctgggaatgcatgggtgaggctgccctgcccacctcgagcatcagaaccaggtgggtgagctgctcccagcctacaggggagtcacacccagcagggtcccttagccccatctggccacccactgttcttgttcttcctctcccagccaagctcttggcacttctgggtgtggtgactccctataaggagctggggactccccatggccataatgccagataccacaagaccctggctgaaccagggataggctccatcacagccctcccatcttggcactaagtctaagccccaaatatgaatcaagattgccaagtctaaaaaaacaaaaagattgccaagttctcctctaacctggggagaccaaacagttttccttggattgagtgttgcctagggctttgtgttaagaaggattctgaggtacagtctgagccaaaacatgactgagacatgactgcatgtttgcaaagagaggtggcagggcattccagaccattgcataagtcagggaacagacgaggggctgagagaatgacagagaggagggctaacacaaggaattccagagaatgagctagtgatctggtgaatactgaggtcacttgcgagaaggaggtgattcaccagcttcttgttttggtgcatagagagactaggggaggaaggagggtgcctttatttttcccccccaaatacatgtaacacaaacgtggagtctggctttcggttcttttgggtatatccccagaagtggaagtgctggatcatatggcaattctattcttaggttttttgatgtttttttttctccccagagtctctggcttcttttaattagttttaacctttaagcttttgtaagcgtaatcaaccagctgaggatggtaggggatatttcccaacacttctcgtgtaaactcaaattgtaggttcttgcttggagtaacacaggctcttcactgcttacaaggttattcttgagttgcaaaaattctctctccgtagtttttcctggattcctctattcaatctcggctgccacagaaagcagaaagcagtcagagagaaagcacagggacgctgtttttgcatctgtagtggaaaccttagcagacagtaactgctctggggctgtcaaatagatgcattgtttttagttttttcgggaaccaccagtttcccatagcgtatgcaccatttcacattcccacccacagtgcatgagggttccagtttctccatatccttgccaacacttgttatcttctgtttttttgataatagccatcctaatggatgtgaggtccaataatacatatatataactgtgtagggaaaaactcctcaaactgtgtttttcctctgctctcagacgacagccatcatcaacacagaagacttctgtgaccaaatgcgtgggtttttcccccacccaacaagcagcggtaccagctgggtgtcctctaattcagttccaacacgatctagtcagagatagcatccggtcccacaggttgagggctcagtccccaaggctgtcttccgccacacacaccagtcacaagtctaggcctcacgaacttctgacagattagcttcaagttcccatgaccccttctttgggttcaatcaattcactggagcagctcacagaactcagggtaacacattgactggtttattataaagaatattgcaaaggacacagatgaagagatgagcagggtgaggaacggtgaagggacgggagcttccatgccctccctgggtgccaccctccaggaacctccccgtgttcagccatccagaagctccctgaaccctgtcctcaggttttcatggacgcttcatgcatcagcattgcttcccttgggcgtagggtgggaccctctcttggagggtcttaagacccacggtcagaaaggtgggggaactttagagtgaaaggagggcaggagaaggcagaggcctgcccctgaggcccaacacacccaaaattctaatgaaagaccgtaaggagggctatgggagtcataagccaggagctgtggatgaaaacacacacacacacacacacacacacacatatatatgtatttttttaatagagagacatggtctcactatgttgcccaggctggtctcaaacccctaggctcaagtgatcctcccaccttggcctcccaaagtgctaggattacaggtgtgagccaccacggccagcccgaaaactgacagctatcataacaccacaataacatacatagtatatataacagctttaggagatacaattcacataccgtataatttacccatttaaactatacaatccagtggtttttagtatatacacacagttgtgcagccatcaccacaatcaattttagaatatatttatttatttatttatttattttgagacagggtctcactctgttgcacaggctggagtgcagtggcacgatcacagctcactgtggcctctacctcctgagctcaagccatcctcccacctcagcctctcaggtagctgggatatgcaagccaccacgcccagctaattttttaatttgttcttatttatttatttattttttgtagagagaggatcttgctatgttacccaggctggtctcaaactcctgggctcaagcgatcctccagcctcagcctcccaaagtgctgggatgacaggtgtgagccactaagcccggcttggaacacctttattaccctgtacctattagcagtcactttctgttttcccccagtccccatcctgaacccctatcctgtgacaaccacctgtctccttcctgtctctgtggatttgcctattctggacatttacgtggaatcccataagatgtggtctttggtgattttagcttctgccacttaacgttctcgtggttcattcttgtggttgcgtgtgtcagcacttcatttcttcttgtagcccaatcatattccatcatatgatatatgccacgttttattgattcattcatcagttgctgggcattggagttgttcccactctttggctgttgcaaagaaagctgctgtgaacatccatatgtacgttttgcgtggatgtatatgttttcatttctcttgggtatatgctgaggagtggaattgctaggtcctgtgataaccctgtgtctaacattttgaggaactgctaggcgctgttttccaaagtggccgccccattttacattcccatcagcagtctatgagggttccaatcccccaacttcctcaccaacatttgttattacctctgttcatgctacccagccttgagggtgtgaaggaaatctcattctggttttatcttgcatttccctgctggccaatgatgtggagcattttttcttgtgtttcttggccattcatatatccactttgcagaaatgtctattcaaaacctttgccatttttgttttttcttttttgagatagagtctcactcggttgcccaggttggagtgcagtggcgtgatcatggctcactgtagcctctaattcctaggctcaagggatcctcccacctcagcctcccaagcagcttggaggcacgggccaccatgctcagctcattttttatattttttgtagagatgaggtttcgtcatgttgccctggctagttgtgaactcctgcgctcaagcaatctactcctcctttgtcagtttttaattgggttgtctttttgagttgtaagaattctttatatattctggataagtctcttatcagatatatgatttgcaactattttctcccactctgtgggttgccttttcattttctcagtggtgttccttgaaggacagaagttttggttttgattaagtccagtttatgtattttttcttttgttacctgtgcttttcgtgtcatttctaagaaggctcttctagtgcaaagtcccaaatattatttactcctctgttttcttctaagaaagaagttttagcttttttttttttttttagacagtcttgctctgtcacccaggctggagtgcaatggcaccatctcagctcactgcaaactccacctcttgggttcaagcaattctcctgcctcagcctcccgagtagctgggattacaggcgcccaccaccacacctggctaatttttttatttttagtagagacagggattcaccatgttggtcaggctggtctcgaactcctgacctcaggtgatccacccgcttcggcctcccaaagtgctaggattacaggcatgagccaccgcacccagccttttagctcttacctagagccaagatgtttcagcagacgactagggtggcttgtcctcggcacctaaggaagatggtggtggcagtgggcagtctcttgggggtctctgggaccagggaaggaaggatcagagaatagaaagccggccatggggaggggactgggcatcttctgtgctgctctgggaagtgagaggctactgccaacggtagagatgcaggagggactccctgcgtgggccgttcttcccttcattcattcgttcctgcaccaacactcagtgaatgcctgccaggtgtcaggcaccttgctaggcactgggatggcagagattaccaaagagacgcccggtgccgacggtgaggagctctgtccagtgtggggagccaccgctgagcaggtaactctgcaggaggctagctaaggagtcacattgcaggaggccccctctcctgtcctggggggatgtcaggggtgtgcattagggcttaaggttgagttgggcttctgtgaggagggggtacctggatggagtcctaaacataggaggatggggagagatggtggcatttcaggcagtggggaaattgcctttttaaattcaggctgtacttccttcttattattgaaatcatacccgctctcagtgtagaagccagatacttcccagctcgaactgtggaaggcggcagttctcccgcgcccgcaccccaggctccctctccgcccggcgctctctgagccatttctgttccctgatgcatccttatctcctagccctgtgcctgcactgccatgtcagggtttttctcttcttaggcattgcctgttgacatcccatgagggaagaggaggaattgggaacccccttccctctaccacagccatcctccctaccccagcctcccagggtagctgagtcattgtgacggagccaggtctgctgttgaggatgcttccagggtggagcgcagggcaggcaggtgcctaaagcctgcagatcctccagctgggtgtcgggggcatgtgggggagtggggctaaagcccagggaagggagaggccactggaagctgggggttcagggagcaagcagaggggctcaggagggggccaaggcaggcaaaggagaggagagcaggtggaggccccgggagaggggactttcgaggaggtgagcatgatcagaggcccctggctgtggccaccaggggctgtgggtgaggtaactttgcaagtacagtgtcttctgtggagtggcccagagaagctgaattgcaggaggttgaaggttgagttgggagatgaggctgtggggcagtggatttaaacctgtcttgggaaatttggaagatagaaacttggagcaataaggggtccagggaggatttcgttaggattaggagatatgtggtcattgcaagggaatgaggccgaaggcacagtgcaaggatcagcttcgttggggtgtagtaaaagaaataactttctaacggtagagcaggctttcttagaatgtggcaacatcccattgctggagatatttgagcaaacagagatggctgcctctcaggggtgttgcaacggagattcctgtgcagggtggcgagttgacccagaagagggacagcaaatacttgggaagcatgtgggcattgtcctttccagtgccccagcaggcatcatgaatggagggtggcttcccctgtccagagctccagacagcttccagcgatccatccacgctagtgcctgcaatgcagccgtctgtccttcctagaccaggattccatacctccttccccttccataaaatgggccccgttttcctggctgcagggaaggcttatgagatcacgtatgtgaggctgaagttccacaccagtcgccctgagagctttgccatctacaagcgcagccgcgccgacggcccatgggagccctaccagttctacagcgcctcctgccagaagacctacggccggcccgagggccagtacctgcgccccggcgaggacgagcgcgtggccttctgcacctctgagttcagcgacatctccccgctgagtggcggcaacgtggccttctccaccctggagggccggcccagcgcctacaacttcgaggagagccctgggctgcaggtcagggaggagcggggcttcggaggttgggacggggttgggactgggtcacggcagtaggagggtctgatgtgccaggacacacagggtgggggacctgcaaaaccccatggttttctttttcttcttttatttttggagactgagtcttgctctgtcgcccaggctggagtgcagtgacgcgatttcggttcactgaaacctccgcctccttggttcaagctattctgcctcagcctgccaagtaactgagattacaggtgcccgccacgactcctggctgattcttttttgtatttttagtagagacgggggtttcgccatgttggccaggctggtcttgaactcctgacattaagcgatccacctgcctcggcctcccaaagtgctgggattacaggcatgagccactgcccttggccccaaaccccatggttttcaagctttctgccacagaaggcttgttgcacccaagtcttctgtggatgccgctaatgaaccagaaggaagacgggctactcagtggaccagagctgtcccttccctggcctcctggggcagagccctgtggctcccaggagcctgtgagggctgtcaacccacctggccccttccttatatgggtgtggaagctgaggcctggagggagacagcattttccaggggcacaaatgaggcgtggaagggcccaggccagcacctgagtgtccagactcctggctggtgttctttccagaactctccgctgaggggcctcgcttcctcctcctgtgaattagtaacagggcctgcccatgtgtctccaagggctcctatgaaaatggcaaaatgtgacaggaacatgggctttggagtcatagagccctgggtcccacgctgtaagtccgtgccaaccagcagcactttctgtgatgacggaaagcgcctctagctgcattgtcccatgtggtgccaccagccaccatgagatgtggccagcgcagttgaggaactggatttcatattttattattaatattttattattaaatattaataaatttaataaaataataattattttattaacttagccacatgtggccagtggctgccacgttggagagactgctgtggggtagcgggaacacacacactgtgaccagtgcggtgcttggcacgtagagcgtgcccacccacactcgggagatacgcgcgcatgacagctccccgtccttgtcctcacggtagagaggacggctggcctgtcgccatgtcagtccattcagggccctccagttcagcccacgtaggtccacccaggtgtgcggacctgccgggatcggcacctatctgtgtccacgttgctgtgtgtccatagctgttcatctccacacaagtgtgttgggtggctctccagtccacaggtccccaacccccggctgcagaccggtactggtccatggcctgttaggaaccaagtcacacagcaggagatgagcgcgggcaggtgagctttcctgcctgagctccgcctcctgtcagatcagcctcctgtcagatcagcctcctgtcagatcagctgcggcatcagattctcccaggagcaactgggttgcgtgtcctcctgagaatctagtgcctgatggtctgaggtggaacagtttcatcccaaaccaccgcctaccccgttcgtggaaaaatcgtcttccacgaaacctcttcctggtgccgaaaaggttggagtaccgctgctctagtccatttccccgggttcagacccaagacgtgtccaaacccagggaacctgccctctcctcccctccagactttcagagcgtctcctttgcccatctgggataatgagggaaccagggttagaatcctgtttccagaggggacactgacacccaaaaagaagttgcgttctgtcagcgatgtgcagcatgagaacacacggagccggccgtgtcggggtccccaggaccacccttgggtttagtggttcgctataaggactcacggaactcagaaaagctgtgaggctcagagctgcaattttttgcaatgaaaggctaccggctcacatcagccagtggagaggcgcccggccaggtcacagaagggaccaaccaggctctgagcttccagctgttctcccaatgcagtggagtcacacgcacagcacatatttccccagagccacatgtgacagtgtgcgtagagtactgccaactttgaaggccagagttttttaataatttttttttcttaaatagagacctcgtctcactatgctgcccaagctggtctcttactcctgggctcaagcgatcctcccacctcagcctcccaaagtgctgggcttaaatgtgtgagccaccacacctggcctgaagtccagggtttttactggaggctggcagtgtagacacggctgaccacctgtgtggctgacctgtctccagcccctccagaggtgaagccgattctgtgtggcccgaggcccccaccgcaaatcacatcatccgcatagactacctagtgtggcccaagggaagaccctcttatcaggagggacatccaaggatatggaggtcactcccctggatccagggcaaagggccaggcccctctttgggcaagccgaatcctttatcacacagtaccacatctctagacgtccaggccctgcttgtcccactaaaattgtacatgtcaccatgattttatttaaaaattacaatttcttctccacggggctccaaagctctgtagattagaaaacgtcacccgaggtcagatgaagacaggcagggagggccggcccccgctcccacctgcgtctgtgcagccaccaccgtggggacacccttggctgttggaggttttctgtcttgttgcctcttgtgttctggacactgtccctgatggagagatgaccttttgagaaatatctcccctgctgcttctggacagaaaccaagagcagagcaggacaaagagaggcaagtctaccttgctcttttctcctcatgctccctctggacacatttagggggcaggtgctttctcagaggacacagagcttggaaggaaggatgtggctgctgggtcttgggtccctctgacccccaaggaagggcctaggactttggaggagaaggtcgacctggctgttgcagagtaagaccgccagagttgaggggccgcctgagcaccccttggacatagagcccaagctgtccacctcctgcttctccttaatgccatggcctgagtcctgggatccatctaaaatcaactccagcacccactcatagcttaagctggagttccagtgcctgggttcagtggggattgccctaaaatgactttttttttttttttttgagacagtttcgctctgtcgcccaggctggagtgcagtggcacgatcttggctcaccgcaacctctgcctcccaggttcaagcaattctcttgcctcagcctcccaagtagctgggattgcaggtgtgtgccaccacactggctaatttttgtatttttagtagagatggggttttgccatgttgtccaggctggtcttgaactcctggtctcaagggatctgcccgccttggcctcccaaagtgctggcattacaagtgtgagccatcacaccaggccctaaaatgacttttaaggcatcaagacagtccccctgcaattgaggctaaggctgctctctcccagcatccatcctatgtctcagagattttgaccccattcctttgtggtcattgtccttgcagactgatggatcaggtcacaggccaggaagcagaggtgggagaccttgggcaggtcattgctgtctctgggccccactggcatgataagggctttgggatagacacaggaaggcagaccagcctcgtggttaaagctgggaccctgggatcagatagaccagaatcccagctctgccatgcactggctgtgcaacttggaacagaagggttaccctctctgagcttcagtctcctcatctttaaatggggttaataacaatacctacttcagggttaccgtgaggcccgagccctaaccatacaatatgtgtcagtagccgccgcacctcctggctctggtatccagttggtttgagttctccaggtggcacttttttctggagaaggaatcgccacagcgcgttcagctctggactgcgggacttccccaccccaggcctcagctccttgtccagtagccggcccagcagcatcagtacctgggcacttgtgagaaacgcaagctccccagctccaccgctgacccctgaatcagaagctgcactttaaccagatccctgaatgcacgctgagctttgggaagtgcatcctggggtgatccaggcctgcaaactcaagcacaagcttagcttggtgcagaggctcccactttagtgtttgggtgctggacccctctccctggccaaggcatcctctggcagaggccctgggtccccggcagtagctccggttgccgagctctcggggagcaggagggccgtcggcctgagtcacgctggggcaaaaagatggcctgccaggagctcattttctgcactgatgggcctgattgctaaagcaggggctcctgggcggaatcaaaacgctgattaatattcagctggagctgctgctgctgctcacagcaggcaggtgaaaatgtcagtcttcacgtgggttttccccgacttcccctccacgctcttccatggggaagctgctcattcagggatcagcaggtatttatcgagtgcctgctagggccaggcagagcccagggccagggaaacagtgagaacaaggggccacaagtccctgctctcgtggaagagatgtcacctgaggcaggtgacctgtccacaggagcctgaccctcagcatgtgaggagccaagaaacccggggccagctgcatgccaggccccactgagcaggggagaaggttgcgggggcacaccgtcccccagctgtatccctggaatgaggtgcaggagctgctgggaaaagccaggtgacctgcacaaccgggtcttcagtgggctgctttgacccctgcccgcccaaacctcagctgcttcctgaccacgggcccgacctcacagccagcactgatacttgctaccctcccccagacatgtttgtaggggaggtgctatttttgttccaattcacagatgggaaaatggaggctctaagacactgaatgcagttgcactaatcagtagcctagcacccaggttggggtgacccccaaagcacagcctccttatttctgcagtgttctcagaattggcctgagctcggcctgttcctgtgtcccaggagctcccggggcagccagctggatctgccagcagagcgatgggggtaaatactaaatactcaggaacctgctgatggcaccctctcccctctgccccaggagtgggtcaccagcaccgaactcctcatctctctagaccggctcaacacgtttggggacgacatcttcaaggaccccaaggtgctccagtcctactattatgccgtgtccgacttctctgtgggcggcaggtaggagggaggagggaggcagggtggcagggctccaggacccaaacccgagagcggaaggtggctgctgtggggtggggggtgggggggcacagaagccaggtgtgccccaggggagagggagggagcacctgccattcgaggccctgggggtccacacccagcccacctcctgccgggtcccctgcatcagctgatttgccatgtgccagacactgggtcttggttcccattgtcccctcagcctggaggttccttccttcctccctccctccctcccttcctcccttcgctctcgctctctttctctcgctctcgctctctctcactcgctctctctctcttgctctctctcgctgtctctctctcttgctctctctcgctctctctcttgctctctctcgcttgctctctttctcactcgctttctctctctctctctctctctcactctctcttgctctctcgctctcactcactctctctcactctctctcgctctctctctctctgaaggagtttcgctcttgttgcccaggctggagtgcagtggtgcaatctcagctcactgcaacctctgcctcccaggttcaaggtattcacctgtctcagcctcccaagtagctgggattacaggcatgcgccaccacgcccggctaattttgtatttttagtagagatggggtttctccatgttggtcaggctggtcttgaactcccagcctcaggtgatctgcccgccttggcctcccaaagtgctgggattacaggcatgagccacggcccccttcccctttctagtataggggtgttactggcctagagaaaggcgcttctctctggcccgtggtcctggtcctggtcctggtcctggtcctatgcgccattagcacccatcagtgctgtgggcagtttgtttctcctccaacatctgtcccctccaggaagcaggggctgcctaggaggtagaggcccatctctcacctcaagtcccaaggcctgtctcgcacatggccacctggcagtgggtgcccagggagggctgtgggacgagggaggcatgaacagcttccacgtcagtgtttctcaggtttctttgaaaggagagaggaaaacaggtgcgttcctgccccagtcacctggggatggcagacattgatcagattgctccccagtgaacacatcagcccgctccaggatgacaaggaaggagaggaaagggagagcgtgtgcctggggtcggggaggacaggagctggtgctgcagatgggacccaagagtgggaaggctggggttgaggactaggggacggccaacgtggctgggtggagggcaggcgggtgggcgtggagaggttggcagagtgtcagggcctgggcgggtttagcctcacccagaagtcaagaggaagctgtggaaggatttggtcagggtagtaacagagtcagatttttaaaacacccccaaacccctgacagccaagtggggcagataggaggagagaggaagtcgaatgtcaggaatcgaggcgggaggcggcagcttggaccagagggctggggtgtggggcgcgtgggtctgaacgcgactgaggatggaaacgcagctctgtgtgtgaaccatgggccatgggagtggggagcggggatgacactggactctgggcctccacagttcagaggcgcttgggtggcattagagagatggagaagggggcggcatgaggctcaaatgcctgctttgggtgtgtgagctccagagaaggccaaggctcgtcactgagagcccctgtggccatgaggatccccctgctccaacctgcccccttatgtgagtcggtgggaggagctccccggggaaggcggccatgagctccagtgcctcctgtcagggggcttcgggccagaggacatctgggttccagctgccagagccagaccaccctcagaccacagctggctggggcaggctgctcatggcaggggacaggtggccccaacagcctgtgttcacagtggagcccgtggagtctcactctcctttcctgggtcagtgggcttcacagggctggtgtttacagcaccccctccaaggcaggggcagtcccttgtgacttccctggtgaccactgtccccaggattgcctggcgcctgcctcaccccaagaaaccctggggtgctgcctgcctaaactgggccttgcgtggaagccgtgctacgtgccctaccacacagtgtgtccgctatcagctaaagcacctggagccgcaacagcggttggtgattcgtcaacatccacagagggcagagcgtggaacgtggcttaagggagccactgagtggccacagaggagtgtccaggagctcagggtccacgtggagtcgatgaggacgggcttcagctccagctcagccacttagcatctgtgagttccaaggcctgagcctgatgcctcatgtgtggaatggggacgctaatgtccctcccacctctggtgaggctctagggagaagctattgccttggccaggggcagaagccatggcctctgagcagctcaggacagggacagtggtcgggacagggacaatcactcacagggtcaggctctgccgagcatgccgcgggctcccagggcacccctgttcctgcctgattccacctgtctcttgatcctgtgtgtggaatggggccacaggccggggctgctctcaaagaccccgtatttgtccattcttgtactgctgtaaacacctgagatgattatttatttatttatttatttatttttgagacagagttttgctctcgttgcccaggctggagtgcaatggcacgatctcggctcactgcaacctctgcctcttgggtccaagcaattctcctgcttcagcctcctgagtagctgggattataggcatgcgctgccacacctggctatttttgtatttttagtagagactgggtttctccatgttggtcaggctggtctccaactcctgacctcaggtgatccgcccaccttggcctcccaaagtgctgggattacaggtgtgagccaccatgcccagctgatggtaatttattaaaagaggtttaattggctcacagttccacaggctgtacaggaatcatggtgctggcatctgcttggcttctggggaggcctcaggaaacttacaatcatggcggaaagtgaagagggatcaggcacatcacatggccagagcaggagcaagagagcaggggatggggtggggctgacgggtgggtgccacacgcttctaaacaaccagatctcatgagaactcactctacagtaccacgggggagggtgctaaaccattcaggagaattcaacctgatgatccaatcagctcccaccaggccccacctccaacattggggattgcagtttgacacatttggtggggacacagatccaaaccatatccgaagtggactcatgggggatttggagtgactcaggagctgtccctgtttggggtaccttctttcctgccctttcggacacagttgagggatagctgctggaggcggttccctttgccttccacacctattgctggtgtgactgctggcccactctccacttgggagactaaggtgacttcttcctgggtccctctcagcccccaggtggggctcctcccaggcagaagctttctgtgccaggcacttgctagctggtggctttgggcagcttctctgtgcctctcagttcacccatccattctatgggggtggtaacaggctggtgaagatggaatgggtttgttccagagctcaccagtacagtcagttctctgttactgctgcccccagggcacatagtaggtgttcagtgagggccaagattgagggtggagtctggctcacacctgcaaacaggggctacctggtgactaactccttgtctgccctgccggcacctgcgggtccccttcctcctctgtgtcttttcccaggtgcaagtgcaacgggcatgccagcgagtgcggccccgacgtggcaggccagttggcctgccggtgccagcacaacaccaccggcacagactgtgagcgctgcctgcccttcttccaggaccgcccgtgggcccggggcaccgccgaggctgcccacgagtgtctgcgtgagtgtctgagtgtcacagggcatcagggacccgaggctggtgttgcaggcggggaaaggaactccccaaaacgtcgtggtgggggctgctcctgggtacgccccgggggcagctcggggtctctgtgctgctgcagagataaggacgagcagaaggggagcctggggagggggtgcatttaagcctcagtctctcctccactaagtagcttccctggaccaactctacccatgcagaggcgcctgtggtgggagggccggaaggtccccgacttgcttctttgtgttaaccgctcccaccccagctgctaatcggaaccaggctacccaacaagcaagggggtgctgatggcccacccagcctctcccacgggcccccaggcagccctttggtgtcccagcccccatgtgatgtggctttgaccacctaacctcagagaagcgctggagagaggatgatgccatcatgtcttctccagggacacaggccaagagcagggacccactgacttcccttctggctggggcactggctgcaagccccaccctgtccccagacagcctggtttcctccaggctctccatgcacagccgccgttgctgggggccagatcccagctggtgctggtgctgctggcaggagacacatcttcactcacaggctcgctgggcgggcagcttggcctctggaccccgctgtcctcttgggcctgggccactggcgaccagaactggggctgggccgggggcggcttgttctgagggtggggcactgtctgcaggagctgccctcgctggcctgcctccaccagagagtcctggggccaaggaagctgtgctggctggcttccactgtcccagcctgctgctgtctccatggtggggacacagaggccagactgcttctaccatgtcctcagctccatggtcacgtctgtctctcagtcagcagcctgggagccagggtttcaggcttgacccttcatccccaccctcacccgcagctgagacagccccgagccctgaattccgcctcatccacatcgctccagtctgtctaacttctgtccattgcagccgatgccttgggcctggccctgcctcctctccctgcacacccgaagcttcctcttccctgctctccctgttcccagccctcccctaactgcagctaaggctcttttcttgaaacacggcctcactctgtcacccaggctggagtgcagtggcccaatcatagctcactgcagcctcgaattcctgggtgcgtgttcctcctacctcagccactagagtagctgagactacaggcacatacatcaccatgccaagcaatgttttatagagctcggctctcactgttgcccaggctggtctttacactcctaggctcaagcagtcctcctaccttaccttccaaagtgctgggatcacaggcgtgagccatggcactgggccaagactttctaaaggacaaatttagtaacatctattccctgcttaaaccttcccacggctccccctttgctcccagctaacgtccactgaccacggcagcccagcctccctggagcaagctctgctagcctctgacttcacaactgcccctgcactgcaggccccccactgcacaaagtccttccttccctgccatcacacgacatgccgtctgcagccagcctcatggcacacccgcaccaggccacgcgtctgtctctgcatgtggggtatcccctgggctttcgcctcctgtctgcgacgcccttcccgccccctcttcctctgcctggcctattcctcactgctcagccttcagattcagcgcggccatgacttcctctcggaagccttgtcccaccaccccagcacagctgcaggggccccttctttcggctcccaaagcccccagcctctcctgtctcagccctgcacctgcagggggtttgcttgcttgccgtctgggctgtgggcagcacgagggcggcaggtgtaaatgggtccgcacctttcatggatccacccctgagctcactctgggagccaagacagagccagtcctgcacacagacttttaaaaatgatttaatgggggaaatgaaaggtgacttgtgctttctgtacccctgagtgacctcacacaatagtgagagtcacactattatggcttggaggacctccaggagattttggagagagccaagctgccactccagaaggcagccagcctctgatcggtgcccatctatctgggtgtatatccttgttgcctgggatggtcttctttctgcctgttgttttggtgtatttactaacagtgtcccctttgctcttaagagtgtcctgttttggaaaatcaattgatcaatgtctagccttgatcaagctgggcctgaactccattctggaccatgctcttgcccttctctttgcactgcctgctcatttagcacagggaggctgactgacacagatgcagcctcctaccacatcacaggggactcacacacctttccccactcctgcccatagcctgcaactgcagtggccgctccgaggaatgcacgtttgatcgggagctcttccgcagcacaggccacggcgggcgctgtcaccactgccgtgaccacacagctgggccacactgtgagcgctgtcaggagaatttctatcactgggacccgcggatgccatgccagccctgtgactgccagtcggcaggtgagtggactccacatccccagcctccgaccctctccctttcctggcctcaattgccctgtgcccttcctctcccaggctccctacacctccagtgcgatgacacaggcacctgcgcctgcaagcccacggtgactggctggaagtgtgaccgctgtctgcccgggttccactcgctcagtgagggaggctgcaggtgagggcgaggggcggcccagtatggacacattgcactgaatgacaagaagcaggaggaacaggctgtcagcagtccctcccctccccatcccttcctgtctgcagctacctcgccctaatcctggtgaagactagagacactcagctcctggagaggccaagagacaaaaacagaccttaatgagaccaggctgagccctgtggaagctcagcggatcttgcaggtggagggcaggcttcctgtaggaggtgctgcataagtgcagggagaggggaaggacaggtgtttgaggtggggtggggggcacgggaggcctctggaggagccgtggatcagtgagaagcaggagtgggtgagggggaggctgcgtggaggctacagcaggaacgcctgggcagcctgcatgggggtttgactgtggagagggagagcagggcagattccagagcccagtgcaaggaggagctaataggacatggtgaccagggggtggaagaggaagaagaggtggaggctgaccttcggggttctctgggcctctggatagcagggcacgcagtgtggggagcggggtgggagaggctgagtgtcatctgggtgcaccgagtttggtacctagtgggacagctgaggggagagagggacaggggctcctggggtctggaccttaccccaacacatttgccatcacttgattgagaaagtatacaatggccaaaaaacaaaaacaaaacaaaacaaaaacctatgataaatttagaagctttttttttttttttttgagacagattcttgttttgtcaaccaggctggaatgcagtggtgccatcttggctcactgcaacctccacctccccggttccagcaattctctgcctcagccttctgagtagctgggattacaagcatgcaccaccatgcccactatctctatttttttttttaagatggagtcctcctctgtcacccaggctgaagtgcagtggcgcgatctctactcactacaacctccgcctcccagactcaagtgatcctctcatctcagcctcctgagtagctgagattacaaatgtgcaccaccacacccggctaatttttgtattttttggtagagatggggttttgccatgttgcccaagctggtctcaagctcctgggctcaagtaatccaccctcctcggcttcccaaagtgctgattacagacgtgagtcaccgcgcctggcccagaagcacttttaagtgaacttgctttggttgataacgggcatctttgtatatttgagaggcagcagaaacacattggggatatctaggagagctctgattccttgtaaaatatttggtggttctgggcataaaactgaccatgagatggggcctggctgcttccctggggtccctctgtcctctggacctttgcaggtgccacacctcccacccctgccccctctccccagcctgtggctcacagcctcctgctcattcttcaggtctcagctgagcagccccgctctcgggacaccttccctcccacctgcccctcgcctgcacacccaggctgagtcagaggccccacagtgcaggcacagcctctcgtacatctcccacaacacgtatcgcggtacagggtctgcgtgatctgtctgtctacaccagactgggattcaccagggaggaaccatgtcttattagatgagtggatggatggagggagggatggaaagatgcatggatgggtgaatgaatgggtggataggtggctgctggacagaaagaaggaaggatgaataagtggatggaggagtgaggggatagacagaaagattcatggaggccgagcacggtggctcatgtatgtaatcctggcactttgggaggccaaggcaggtggatcacctgaggtcacgagttaaagaccagtctagccaacatggtgaaaccctgtctctactaaaaatacaaaaattagctggacatggtgatgcatgcctgtagtcctaactactcaggaggctgagacaggagaatcacttgaacccaggaggcagaggttgcagtgagccaagatcatgacactgcgctccagcctgggtggcaaagtgtgactctgtcccaaaaaaaaagattcatggatgatgagtgagtgcgtggatgacagatggaaggatcctggatggatgtgtggtgggtgggaagatggaccactgtaccagtgatggatgggtcacttccttggcaagatgggaacagtaaagccaggtcagttacctgcgtcagcctcactcctgatgttggcagcagggaaagctcccttcctaggatgggctgttgccattctgaatttgctcattgcacattttcctcttgtcctgtctcattggcagaccctgcacttgcaatcccgctggcagcctggacacctgtgacccccgcagtgggcgctgcccctgcaaagagaatgtggaaggcaacctatgtgacaggtttgtgagctaatccagcagtaagcttgctggaagtgacctgggggctcactgatgaggcaccaaagctgtggagtgcggggaggagcaaggggcacggtcttcatggacttgggtgaccttgtcaccctgtgcccttcctggggcaccatgtatctgtcatacaggaagttactcaaaagctttatggcactgtttgtgctttgattcaacaccactgatcattcataagctgagaaaatacatgtcttagcttagaatcctgaaaagaaagaactggaatgataggagagaccatctaatccagggatagtaaatagatggtgctcgtactaccacctgctgtggcagacatcgctaatggagcactatcacaggcctcccgtttcacactcactgcagacatagctaatggagcactatcacaggcctcccgtttcacacccacagcagacatcactcatggagtattatcaacgctcccctttcacacccatgacagacaccactaacggagcactatcacaaccctttcacacccacggcagacctatcacagccctcccttttcacactcaatagacattactcatgcagcactgtcaatacacccctttcacacccacagcagacatcactaatggtatacccatggtacacatcactaagggagcactatcacagtcttcccctttcttacccacagcagatatcactaatggagcactatcacaaccctcccttttcacactcacggccaacatcactcatggagcattgtcaatgcacccctttcacacccacagcagacatcactaatggtataaccatggcaaacatcactaatggagaactatcacagcctccccctttcatacccacagcaggcatcactaatggagcactatcaacccttgcctttcacagccatggcagacatcactaatggtgccatatcaaactttccctttcatagccatggcaggcatcactaatgaagcactactacaacccttctttttcacacccatagcagacatcattcatggagcactgtcaacacacccctttcacacccacaacagacatcactaatggcatacccatggcagacatcactaagggagcactatcacaaccctcccctttcatacccacagcagacatcactaatggagcaccatcaactctcccctttcacaccatggcagacatcactgatggcatacccatggcagacatcactaaggcaacactatcacaaccctcccctttcacacccacaacagacatcactaatggggcacagcagtcttggccatgagccctactataacctcaggatccttcttaacaccctgcttcaggaagcccctacccactgagctggattttgagcctgtttgccatctttgcagtctgatcatggtacaaatggggcatctgaagctctgcaagtcaaaggggctctcccaaggccaggaagtacataaacttcctctttcaagtgttcaagaggcctccaagctccagcagtgcggccagcagacaaacatgggtttagctccttgggtacacactatctcttcttcctggctttgtgtctgacattcaccagagctgcttggagaagtggcagattctggggctggggctggaaaaagacaagataagcccaaggcgtcttacagtgccaggaagcaaggaaatgctgaaaaacagagacagacacaaacaaaacagcccaaaccagaacgtgggcccatgtcaaaaggacacaggagccgacgtgaaagagctctcagggctgaaacaatttgagcaacaaaataaacgatagtattggattataacccagagaataaagtcaaatccacgaatccatactgatgtaaatagatgattgaatacataaatagatgggcatgaagagacaaaccttccttgcagaagaattccaagtaatgaatgtagaaatgaaggaactggaaaaccactgttcagacctcacagtggtaattgctacaggcaagagctgccgatgaatgctgacattggtgggcagaactttaaggaaagagaggatatttgcataacctcaaaatatctattaattactggggtggctttaacatctgtccgtgggttctttgatactcttcctctaggaggtcgagcttaatccccctctttttgagactgggctgcatttagtgacttgctgcttttttttttttttttgagacggagtttcgctcttttgctcaggctggagtgaagtggtatgatctcggctcactgcaacctctgtctcccgggttcaagcgattctcctgcctcagcctcctaagtagctaggattataggcacccaccaccacgcctggctaatttttgtatttttagtagagatggggtttcaccatgttggtcaggctgatctcgaactgacctcaggtgatccacccacctcggcctcccaaagtgcgtgagccggccaggcgcggtggctcatgcctgtaatcccagcactttgggaggccgaggtggatggatcacgaggtcaggagttcaagaccagcctggccaacatagtgaaaccctgtctctactaaaaatacaaaaattagccgggcatggtggcgcacacctgtagtcccagctacttgggaggctgaggcaggacaattgtttgaacccgggagacagaggttacagtgagctgaaatcgtgccactgcactccagcttgggcaacagagcgagacttcgtctcaaaaaaaaatttaaagtgcttgagccaccgcgtccggcctattcagtgacttgcttctaatgactggaccgtggtgattgcacagtggagagactggtagacagcacaggtgatgaaagtcagcatcgcttggatgtcatgtgggtttcctgtgcccccatgtgatatgacgagaagggtacttcacctctgtgtatttctttcccaagcctataactctggtctaatcatgagaaacatcagacattctaaaaatacctgatcagtgcttttcaaaaagtgtcaagatagtggcagacaaggaaagactgagaagcggtgataggttggaggagaacaaggataccactaaatgcaacaccgtgtcctggatgggatcctgcagcagaaaccagacattagaggaaaaagtggagaaatcctattaaagtcgctgggcgcggtggctcaagcctgaaatcccagtactttgggaggctgaggcgggcggatcccctgaggtcaggagttcgaggtcaacctgccaacatggtgaaatcccgtttctactaaaaatacaaaaattagccgggtgtggtggcaggcgcctgcaatcccagctacccgggaggctgaggcaggagaatcacttgaacccgggaggcggaggctgcagtgagccaagattgcaccattgcactccagcctgggccacagaacaagactctgtctcaaaaaaaaaaaaaaacaacaacaacaaaaaaacaaaacctaataaagtctggagtttagttaacttagttttgacaaatgtactgtggtaatgtcagatgtcagcatcaggggaggctgtctgaagcaggtatgggaacaatctgtaatgttcttactactcttctagaattctgaaaaaaaattgtttttaagtttctgcagtgattctagactctcattggtccagctgggataccctggccccgccccttcctggctgattcacgtggccctcgtgggcatgtcctgcctccatttcagatgtcgcccggggacctttaacctgcagccccacaatccagctggctgcagcagctgtttctgctatggccactccaaggtgtgcgcgtccactgcccagttccaggtgcatcacatcctcagcgatttccaccagggtaagagatgctccctgcaaacgcctcccaagggtctgctcccagcctaggcaggtgatcctgccctggggagatcttgcattagtggatctcccattgtggagaggagccacaggcctgcacagcctaggtggggtcgggggtgagatgatggctccccagtgcccacctgcgacccccagctccctccccagtccctgactcttctctttatacccgtggtggggttgggggccgggtacgtgacgctttttggatcctgtaggggaatttcccactcaccccgttgagactggcctcccttggtgtgtctaaacactggggattcaggctcagtctcctggcctccacttattgagcacctgctgtttgccaggcactgtgctgagcacctaacatgcaaggattctcattcccctttcaatgatgaagtaactgagacctacaaaaggtaggccacttgcctgaggccacataacagttgtgagcactgcatttgtcagctcctgagttttgctcctttttttttttttttttttttttttttttggacacagggtcttgctgagtcaccaaggctgaagtgcagtggtgcaagattgcacagcacagctcactgcagccaccacctccctgggctcacgtgatcctcccacctcagcctcctgagtagctaggaccacaggtgtgcaccaccgtgcccggctaatttttatatttttttctaaagacagggttttgccatgtctttagacccaggctggtctcaatctcctgggctcaagtagtctgcccacctccgcctcccaaaatgctgggactacaggcgtgcaccaccatgccgagctaatttttgtattttttttttttttttttttttttttgtacagacggggtcttaccatgttgcccaggctggtctagaactcctgagctcaggcaatcccgcccacctcggcttcccaaagtgctgggattatgagtgtccgcgcccagctgttttgcccttaaccgctgtggtggcctataccgtggtccctgactccaggtggcacagccgcatatttaaagaggaaagcagcagagctcggagctctgcattaaaccagaggctgcgtgggccccagcgatgtcccacggagcgccccgcaccttccgcctgtccccaggaaggagcgaggcatcagctgaaacagaagaacctcagggccgacgctggggcggccccagacatgagggccgcgcgccctctgctggaagccgcgcagaaagcaggaccgagagatgcgcggaccggcgccgcgtgtctgggtcctgggtccgggggtctagggtgtcagcgttgggcaggactcattttctagaccctaagaacagtgtcatgatctgttctcacattgggccaggcactgggtgtggccggcccttcaggggtgtcatctcattttgtctcacagttgcccttgcgcaggagttctcaaaactttttggtctctgaattcctctttttttttttttttttaagacggagtctcactgtgttgcccaggctggagtgcaatggcgtgatctcagctctctgcaacctccgcctcccaggttcaagtgattttcctgcctcagcctcctgtgtagctgggactgcaggcacccaccaccacgcccagcttatttttgtatttttagtacaggtcgggggtttcaccatgttggtcaggctggtcttgaactcctgacctcaactgatccaccctcctcagcctcccagagtgctgggattacaggtgtgagccaccgcacccggcctctggatccctttatgctcttgaaaattattgagaaccccaaagtgcttttgtttatgtgggtggtttgtatggatatttgctgtcttagaaatggaaactgtggctgggcgcagtggctcacgcctgtaatcccagcactctgggaggccggggtgggggtggggggagcggatcacctgaggtcaagagttcgagaccagcctggccaacatgacgaaaccccgtctctgctaaaaatacaaaaattagccaggcgtggtggccagctcctgtaatcccagctactcgggaggctgaggcaggagaatcgcttgaacctgggaggcagaggttgcagtgagccgagatcgcgccactgcactccagcctgagtgacagggtgagactctgtctcaaaaaaaaagaaaacaagtagtttttaaatttttattatttttatttatttttattttatttttttagcagagacggggtttgccatgttgaccaggatggtcttgatctcttgacctcatgatccatctgcctcggcctcccagagcgctaggattataggtgtgagccaccacacccagctgatttttttttttttttttttttttttttgagtcagagtcttgctctgtcacccaggctggagtgcagtggcacaatctcagctcgctgcaacctccgcctctcgggttcaggcgattctcctgcctcagcctcctgagtagctcagattataggcagctgctaccatgcctggctaatttctgtatttttagcagagatggggtttcgccatgttggccaggctggtctcgaacttctgacctcagatgatccacccacctcggcctctcagagtgctgggattacaggcatgagccactgtgcctggccttctagttccttctaaatgcctgtctgcaaacttctcttcatgttgacatcttcctttctctgacctctttccccactccgttccttccttcttaccccttggctgccccaggtatttggcctctgcctcattgcccgctaccccctggagaggcacctccttaaggtcactcgctgtgtgctgggctgtgctccgtgttaactgctgtggccagagggaggaggcactgaactggcactggggaccagaaggcctgggctcccgtcgtggctgggccccttcctaaccaggtggcctccttgcctgaggtgctgttaatgacatgggccactggaaggacagggttcatgaggtcacaggtgagaaagttctctgagaacctgaagatgaggtcaagtctggtactattagagatggccctgatgtcccagggcccccatgtgggggtcttcaggctgtcttcatgctgagctcaaaaccccactgaaagggcagggcaggcttccaggtctgaccatgcccccaagcagatccgggtccctgagctttctagcttctcctggggctccctcctaccccagggcccccacctggggctggcacctggagaccaccctccggggcctcacactgatcggggggtgtctgtgtttgctgtctaggagccgaaggctggtgggccagaagtgtggggggctctgagcaccccccacaatggagcccaaatggggtcctcctgagcccagaagacgaggaggagctcacagcaccaggtacctccagcaccaggtgggggctggccgccctgtgtcggttcctcctgctgctaaacaacttgccgcatattagaggctgaaaacaatgccagtttattctcttagagttctggagaagtcagaaataggtctctcggagctaacatcaaggtgtcagcagggctgagttccttctggaggcccatgggaaagtcccttccttgcctttcccagcctctagaagccgcctgcattcctgggctcatggcctcttcctccatcttcaaagcagctgagtttttctcacgccccatcactggcaccaactcccctgcctccctcttgtgtatttgccattaatctctaatgattgatggggcccagctggataacccaagaggctcttcctacctcaggtcagctgattaacaaccttaatgtcccctgccacagaacacaccatatttatggattccagggattagaatgtggatgccttgggaaggctgttattctgccatcagaccaccgtatctgatgaaacccccgtttttctggtcatagctttgtcatggagggcttcttcagtgccacagggccatagccactgtcatggcccagagaatctgtgtttcccatcagcccctcacccgccaggccactgcaccctaagcccagggccatggcattcttgcaaaaggaaggaggttcttgatcattctgacctctccaccccacagtgaggggaactgtggtctcctggcgactgtctcagccccagaacccagagcctagagcccatctttagccccactgtggctgattcaggacctgccagcacccccgaccagctctgccctttccctccctccctctgccagagaggccggggagatgatgtcacaggtggctgaggagccgtgtgccctgcagccaggaagtcaaaggcgtcgggcccctcgtggggcaggcgctccaagctcagaggcccatgagcaaaaaactcactctgttccatggccactctgctggcatatgtaagaaaaggggcttattcctgaaagaagcgcttgctgggtgttgggcacactgcaggggtgagatggatggacggcctgtcctcatggtgctctcaggccggcccgctcccggggcaccctgagcagctggaggtgagggcatggcaggggagccaggcttctgcctgttgcttacggtggggacacagaaacaaacgtctgggctggctggtgacagcatcagagggaatgaacacatcgaccctctggccagcatgtccaccttctgtattctgcctacgagcactcagtggggcaaagagcaggagctgagggaagataagtatttaggccgagcgcaatggctcacacctgtaatcccagcactttgggaggctgaggttgggggggatcttctgaggtcaggagttcaagaccagcctgaccaatatggtgaaacctcgtctctactaaaagtacaaaaaagttagccagacgtggtggtgcatgtctgtcatcccagctactcaggaggctgagacaggagaattgcttgaacctgggagatggaggttgcagtgagccaggattgcaccactacactccagcctgggcgacagagtgagactccatctccaaaaaaaggaaaaaaaaaaaaagagtatttaatggtgcaagcttggggcagtcccaggaggggctgggtagcctgttggtggactgtgatgcggccggttgtggaacagtgtgtgaaaccatctcacgtgtagaacgtgagtagcaaaggatgggaggggagcattgcgctcgtgctggtgattgattctggaggccgaatcggagtgcagccggggcatgtggccaccagctcccggggctccccgcttcaggccgcttctgcacaggtaagaaattcccccagccaggaaacgctctggggcagagggacacagggactttcagtgtttcgggagctgtccaccaaagctgtggcggggcgcgctacagaatttgagggatgcactgcagaattaaaatcccacccccccagttcccaaatagggggaagtactattaaaggtactaaaatataaacactttttttcccctgcagttttgccctttatttgtcatggtgttttttggtttgctatttgatgccattctaggtaaaggaaaattttaagttattagcatgaaacatataaagttattagcatgaattttaccattctttttttttttttttttgagacggagtcttgctctgttgccaaggctggagtgcattggcgtggtcttggctcactgcaacctctgccttctgggttcaagcaattccctgcctcagcctcctgagtagctgggattacaggcacccaccaccatgcccggctaattttttgtatttttactagagatggggtttcaccatcttggccaggctggtcttgaactcctgaccttgtgatccactcgcctcagcctccaaaagtgctgggattacaggcgtgagccacaatgccaggctgcgtattttgttcttacgaggacagtggaaatactgcacacaacaagcccagccacttttatttcactccttgacacacgcatgttccaccaacatggcacacctctgtggctttctcacgggtaagggaaagaccactgggaaaggaggagggagggtactgggaaaggaggagggagggtggcctgtgtcctttcctcctgggtcacgaacttctgaagaaatgatgggctgatgcagtgaaatgacatgagtcagaaggtaccgcacagcgcttggtggttcgtgtctcagaaaactagtgccttctttccgagttcagggcaagttctgattggaagggaaagcatggcccggggcccagagcacctctgctcactcagccagctcacttaccttgctgtcacctggaggtcccgctaaactcctgctgctgggtgttccctaggaatttcgtgctcatgggcatcgtgaatgctacacatgagcagacggcagcctctctggtcacacgtgtgtgtatcccctccgttcaccctcggactccgtgttccatcggacgtcacttctaaaacccaagttcaaagataaaattattaagaatgtgaagatggtcacagcagagcatgaagccaagtgtgggggcgtgtgtgactgcagaggtgtgggtgggccccctgcagggtctgctgtgcaggaagcttttgattttctacccactgcacttttatcttttttgaatgtttagttgccgataaaatcaacatagacatttaaaatcaagctaaccatatgaagactgtcaaagccttcttctcttgtcttcagagaagttcctgggagaccagcggttcagctatgggcagcccctcatactgaccttccgggtgccccccggggactccccactccctgtacagctgaggctggaagggacaggcttggccctgtccctgaggcactctagcctgtctggcccccaggatgccgggcatcccagggaggtagagctcaggttccagtaagtatccccttctgtcctgagagatggggaggtgagaggggtggtctctgaggtccgggcacatttcagatgcccctgtagtctggggggctaccccccatccccaggcatggtacccccccaccctatgtcgggatctcactttgaccgcttctctcgccagcctgcaggagacctccgaggacgtggcccctccactgccccccttccacttccagcggctcctcgccaacctgaccagcctccgcctccgcgtcagtcccggccccagccctgccggtcagtaaagacaaccacatgcccaagacccgagtgcttgccaggtctcagaactgggctgggctccggcggtcacagtcttgtcagggccttgcggccgggtggttattgtcctgttttgccaagaaggaaccttagtcaaaagtcaggacagttgccagaggccatataacctgtgaaggcaatggggatggtggctgaggtcagatgcagggaatggacaggagagaggcctgaaggatgggcctcagaggcaggtgtgcggccagcaagccacccagacccgctgggtgtgctcactccaccttcactggatccaccaagccccctgtccccgctggacacagcccacagccggcagtccaggagtcccctggcagagtgactcccctgctggtcactggcggtattgtacctaagccaccctaggagggtctggtcttcccaaagagggggccaagccatcacacatcattgatgggggtctgtcaccacctcccaccctggtcacagtgattgacagccttagcctctgatctgttcctcattagaacctctacccacacgctattttaaaaatcaatataggtcgggcgcagaagctcacgcctgtaatcccagcactttgggaggccaaggcgagtggatcatgaagtcgggagtttgagaccagcctggccaagatggtgaaaccccacctctactaaaaatacaaaaattagctgggcgtggtggcacacacctgtaatcccagctacttgggaggctgaggcaggagaatcgcttgaacccaggaggcggaggttgtagtgagccaagattgcgccactgcactccagactgggcgacagagccagactccatctcaaaacaacaacagcaacaataacaaaaaacagtctggtggggtggtctgcacctgtaattccagctactcaggagactaagactggaggatcgcttgagcccaggaggttgagactgtagtgactgtgccactgcactccagcctgggtgacaaagcgagaccttgtctctaaaaaaaaaaaaacaaaacaaaaaacaaaacccctagtgtatgtgtgtaaaatgaagctgagctctaggctcagatgtttacaaaggggtttttctacccttccagcaccacgcaggacatttgaaagtcatgtggggagtttctgggaatgtcaatttctgggaactttaggcctcttcatccacatgacaaccaacatgtcctcagatttgcttccaggggagggagattttgctctttttgaggacctctggctcagagggtcagtcttcccctgggcctcttttgagtccaagggtgctgggatgccctggagaagcagaggacatagcgaccctccccagcacccgcaatccccaaacttcctctttccatgggtaatgttttgggaggcctctctctaaacctttctgtgtgtacgtacttaacatctgtatttttttaaaaacatagaaatgtgattacacagccgggcgtggtggctcacgcctgtaatcccagctctttgggaggctgaggcgggcggatcacttgagctcaggagtttgagaccagcctgggcaatatggtgaaaccccatctctactaaaaatacaaaaattagccgggtatggtggcatgtgcctgtaatcccagctactcgggagggagaattgcttgaacctgggaggcggaggttgcagttagccaagatcatgccactgcactccagcctgggtagcagagccagaccttgtctcaaagaaagaaagaaaaagaaagagagaggggaagggagggggagaaagagagagagagagtgagagagagagaaagaaagaagaagggagggagggagcaagggagggaaaagaaaagaaagaaaggtaatcacacagtacgatattctgggacttgctttttgtcagctaacagtgcgtcgtggaggttgttccttgtcattacgcgtagaaagcctggttttctgtgtctggtgtgtaagattctgtggtatgggtgctctgtgaggttttagccatccccctattgacaggcgcttaagtggcctccagttttccccattacaaccgtgtcacagggaatagggaccagcctcatagaaaggtcttggtattccagtataagtgtcgctttaggacagagtgctggaaatggagatgttaggtcaaagagggagcattttccattttgatccacactgccaaattttccttcagaaaggctgctctgatgaggagtgtcggccgcctccagtctccctgttctgtgtctacagatggtcattttcatattttgcccagagtttatagttgttttctgtgggaaggttgatctgccaggatcccctgctcctctgttactggaagcaaaaccttctgattagtattcgtacatccacactcttttttcttttctttctttttttttttttttttttgagacggagtcttgctctgtcacccaggctggagtgcagtggcatgatctctgctcactgcaagctccgcctcccgggttcatgtcatcctcctgcctcagcctcccgagtagctaggactacaggcgcccgccaccacgcccggctaattttttgtattttttagtagagacggggtttcaccgtgttagccaggatggtctcgatttcctgaccttatgattcgcccgcctcagcctcccaaagtcctgggattacaggctcgagccaccgcgcccggcccatttttttttccaaatatcagatttctttatttttaaaatgtacacattatagttgatctaaatacaagatgttcactttccttgcaggtaagaaatgtcactgacatttctgtgtcaattagcttcttttacatcaaaatcctgttacattcattagtctcaaaatctcctataacacttagaactttaggctgggcgtggtggctcaagcctgtaattccagcactttgggaggctgagacaggagtccttgaggccaggagttcaaaaccagcctggacaacaaggcgaaaccgtttttctacaaaaaatttaaaaaattagctgggtgtggtgccacacacctttggtctcagctacttgagcggctgaggcaggaggatcatttgaggccaggagttcaaggctgcagtgagctatggttgtaccactgcactccagcctgagtgacagagcaagattctgtctctcttaaaaacaaccaaaacaacaagaaaaatcttaaaaccttagaaatagaccttaaactttgcctaaatgtagcattcagttatgagtagcccaggtgagtttcctacacgccatcctccactaaaattcatctataaaatgttaccagtctgagagatgtgaatggtatcatcgttgtttaaatctatatatcgttaataacctgtggatggatatctttccataaaattctcagccatatctatttcttcttgaaaattgcctaatcatctcccttacccttgaattgacaatttgaaaaataaaaataaaaatcaaccagcgcagtggctcacacatgcaatcccagcactttgggaggccaaggcaggaggattacttgaggccaggagttcaagaccagcctgggcaacatggagaaaccccatctctacaaaaattttaaaaattagctgggcttggtgtcttgcctgtagtcgcagctacttgggagggtgacatggtgggatcactggagactaggagtcgaggctacagagctatgattgcaccactgcactctagcctgagtgacagaatgagaatctgtctcaaaaaaagaaaaatcattgattgctagtctgcctttatatacgtgggcctggtccatatgtgaacaggaaggttttggggggaagcatgtgcagggagcttgtgcctcctctcttcctctctcccttctcgctctgcaggtccagtgttcctgactgaggtccggctcacatccgcccggccagggctttccccgccagcctcctgggtggagatttgttcatgtcccactggctacacgggccagttctgtgaatcctgtgctccgggatacaagagggagatgccacaggggggtccctatgccagctgtgtcccctgcacctgtaaccagcatggcacctgtgaccccaacacaggtgagtctcctggcaccccatccgaaggcacctgggttatacccaaaacagcgggatgagtactgacctgaacagggccagcctggcacaggcattgaggtgttggccaagctgtggggcagtgcgggcactgagctttcccgtgctgctcagtgcctgggcacctcatagtttaataaaagttactactggaatttgttgaagcctcaggctctgtgccaaggactttgtatgtatcaggtgataaccataagccagctgctctgtgggccatctgtccgcgccaccttctccctgggctggcccttttcccaggaaggaccagggaaagacctcaggggtctttacatgcagagggtgctgtgaggaagggcagaggcaccagcatggcaggtgacagcaggagggttctcaagaaggtcacacaggtgacagcagctcataggcaccaacccagaaccacagacctgccaccctcaccccttagtggccatgggaaagtcacttccctccctgagcctgcttcctcttctgtaaggtggagataatgacagtatatacactgcttctgtttctacacaaagccatatggtggtcaggagacgctcaggctctgaaaacacaggcctgggttgcataggagctcagccatagctaactgggaatgccttagggaagcgcagataatgaaagtctctacttttcaggacacttgggaaataataaaatagtgtcaccaggttcctgcatgtgctagtcaccttctctacactatatcattgactcctgcagacatccctgcggggccgggacccttcctgtcccatctcacaggtgaaggccccacgctgcagtgcagatgcatggccagcaggtggcagagccgtgcctccctccagcctggactcctgaggcctggttgctgctggctactcattctcacttctttttattttattttatgttttattttttattttttgtggggggtgacagagtctcgctctgttgcctatgctggagtgcagtggtgcagtcttggctcactgcagcctcctgctgggttcaagagatcctcccacctcagcctcctgtgtagctgggattacagacgcctgtcaccatcctcggctaatttttatattttcagtagagatggcgttttaccatgttgaggctggtctcaaacctctaacttcaagtgatcctcctgcttcagcctcccgaagtgctgggattacaggcgtgagccaccacgcctggccaactgatccccacttttataggagcagacctggccttgctcaaggtcacatggccaggaggcacctgagaaggctggactcagacctcttccactcccacactgacggcttcatgcctagacacctgctgcctccccagagcaggtgggggctgtctgagaagaaggctgctgggcatttttcttcctgaaaagacggtagccaggcgtggtggctcacacctgtaatcccagcactttgggaggctgaggtgggcggatcacctgaggtcaggagtttgagaccagcctggccaacatggtgaaaccccatctctactaaaactacaaaaattagctgggtgtggtggcaggcacctgtaatcccagctgcttgggaggctgaggcaggagaatcgcttgaacccaggaggcagaggttgcagagagccgaaatcatgccattgcactccagcctgggtgacaagagcaagactccagaggaaaaaagaaaaaaaaaaagaagaggccagacttgggctcatgcctgtaatcccagcactttgggaggccaaggcaggtggatcacctgaggttgggggttcaagaccagcgtggccaacatggtgaaaccctgtctctactaaaaatacaaaaattagccaggtgtggttaggtgcctgtaatcccagctacctgggaggctgaggcatgagaattgcttcaacctgggagatggaggttgtagtgagccgggatcgcgccgctgcactctggcctgggcgacagagtaagactccatctcaaaaaaataaaaaaaggccgggcacggtggctcacgcctgtaatcccagcactttgggaggccgaggtgggcagatcatgcagtcaggagatcgagaccatcctggctaacacggtgaaaccccatctctactaaaaatacaaaaaattagccaggcgtggtggcgggtgcctgtaatcccatctactagggaggctgaggcaggtgaattgtttgaacccagggggcggaggttgcagtgagccgagatcgcgccactgcactccagcctgggcgacagagcggactccgtctcaaaaaaaaaaaaaaaaaaaaaaaaaaaaagacgtcagctgacctagccggggagggcaagcacaaccacacgccacacgccacatacagggcactctgtcttcttgtgtccatggcaagcattgataatcgagcccagacaaggccacataatccctccctgctgcagtgcttcctgcagcccctgtggaggaagcagggtcctcccatgactgggatcagtttgtcatccccacagagcctctggccctgccacaacttcctgctcagcttgggcaagtcctcatctgtgaaacgggcagtatagccccgctgcctaggctgagaggaggaatgagcctatgggtgctgggcctaggctgggacagttccccctggatgccagccctgctatgcatgagcgacctggttctcactcttcctcccaggtcacctgtgccttggctgctggggtgctgcctggggacctcctggaagtggtggtcttggttaaccccttctcagccaggcttctcactcagtccctggcagcgggtctcccttcccaagcaccccaggctctgagcagatgccaggtgcagtcggcctggggaagaagagtttgcagaatccaccgtcatcaggagccagagggcaggaacaggggttccctcccctgagactaggtatcccttgtgtatcccaaaccccataaaggggagcctctttgcaaagtcatgtgaaggccagaattctgggtctgtgtctcccttaggaaacgttgctcttccttttggtcccttggcatcaagaaaacaacagtgtagcgaatggtagccatgtcaccttttggttcagagagaggtttcggaatacaaaataataacagtgctggccgggcacggtggctcacacctgtaatcccagaactttggaaggctgaggcgggcaaatcgcttgaggtcaggagtttgagaccagcctggccaacatggtgaaaccccatttctactaaaaatacaaaaattagacaggtgtggtgacgcacgcctgtaaccccagctacttgggaggctgaggcagtaatatcacttgaacctgggaagtggaggttgcagtgagccaaattgcaccactgcactccagcctgggtgacagagtgagactctgtctcaactaataataataataataataataataacagcagcgatgagtatgtgtgccagagagtgtgcaaggtactttgaatgcatggtcttgttggaccctgacgagaaccctttgaagtcagtgctgtggttgttcccattttgcagatggggagactgaggtgtgggggcatcagacaacttgcccagctttgcacaggcagtaagtggtggacatgaaccaggtggtccagctccaggcctggaccctcaatccccaggccttgctgcctctgcctgggaaaggtccccaccccacttctgcccgggatgtgctccctaacctctcccaccgggatgcccaccatctctgggcattctgggttcagacagtggtgcttgtcttgcccctcagggatctgtgtctgcagccaccataccgagggcccatcctgtgaacgctgtttgccaggtttctatggcaaccctttcgcgggccaagccgacgactgccagccctgtccctgccctggccagtcggcctgtacgaccatcccagagagccgggaggtggtgtgtacccactgccccccgggccagagaggtaagtgactcctgccccggagccctgccccgcagagggccaagccccggcactgtgactatgccctgggctccagggttagggccctgggtttagggtgtggcaggtgagggagagcccagcttacgggcagcaggcatgacctctgaggacacggaatccctcagccccatagccagagccccaggctgccgcacattgccagcagaatttgggccattgagaatttgggctatttgaaaatacccgtatctggtccctggccccttagagcctgggttagtgatagctgaacaagttccctgggtgattctgttacacagctaaggtggaaaacctcgattaaacttctagcctttaaaaaatgtcatcaggtaggtaatgtgcaaagcagaaccacctacgcccacccttgttcccaggctccttgtattctttcctgctctggactcagacatcctcgactctgattttttttaaaaagcagctttattgagatactattcatatacctgacagttcacccatttaacgcatacaattcggctgggtgtggtggctcatgcctgtaatctcagcactttgggaagccaaggtgggcacatcacttccgtccaggagttcaagaccagcctgggcaacatagtgagactcccatctctaaaaaaaacacaaaaattagctgggtgtggtggcatgcacctgtggtcccagatactctggaggctgaggtgggaggatggtttgagcccgggaggcggaggctgcagtgtgccgagatttcaccactgcactccagcctgggtgacagagccagaccctatatccaaaaaaaatttttttttaaataaagtacaggccgggcatggtgactcatgcctgtaatcccagcactttgggaggctgaagcgggtggatcacaaggtcaggagtttgagaccatcctggctaacacggtgaaacccgtctctactaaaaatacgaaaaattagccaggcgtggtggcgggcgcctgtagtcccagttactcgggaggctgaggcaggagaatcgcatgaacccaggaggcggaggttgcagtgagccaagatcgcgccactgcactccagccggggcaacaagagtgaaactctgtctcaaaaaataaaataaagtataattcaatgacttttgacatgttacaatagtaatttttattatggtaaaatatatataacgtaaaatttgccattttaaccatttctaagtgcataactcagtgtcaggaagtacaatttgcaatgctgtgcagctgtcactcatccatctctagaactttatcatcatcccagacagaaaccgtacccatcaaatgtgttgttgaggccaggcgcagtggctcatgcctgtaatctcagcactttgcgaggctgaggcgggcggatcacctgcggtccggagtctgagactagcctggccaacgtggcaaaacctcgtctctactaaaaatacaaaaattagccaggagcggtggcaggcacctgtaatcccagctactcgggaggctgagataggagaattgcttgaacccaggaggcggagtttgcagtgagccaagagcgtgccactgcactccagcctgggtgacagagcaagactccatctcaaaaaaattaaaaaaaaaaaaaaaggattgttgaatagcccttcctccctccagcccctgataacagctgttctcctctctgtctctatgaatttgactgctcccagtattccatttaaacggaaccatacagtatttgttcttttggatctggcttgtttcatgcagtgtaatgtttttaagattcctagacatctgattttgcttttggtacgtgtggctgcattaaatcaatttgtcaaatgccatgtgctttcactgggactgttctgaaagcagctctctggcagccaacagccaacagggcagggcagatggctccagagccgggagctcaagaaccgagggatggagattgcactgcgggaccctgcaccccactggccgccatgctgtccctccattctcgttatctcccttacattttctagctcccgactgtggctcccctggcctgcagacatgcacgaggcccacccagtgagagtggacagttagagaagctcaggtggacccaggctgagacatacttgagggaggatttcaggggagcaggcagtgctgtgtgcagagggaaccacccttgggagggagggacacctggagtggactttagacctgggaccttctgccagtgcccttcttatccacaccagtgtcctctgggccccgggagggcctagcacactgagagctcacctggacatctgagtcagggttgaccggggtcaagtcctgatgctcacttgtcctgggaagactcctgcctgccatcctggccccttgcagcccctcccaggacttccagagctgcctcctgccctatgagctgtcctcacctggttccaggtgaatggccacttaaccatggggctcactcatcatcatcagtttcaatctccccctttcctgtctaattttatttctattttagaatccacaaggcaggtgctagcctcgaccttgaattctgttccagtttgtcttttcctttccgttccgttccgccttttccttttcagggttgcccttagcactattaacttttttttctctggaaacagagtctcactctgtcccccaggctggagtgcggtggcatgatctcagctcactgcaacctccacctcccaggttcaagcgattctcctgcctcagcctcccgagtagctaggattacaggcatgcaccaccatgcccggctaatgtttgtatttttagtagagatgggattttgccatgttgaccaggctggtttcaaactcctggcctcaagtgatccactcacctcagcctcccaaagtgctgtgattataggcatgaaccaccacgcccagccagtaccattaacttcatttcaacagaccgatgacttttgaggacacaaggagctcacaactattcttcacaatggcagcagctattttttaattataaaattagtacatactcttgactgacttagtaacttcataaaaaataaaaataaatgaaaatagaaataaatgtacatggccgggcacagtggctcacgcctgtaatcccagcactttgggaggctgaggcgggcagatcacaaggtcaggagatcgagaccatcctggctaacacggtgaaaccccatctctagtaaaaatacaaaaaattagccgggcgaggtggcgggcgcctgtagtcccagctacgcgggaggctgaggcaggagaatggcgtgaaccccggggggcggagcctgcagtgagccgagatcgcgccactgcactccagcctgggtgaaagagcgagactccgtctccaaaaaaaaaaaaaaaagaaatgtacatactcattgtaatgttggagcagtgtaaaaatgtcaagaggaacatgaaaaaaacatgtgagcagccgggcgtggtggcttacacctgtaatcccagcactttgggaggctgagccaaggcaggcggatcacctgaggtcaggagttccagaccagcatggccaacatgacaagaacccgtctctagtgaaaatacaaaaattagctgggtgtggtggtgcacgcctgtaatcccagatactcgcgaggctgaaacaggagaatcacttgaacccagtaggtggggcttgcggtgagccgagatggtgccattgcactccagcctgggcaacagaacaagactccatctaaaaaaaaaaaaaaaaaaaagaaaaggaaagaaaaaatcatgtaagcaaggcagcattcttgtcacctccaggggaccatggctattatttgggcctgacactggtttcatgtagatataggcagagagatgggcatgtttacaaagagtggctgacaccatgtgaagcacttggaacaagtatgttcttttatgctccgtctatgtccagagtagacctctagaaccaccctccaaaagccccctcgcacagcatgtcttctgcagctcacaggtaacctggaggctggaagatgagccagaaagcccaggtcaaacccagaaagcaggacaggagtctgcaatgcacagtctagaggaagttcagaaaacatgagaaacagaaaaggtaaaggggccagggattgcaaaggaaaatgcacccagctaagagggggatgaggaaaaggacgaggagaagcagatgaatgacattggatggtgacaatgaagagggtgaggaagaagagagtgatcaagacaatagtgatgaagaaaatgaagataatgatcaaaatgatgacaatgaggtgatgataaagataaggtgacgatgacagttgtgccagtgcagcgggaatgtggacctcaatgctgtaggcaactgtgacccgtgtctggccactgcctgcactggctacacaccaccacacgtgatcacgggtgatgatgaggataatggtcaagaaggtgatgttgatgaagataatggtcaagatgacaatggtgatgaaggtgatgatgatgagaataatggtcaagatgatgatgatggaggaaggtgatgatgagaaggatgaggttagtggtcaagatgatgatgaagatgatggtcaggatgatgatgaaggtcaggcacagtggcacatgcctgtaatcccagaactttgcgaggcctgaggtcaggagttcgagaccagcagggccaatgtggcgaaaccccatctctactaataatacaaataaattagccaggcatggtggcacacacctgtagtcccagctacttgggaggctgaggcaggagaatctcttgaaccccagaggcagaggttgcagtgagccgaaattgcgcccctgcactccagcctgggtgacaggacgagactgcatctcaaaaaaataaaaatagccggttgtggtggctcacgcctgtaattccagcactttgggaggccaaggcgggcagatcacttaagtccagaagtttgagactagctgggccaacatggtgaaaccccgtctctactaaaaatacaaaaattagccaagcatggtggcgggtgcctgtaatcccatctactagggaggctgaggcaggagaattgcttgaacccaggaggcagaggttgcagtgagccgagatcgtaccacactacactccagcctgggtgatagagtgagactccatctcaataataataataataataataatataaggatgatgatgaagaaggtcatggtgattgaggtgctgctggggatagtggtgatggtgaagataatggtgacgatgatgatgagggtgtgaggacagatatgtgatgatagccaccactcctgagtgcttactacatgtcaggctggatgttaagcgcttttcacaaattatgtcactgaatcctccccacagtcctgtggggagctgccattgttgtccccgctttagagatgaggaacctgagctcctagaggcgcagtggcttgctcaggaccacacagctgtgggcagccactgggggccggtcccaggtcctcctgcccaagcccgtgctgctccggggaaggtggagggacgcttgctctgcttcacacccaccctcatccctggtgggtccagccagctgtgttccccacacgtgctccctctacacacagggcggcgctgtgaggtctgtgatgatggcttttttggggacccgctggggctctttgggcacccccagccctgccaccagtgccagtgtagcgggaacgtggaccccaatgccgtgggcaactgtgaccccctgtctggccactgcctgcgctgcctgcacaacaccacgggtgaccactgtgagcactgtcaggaaggcttctacgggagcgccctggcccctcgacccgcagacaaatgcatgcgtgagtacctacctccagaccccagggtggcacatggtgggccccttctcttctgccctggctcagggcccagaaggggtggctgaggaacccaccagaaccagctggctcctctgcaaggctgtccagcctcaggcaggtcacttcccttcctgtctccatgtccagaaagcacaagggtttgcccctctcccaggtctctttcagccgggagatcttataaactctgatccgaagcctggattgtctagtgcttacctcccactctgcagtcagcacgtatggctgacccggtgatcgccctgcgccgggtctccatggccatgcctcccctcatcacctcagttaacactcagcccctgggaggctcccagagccctgcaggagggaagctcagcctttgctccacactgatgtgcttggagccctttcccacgcagcagctgccggctcctgctcactctcgctttgtggaacccctgcaggaaacaccgctctggcccagagtgagatgctcccctggcagtggccaggagaacagggtcacgggacccagagccatgggtgcagggctgtgcctgtgaccctcgcccaagtctctggccctctgcagcctgccagggctcagggcaggctcagaaggattgtctgttaccatgaccgtcctgggctgtccctctaaggatatagtcaatgggctgaggcttgagcttggccctggagcctttttccagcagtggcgtctgaatctgggctgaatgtgccgtatcatctctggaggctcccccatctcctctgcctctgttggacccccaaagttggaacagacaatctgcattgttcccaacaccccttcctgctcctgcccccagcttgcagctgtcacccacagggctcggtcagtgagcagatgccctgcgacccagtgacaggccaatgctcctgcctgcctcatgtgactgcacgggactgcagccgctgctaccctggcttcttcgacctccagcctgggaggggctgccggaggtaggtagggtgagactgccggtgccctggggacctctccaggagggaagaaggcatcgggcagcccccagggaggggcctggtttggaaggtgttgtcctaggcccactgccaggcacattgtgccctttgccgaaggggagcaaagggatggactcttggcatccgactcatgctcctgccagcccaggatgcaggccaagagcagccctaaagggtgtccaggcaggcaggtggccggtttggtctctgattcccttctcagtgacactctccctgggtggccttttggccacagtagcaccttagacaagtgttcttagggaacaggaggactccagggaaacaccaagtggagcaaacaggtttcttccttgcaggacttctcagagctcttactatgctgattgcatcatgactttccaacagaggggtatagtctccccgagacacgtttgtccccatagccttattttatcttcttttctccctgagcatcctgggaaacttgtgctttccagagcacagctggggaagctgtgccatgcaccgagaggagatggggtcttgtcagcagagggctgtgatctgaggccccagccagctgcagccggcagaggctgggccaggagtggccctgagcttgcctcagacccagttccttccctgatcacagctgcaagtgtcacccactgggctcccaggaggaccagtgccatcccaagactggacagtgcacctgccgcccaggtgtcacaggccaggcctgtgacaggtgccagctgggtttcttcggcttctccatcaagggctgccggggtaaggaggctgggtccttcccgggctgccctgagggtggggcccgagggtctctgggcagagatgactgatggggaaaatgggcgcagcaggaaaggatcgtcagacatgggacagggtcccgagagcagccggaagcatggagcgagttgctcccgtggcagtggccgggacagcagagtcacatgacccagagcagtgggtgcagggctgtgcttgtgaccctcgcccaagtctctggccctctgcagcctgccagtgtcctcatgccggccaggaatgtagtcccagacgcgctgttaagtgcctgtgtgcctggggccatcatgtcactctctgggcctcagtttcctcacctgtagagttgggctgcattggcagttcctaaacctggctggtcctcagatcccgagggaacattggaataagccaggctctgtgccaccttcaaccttctgaatcagaatctccagggaagggcccaggaatgtttttgatgctgcctagggcattctgggaacacccagaacccagcacgcactgcccctggcccctctaaacccagcacgcactgcccctggcccctctaaacccagcacgcactgcccctggcccctctagcctgcaggtgctccccactgggcgctgcctcggcccagtgccacgagaacggcacatgcgtgtgcaggcctggcttcgagggctacaaatgtgaccgctgccacgacaacttcttcctcacggcagacggcacacactgccagcaatgtccgtcctgctacgccctggtgaaggaggaggtgagtcggcccagacccactcacctttccattcattctgtattcccagcaagtgccagctctatgccgggcaccaggaactgcctgcttacccccagtgctcaggctttgcaagcccaccacctaccttctccctgtgcccacccagcttcaggcctgttccagcctggctcgaccctcacctcggcccttcccctgctctaggtggatgggggaaatgtgactcttgtcacctgcctttccccaccacgccaggctggggtctcactctctcaggttcggtggggatgagaccacagatgaccccttggtaaagagggttaacaggaggtgattctgagtgggaaggtggctggtgcagaagtccggagttcaagctctagggttaacccattggggttcccctcccccaactccattcattgtcatgtgtctgggcaggcaacagccttggtaagcctctgtctctttcgtactccagactggagatagttcaggcctgcaatccttttctagaaaccagtggggccagctttcagaatgtgtggcattgtagaaagataagatggcatacactgaaggccgggtgctgtggctcacgcctgtaatcccagcactttgggaggctgaggcgggcagatcgtgaggtcaggagtttgagaccagcctggacaacatggtgaaaccctgtctctactaaaaatacaaaaattcgccgggtggggtggcgcgcacctgtaatcccagctactcgggaggctgaggcaggagaattgcttgaacccaggaggcggaggtcgcagggagccaagatcatgactgcactgcactccagcctgggtgacagagcaagactctgtctaaaaaaaaaaagatgcatgctgtgctgaatatcacataatcccccactgtgaatgggcagcccccatagtcaagcccagtgatatttatgcaggaaaacagacgactatttccacgaagtgggtaaatgaagaccacaagtagcctttttcagaacaggtttatttcaggtaaggttttgctctcgagtgaggaatggaatgccttgtggcttttcagaacattttggacttgggaatggaggacagggcccaggacctgtgcctgccacttcacttagagcggtgacaggaggaatcaagctgggacatggcaggcatttgtgctgagactggctcctaggaagtgttctgtaaatgcagttattgtttgtctgatgaaaagatggagctagggtatgttcatagcacattcagccagtgtccatagtgtgctttctccatgtggcgtcctgggaacacagcgaacaggacaggcagaaatcctcgtggggcatccctccccatcccttcctccccaccttccgaggtaggacagcagtgtggtcagcggtgtcggcaggtgccgtgaggatgggaggggaagggacagctaccatggggtgggcaggattggctctcagaggtgtggcatacccttagcgctgaggcccaggggaggatttggagaagggaacccccagggagagtggcagggtagaagccagcgggagtgtctgggcaggacctccatgccaccagcctcatacaccttttcttcctgtcctctccaggcagccaagctgaaggccagactgactttgacggaggggtggctccaagggtccgactgtggcagtccctggggaccactagacattctgctgggagaggccccaaggggggacgtctaccagggccatcacctgcttccaggtacagcaggagcgcagagcgggagggtgggaggcaaggggaggcccccagcgcctgcagtctggtgtcgttggatgctttgggggccctcccaaaacagccctgttgccatgggcctttacttccctagcccacctgtaactttattaatatcagtccttgtcaccatgcctctgccctactcagactctaagctcagtgaggatggggctgggctcattcatttattcactccctccacaggggtgtcatgaggcgctgcttcagaggctggactgggagggtcttgctgtcttgattcttggccgttttgctctgccataggccagcacggtgctcagcacatagaaaatcttaataaatgagtaaataagacaaaagaaggagggccaggtgtggtggctcgttcctgtaatcccagcactttgggagccaagacaggaggattgcctgagcccaggagtttgagatcagtccgggcaacacagcaagaccttgtttctatgaatggaagcagggagggagggaggacctggaaatggcgctgaaatggattggattactttgtgaagttttatatgtgtaagtgctacactcctttagcagccagacagaggcgagctgagaacctgttagcaggactcactgtggaaataggggctatcagataccgtgtcttaaaatgcccacatgtgagccacattgtgaatcagagctgatttgaagggtccagaattgcttgtgtggctccagaaggcctgggtctctcccggtccctgtgtatgactgacttgctgtgggtaggacctcgggtcatgtttgccttctctgggcctcggcctgcacctggaaaatgggggtactctgcctttgggactacctgttggtgctcagggctgctgatgcctggggaatggaggccacagaaggggacccctgggggtgggggcttttgtgtgacatctccaccactttgtgacccctgggctgtgggcttcccataggggctcgggaagccttcctggagcagatgatgagcctcgagggtgctgtcaaggccgcccgggagcagctgcagaggctgaacaagggtgcccgctgtgcccaggccggatcccagaagacctgcacccagctggcagacctggaggcagtgctggagtcctcggaagaggagattctgcatgcagctgccattctcgcgtctctggtatcccaggggacccccctacccgaacacaccaaacctgggcattggtccctgccccagccctcccattgacctggtgaccttgggtatgactccccactttgggaggcttaatttcatctgcaaagtggggatcacacagtgcctcctcctggattcagcgagaggatgtttgcaaagggcgaggcatgttccgaggagactgaatgcgcagtaagtggtgggctgcatccttattggtgtttctgcatcctaggactccgctcactgaatgccgatgttgtggccagctttgtgcatttataaaacgacgggtgccatccagttctgcctcacaattggaccagatgtggcccttaccctttggcgatgggccatcagtttcctcctcttcctcttctttctacaggagattcctcaggaaggtcccagtcagccgaccaaatggagccacctggccacagaggcccgtgccctcgccaggaggtgagtcccaagacatggtgagcttacacctggcccttctcctgggggttccagggtcagagtcagccccacaggtgcccccacccagaagttgggatcagatattacaagagctgtctgatggaggcagtgtcaccagcatggggaggggcaggcaaggtgggtataagtccagagatgttaggggcaaagcttggtggactgaaggcgtcagagagcatctgccggctttctctttgtgagagttgtgtaatatacaagttattatattgggggtatagttcacactatacagaggcctttgcccactgcactccagcctgggcaatagagtgagactctgtctcactgtataattcagtggtttccctatattctcagggttgcaaagccatcaccacaaccagttttaggattttcatcatcccaaaaacaaacccctggacccatctgccatcagcccccgtttctccttacctccccagcccctggaaccactattctactttctgtctctatagatatgcctattctgggtgtttcatagaagtggaatcagacaatgtgttgccttttacaactggctgctttgcacagtgttttcttttttttcttttcttttcttttttttttttttttttttgagacggagtctcgctctgtcccccaggctggagtgcagtggcgctatctcggctcactgcaagctccgcctcccgggttcgtgccattctcctgcctcagcctcccaagtagctaggactacaggcgcctgccaacatgcccagctaatttttttgtatttttagtagagatgggggtttcactgtgttagccaggatgatctcgatctcctgaccccgtgatccacctgtctcggcctcccaaagtgctgggattacaggcgtgagccaccgcgcccggccagcacagtgttttcaaggctcatccacattgtggcatgggtgagtgcttcactcctcttacagttgaataatatcccattgtatggaaatgccacatgttgtttatccgtcttctgttaacagacacttgggttgtttcatccactgcctttaaggagcagcttaaggctgggtgcggtggctcacgcctgtaatcccagcactttgggaggctgagacaggtggatcactagaggtcaggagttcaataccagcctggccaacatggtaaaaccccgtctccactgaaagtacataaattagccaggcatggtggcacacacctataattccagctatttgggaggctgaggcaggagaatcgcttgaacctgggaggtggaggttgcagtgagctgagattacaccactgcactccagcctgggcaatagaatgagactccatctcaaagaaaaaaaaaaaaaaaaagacgcagcttaagatcctaaaaacacaggatctgtgacaattttctcctttagctacgctccagggaccttagacttattttacagatgagaaaacattcagagaagttaaggaatttcctaaggacacacagcttggaagcaataaagccaggattcaaacccaggctgtcgtgaccactctcttctatgctgtctatattggggtgactgtacaatttattgtccaaactgagatgctttcacgtgtgataaaaggtcctattggccaggcacagtggctcacacctgtattcccagcactttgggaggctgaggcatgaggatcgtttgaggcaaggagttacagaccagcttgggcaagatggtgaaacccccatcgctacaaaaataattttaaaaattagccgggcatggtggcacacacctgtagtcctagctacttggaaggctgaggcgagaggatcccttgagcctaggagtttgaggttgcagtgagctgtgatggcaccactgcactccaacctggacaacggtgtaagactccatctcttaaaaagaaaaaaataaggccctggctgggtgcagtggctcacgcctgtaatcccagcactttgggaggccgaggtgggtggatcgcctgaggacaggaggtcgagaccagcctggccaatgtggtgagaccctgtctctactaaaatacaaaaattaactggtgcacacttgtaatcccagctactcgggaggctgaggtaggagaatcacttgagcccaggaggggaggttgcagtgagctgagatcacaccactgcactctagcctgggcaatagagtgagactctgtctcaaaaaaaaaaaaaaaaagtcctattaatccttatgtcaggacaacagacacaaactctatgtctctgtgtaacagaaacagggcatggagtacctttcctgtcagtccttgaagtgcgtaacacagaaaggtggaaaaggcgtacctgtctttgtggctgtcctctgttaggggcagcaggaggcctgtgtagtagggggcgtagttctgatcctgggccccttccctgcgagcccttggtaatgctcaggtgggtgtcctcacacagccacagagacaccgccaccaagatcgcagccactgcttggagggccctgctcgcctccaacaccagctacgcgcttctctggaatctgctggagggaagggtggccctagagacccagcgggacctggaggacaggtgaggcctccccaggtgtgggtagaaactttggggttggcctcctggagccaacagggcctagccaaaggctgctggttccagagccagctcccttgagtcctgacgttctttgtcgttggtgtcttgggtctgcatcctcctcggagtggggccacagggtcttgggcccactcggtggtgagtcgcagtaacccacttttgcctggggggatgcaactcagcctcttcaagagaagagacaagaactggaacccagagcaacagatcccttgctctccttctgccgcattccctgacccccctggccccggcgccccagcccagggcagctcctctgagctcctctgaggcaccagcttctttctctgcctctgcagacagacggctctgcttttctgctttggtgaccccttctgtccctctcagtttaaaggttcatggagactccccagcatcttgcttgagccccttgacattcctaaacgagacattcctaaacgagaatgggattggctccgcttagatcaggtgtccagccctgagccagtcaccatggctgggggaggtcacatgacccaccccaggggcagagcgatggctctctaaggaggagtaagggatggaagggaagccagaggtctccaccccagcaatgcccttgtcgaggaagaatgggtgggacaggatgtggacagctggtcaggacagaaaacccatcctagctgattggttatagaccacaggcctgtcagggcaaaagggcccacagggattctgcagcccagggctctccattcatcagtggtgaggacgtgcccaaggtctctggaaagggcatggccgagccaggaccaggaccggggccgctgtgctccccacttcaccgggcattttcctcttcaccattcacccagaagagccaaacatttgcaaacatgtgattcttgagtggaaaccaagcagagccctttcagcaaagtgtggctgagctgaatgatgcagaaacaagaatgtggccctttcacagcccgtctggctcatctgaaagcttcagagaagcagccactttccgaggcagctgtacctaccccgcagagggctattctgcctgggaagttggcagaggcctttgcaaaccagtggctccagcctggggcccagacagggatggggagggctagttctgcacccagctccgtggcctctgcttcctcccaggtaccaggaggtccaggcggcccagaaagcactgaggacggctgtggcagaggtgctgcctgaagcggaaagcgtgttggccaccgtgcagcaagttggcgcagatacagccccgtacctggccttgctggcttccccgggagctctggtcagctcagttgtctcagagctccgtgtggggtcgggaggatctattatagaagctggaggctgggcacggtggctcacgcctgtaatcgcagcactttgggaggccgaggcgggtggatcacctgaggtcaggagtttgagaccacctgggccaacgtagtgaaacctagtctctactaaaaatacaaaaattagccaggtgtggtggtgcgtgcctgtaaccccagctactggagaggctaaggcagaagaatcacttgaacctgggaggcagaggctgcagtgagccaagattgcacctctgcactccagcctgggcgacagagcaagactccatctcaaaaaaaaaaaaaaaaaaaaaaaaaaaaaaaaaaaaactattatagcagctggagaaaccggtggggcccaggcagaggcaggtgatatggctcatttttaactatattgcagctaagtcaaatgatataacctacctatggggcttggcagagtcagagctcaaccatttcaaccattctctgttgataatgttaaggctggggcctcttcctccttacagtgacattagcagtgtcatcagatggacacgggatgcaatcccagctctgccactccagctctgtgacctcggccaaggactttcccttcctgagcctcagtctgtcacatagaactcacccattaggttatttcgaggctgcttccatgggagctggacagagattcgggagcaatgcacgaggtagctggccgacccctctgtgctcatcgccttatactcatcacctctgcatgaaccgggtccatcgtgtcgattcagtaaccctgaaatcccaaaactcagaaactgaacattaaagaactcagcttggccgggcgcggtggctcacacctgtaatcctagcactttgggaggctgaggcgggcggatcacgagatcaggagatcgagaccatcctggctaacatggtgaaaccccatctctactaaaaatacaaaaaaattagccaggcatggtggcgggcgtctgtagtcccaactactcgggaggctgagaatggcatgaacctgggaggcggagcttgcagtaagctgagattgcgccactgcactccagcctaggtgacagagtgagattctgtctcaaaacaaaacaaaacaaaacaaaaaaaactcagcttataaaaatgcatttgggacaagtgctaacccagattgatgcccaaggctgcttatttgagatctttgctcctcccactgcgtgcggagagtaatgcacagctgttagtgtgtttgagcccaggttctgcttccagcaccactcagggtgttaggtcataggtagaacctgcacagttctcctataagtctgggaaattctgcattcggaagccatccagcccccagatctcagttcagggctgtggagctggggaagcattcccactttgcagtggggcagtgtgggtcagggaggttagctgggttgctcaaggccacgcagctagaaattggtaggactgtcatctgagccccaagtaagggcttccccagcctggctcctctcgccctgggccctctgcctccaggggtccacacaaagcctgacccctgctattcctgcctctgggcttccgagctacctggggcatcagctaggctcaccaggttttcagggggcttgggttcttggctggcagccaggggcagacccgccgcctcagcccagcagggcacctcccccaaggagaggatccgctgcttgcccttcctttccaggccctgcctgagcgcattgtctccctgcagcctcagaagtcccgggctgaagacctgggcctgaaggcgaaggccctggagaagacagttgcatcatggcagcacatggccactgaggctgcccgaaccctccagactgctgcccaggcgacgctacggcaaacagaacccctcacaaaggtcagctcttgtgctttgaagcaggggacctgggagaggttggggctaccctgaaggtgatccagggtcagggttgcaggagggagaagggcagagacagaagtagctctgtccggccgggtgtagtggctcacacctgtaatcccaccactttgggaggccgagacgggtggatcacgaggtcaggagattgagaccatcctggctaacatggtgaaaccccatctctactaaaaatacaaaaaattagccaggcatggtggcatgtgcctatagtcccatctacttgggaggctgaggcaggagaatcgcttgaacccaggaggtggaggttgcagtgagctgagatcgcgccactgcactccagtctggcaacagagtgagaccccatctcaaaaaaaagaaaaaagaagaagtagctctgtccatccctctggtgcctcctgcaaaactccacatacagcctgagataggggaggggaccctgataccccgagaagagatgatggatagactgacagaggacagcagcagcagcacccggggccacacccaccatcctgggatcattctctctcatgcctccattcattagttcattctctagttcattcatggctcatttgaaagctgcagagaagcggccactttccaaggcagctgtaccgataattttgtttttaattttgtttttgaaacagtcttgctctattgcctgggctagagtgcagtgacacaatctcggttcactgcaacctccatttcccgggttcaagtgattctcctgggtcagcctccagagtaactgggactacaggtgtgtgccaccgtgtctagctaaattcttttgtatttttagtagagatggggtttcactgtgttggccaggctggtctcgaactcctggccttaagtgatccacctgcctcggcctctcaacatgctaggattataggtgtaagccaccacacccagcctcattcctttttttttttttttttttttttttgagacagactcttactctgtcaccaaggctggagtgcgtggcgcgatctcggctcactgcaacctctgcctcccaggttcatgcgattctcctgcctcagcctccagagtagttgagattacaggccctcaccaccacgcccagctaatgtttgtatttttagtagagatggggtttcaccatgttggccaggctgaactcctgatctcagatgatccacccacctcagcctcccaaagtgctgggattacaggcacgagccatcacacccggcttccattccttttaaagacaggataagggggctgtctgtgaggcatgagaatgtatctgaagagctgagcccagtgcctgccgcttacccggggagtttggctttgcccccggggtagcacctgctgatctggtccactgccctcgtccagggtgaggttgccaggaagagaggtgacttccccaggagtcagggccaggccccagcgtgtacagatgcctcaccccaccacagcacccatgccttcgtcctcctccccaccccatgagcaatcagaataggcctgaggcagtactagtggctcctcaaactactatttatttattcttgttacagtgacattcacgtggcatacaaacacccattttagatgcaatggctttagcacgttcacgatgttatgccacctccacctcagtctagtttcagaacattctcaccacccctaactccatgcccactcagcagtccctcctcatttccacttccgaggcccgggcagcctccactctgttctctgtctctgtagatttccttagtccagctcttttgcagaaatggaatcgtgtaatatgtgccgatggtgtcaggcttcctcctgatggcatcaccttttcagggttcacctgccttgcggcctggatctatacttcctccctttgaaaggctcggtcatattccagtgtgtggatgaagcacattttgtttacccactcatctatcagacccaaattctttcagtgtatctagtcctgttgagtggcagtggggaagaaactgatcttccataagtcaaggtggtgtcataaacagatttgcgattttcacatccacttgctgagatagagcagtgttccctccctccctccctccctccctcccttccttcctttctttctctctcttttttagatggaatctttatgccacccaggctggagtgcagtggcttgatctccgctcactataacctctgccccataggttcaagccatactcccgcctcagcctcccccagtagctgggattgcaggcatgcaccaccacacctagctaattttaaataaatttttagtagagacagggtttcaccatgttggccaggctggtctcgaactcctgacctcaagtgatctgcccacctcggccttccaaagtgttgggattacaggtgtgagtctctgtgcctggccaatagaacatgttctaaagagatgttcaggtgttctcgttcctttaattctagtgttttagttttcctccgggcttttgtggacaggtatctcttgggagacattcggagttcaacttttgtataataacacagatcaggtgctcctggtggacagcgtgacccagcgtcagggatttggtgatgatttgggcacccatgtatgtgggtttggtgcccactgagctgcccctgggccctgctcctgtggagccagctgcccagcctctcctcatctctctccagctgcaccaggaggccagagccgccctgacccaggcttcctcatctgtccaggctgcgacagtgactgtcatgggagccaggactctgctggctgatctggaaggtacgtgagtccagctgaccactaggctgtgtaatgacgaacgcccctgacagccactcacctctcgcctcagccagggcaggcttgcagaggacaggagtctggtcttgtgggcttaattaagccaaacagactttccctccacctctcaggatcctgccccatctcatacatcactcacctcggacttgcccatgtggctatcccatacaccccaggtcatcagaccacatgcagagcccctccagaccaagtgagaggagactctaacatcattggctgttcaaccaggtcaagtccactctggcctgggctccagttagttatctgatacaaatatggctgtccgggtccaatgttgagttggggctatgggaagcagatggagtttctctttagaaggggctatgggttgatgccagtctagtgcccccattttgcagatgggtaggctgaggaaaggaattgctattcatccctgggtcagagctaagctgggaatagaagccagcaagtattacgattctgcaagtatccacctgtgtgatgggcttctgtgatacccaatttgctccagagagaagccccctcaccctttgtttgtggctccttatccaacgggctggataaggcaggaacacactctgaaccccagatgtctcttggggtctgaggccagaagtcaggcttctgctgttgttctgtggcctccctccccagccctgcccactgcccggaagagatggagcgctagctgtggacccagcccctctggggcagaggatgggctggtcagtgctcctgttccccagcttcctggcggcttgaagtcctagtcacccatcgtttggggacttcctgtcggaaaggcgtggccgtgtgtgcttaagtatctagagtcatatttagaaaaaggtacattcaatgacttataatgatggaatgttaggatcttagaacattagaattataagaggtcttaaggtcatctgctgcaaatctcacacctggcagtggactcgcccaccctcagcttgcctatctccaacaatggggggctcactaccttacaagcttttaccttctcattgtcgggttctgagaatgagaacattcttgtgtgtagtggatggaaatttccttgcactgttcccataatccacaggagggctaacctcaaacctctaaccccaggctcttttccccattctgatcccattttagagacaccctttcttaccaccagcttggctgtgctcagttggtgttcaggataaaaggaaaattcacaaggtgaactgtggagcagtcttccccagggtgtggccgggggtctcctagcctattgatacgctctgccaagagagggtttgtgttcaaataagtttaggaactgtctcttgctgcagcatcctcttgaggtcttacagagaacgcttgagaatattaaaggttctgagaaggcctgtaataaagaaacctgcttcactttcaacttaattgacacttccccctaacgtttgttaacaccgtggagaattagggctccacacaatacatgctgagaaacatcaattttgtgtacaaggagcaaagcaggtctaatttctggatggaacaattctataatattatgccctcaaagattagaaggctttattcattttaaaaattgacttttactttgtccactgtaataagtgctttttttttttttttttttttttttttgagatagagtctcgctctgttgcctaggctggagtacagtggcatgatctcggctcactgcaacctctgccttctgggttcaagtgattctcctgcctcagcctcctgagtagctgggattacaggtgcccgccaccacacccggcatttttttttttttttgtatttttagtagagacagggtttcaccaggttggacaggctggttttgaactcctgacctctggtgatctacctgcctccgcctcccaaagtgttaggattacaggcgtaagtcaccgtgcctggcctgtattcagttcttttgatgataaacttcctttagaatttttttttgagttggggtctcactctgtcacccaggctggagtgcagtggtgcaatcatagctcactgtagcctccaactcctggcctcaagtgatccttccacctcagtctcgtgagtagctaggtctataggtgtgtgccaccatgcccagctaagcttttgtctttttgtagagatgaggtctcactatgtttcctaggctggttttgaactcctggcctgatcctcctgcttcagcctccagagtagctgggattacaggaatgagccaccgcacctgactaaatttcccttagaattttatctgaaaggaaaggaaatagtctctttgtttaccaagaaataaactacttcttattggataataaaatctatgggaattctaacatttcctctgggtgtggtggctcacacccgtaatcccagcactttgggaagccaaggtgggtggatcacttaaagccaggaatttgagatcagcctggccaacatggtgaaactccatctctactaaaaaaaaaaaaataccagccgtgtatggtggtgtgtgcttataatctcagctactcaggaggctgaggcaggaaaattgcttaaacccgtgaggcagaggttgcagtgagctgagatctctccactgcactccagcctgggtgacagagcgagaccttgtctcactgcactccagcctgggtgacagagcgagaccttgtctcaaaaaaaaaaaaaaaaaagagaattgtaacatttccctttttgtcttgattgcttgaaagctcagtggtcaatcaaacatttggtttctgcaatgtcattatcgagattttctggtacttctccctctcctctgtccttcctcatccctccagttacatcagactcttggttttccatggtaaggatccatttgttgatttacccatcactatacactgccttaaagcattgtttagacgtaggcagtacatgaaaatgccgagctgagcagactgagccatggactgtgctagtccccaccactggccccagcattgaccaccatgtaattccttgactttaatagacatcctaatagaatgaatactcatctcaaaattccccaagcagtatgtctgtgtctcgcttgcttttgttttctcctggataagcctgagaaggcgatatgcacgttgcatgcacttcagacctccactcgttgtccaagggtctgtggtcagccaggcagctctgccagcggctgcctgggaggcaccggaggtgtgagcccagttcccctgacccagcctcagccgggtttgcaggaatgaagctgcagtttccccggcccaaggaccaggcggcattgcagaggaaggcagactccgtcagtgacagactccttgcagacacgagaaagaagaccaagcaggcggagaggatgctgggaaacgcggcccctctttcctccagtgccaagaagaagggcagagaagcagaggtgttggccaaggacagtgccaaggtcagggtggtggctgtgacaacagtggcctccttccctcccggggggaccgcccttccgcgggccccttcccgacatccgtgctgactactccgcactcactcactgctcagtgggcccaggcaattagctcagagacttcacgggggtgagtctgtgggttcctcacgaaataggtgtcattgctgtccccattgtacaggtgagaatgctgaggtgcagccagcttcatgaacttaaccaggacttacacctgggtctgctggctttcctgcctaaacttctaggtttttcttttcttttttgttattttgaagtttgcgtttatttattttacctgcctttttgttttcaatttttttcttaattttttcagacagattcttactctgtggcccaggctggagtgcagtggcgcaatctcagctcactgcaatctccgcctcctgggttcaagtgactctcctgcctcagattccagagtggctgggattataggcgtgctccaccacacctggctaatttttgtatttttagtagagcggggtttcaccatgttggccaggctggtctcgaacttctgatctcagatgatccacctaccttggcctcccaaagtgctgggattacaggtgtgagccactgcacccagcttaagggtttttggttttgttttttttttttgcttgtttgtttgttttttgtagagacagggtctctgtcgcccaggctggagtacagtagcacaatcacagctcactgcagcctcaaacccttgggcttaagtgatcttcctgcctcagcctcctgagtaactgggactacaggtgtgtgccactgtgcctggctaacttttttttttttgcagagatgaggagtctcggccaggtgtggtggctaactcctgtaatcccagcactttgggaggccaaggcaggcagatcacttgaggtcaggagttcgagaccagtctggtcaacatggtgaaaccctgtctctactaaaaatacaaaaaaattagccgggcatggtggctcgcacctgtagtcctaactactccagaggctgagacacaagaattgcttgaacctgggaggtggaggttgcagtcagccaaactgcaccactgcactccagcctgggcaacagagggagactctgcctcgaaaaaaaaaaagaaaaaaaagattggggtctcactatgttgcccaggctggtcttgaacctctggtctcaagcaagcctcctgcctcagcctcccaaagtgctgggaccataggcatgagccactgcacccagccctggctgattttaactaggcttttaaaaaattggtgccaaattctaatcagtgcctatctccccagctctgctgctggttctgttgctcacacaccaaggaaactgtctttatggtgcctaggaaaagtgctgggtttgcagtaggggtccccgggcttgatctcttgtcatgcccctcgggctttggccagcccctcctcccctctgtgcctctgtttcctcacctgtaaaatagttagaattgctcctcctgaaacgggtggtatccagcagtctacactgtgcccagcacttagcctgcattcagtacatatttgttgcgtgcatgaatgaatgaatgatctgcctggtacagacaactgcttggcatcattgccataagagctatttacctccaaaaggacttgctgcactcacttcttctccctgccactgccacccatcccatagcttgccaaggccttgctgagggagcggaaacaggcgcaccgccgtgccagcaggctcaccagccagacgcaagccacgctccaacaggcgtcccagcaggtgctggcgtctgaagcacgcagacaggagctggaggaagctgagcgggtacgtttgccagggcccctaccctatcgcctcctgcccctggcagcccgggtggggacgccattcaagctgtttcttcctcctccccctgaaaggtgggtgctgggctgagcgagatggagcagcagatccgggaatcgcgtatctcactggagaaggacatcgagaccttgtcagagctgcttgccaggctgggtaaggaggccctaaggctgggccctgaacccctgggtccctggggcacctctaggatcttcctgtgagctccagtcctggggaagatttcctccttgtcctcattgccatgcttcccgcatccccatctttgtggtcaatcacaagcatttataaccatgcccaggcccccttgccatgtgggacagggttggcatctagaagtgagttcactttgagtaactgtttgtgcctccagggccctctattctttggggcagggcagggggcacacagaaaactcaccattggcaagaacacccacaggcaccgggtgagcaggtgagcaggtcagtcctcaggagctgagggttcaggagaagaagaaagactgtcacggcagaaagtgtcatcaggtgctggtctgggatcagactaagattcaagtctggctctgtcccttctttggccattagacctcgggcaagccactccacctctctgagcctcagatcccccatctggaaaatgggagtaacagtggggtggtttagaaagcgcttaccacggtgcgtggtgtatgttgagagtgagtaaatagcggctcgtaggaaggaggtcagattcaagatgggccttagcaaggaggcattttggatgaagggaatagcacctcccaaggcacgaaggttgcagaggcccagtgttgtggggaggctcaggagacagcagacagggcagttgggctgaaaagaacagcatgtatttttttcaaattgtaaaagacacataatattttccatcttaaccattttgaagtgtacagttcagcagcattaagtatattcattgttgtgcgatcatcaccactacccatctctagaacactttcatcatctccaactgaagctctgtcctcctgaaacactaaccccccatttccctcccccagcccctggcagccatcattctactttctgtctctatgaatttgactactctgggccaggcagggtggctcatgcctgtaatcccagcactttgagaggctaaggtgggtggatcatttgaggtcaggagtttgagaccagcctgaccaacatggtgaaaccctgtcccttctaaagatataaaaaaaattagccaggcatggtggcacatgcctgtaatctcagctacacaggaggctgaggcaggagaatcgcttgaacctgggaggcggaggttgcagtgagccaggatcacaccactgcactccagcctgggtgagagtgagactccgtctcaaaagaagaacttgcttagaatcataggtgggaattgaacaatgagaacactcagacacagggtggggaacatcacacactggggcctgtcatcgggtggggggaggggggagggatagcattaggagaaatacctaatgtaaatgaccagttaatgggtgcagcataccaacatggcacatgtatacatatgtaacaaacctgcacgttgtgcacatgtaccctataacttaaaaaaaaaaaagaatttgactactctggggacctcatataactggaatcatatagtatttgtacttttaaaatttttttggagacaggatcttgctctgttacccaggctggagtgcagtggtgcagtcgtggctcactgcagcctcaaactcctgggctcaagcgattcttccacttcagccttcgaagtagctgggaccacaggcacgcaccaccacacccagctaattttttttttttttttttttggagacaaaaaaatatgttccctatgttgcccaggctggtctcaaactactgggctcaagtgatcctcctgccttggcctcccaaagtgctgggatcacaagcgtgagccaccatgcccggccttatttgtcctcttttgactgacttatttcacttagcagaaagtcatcaagattcacccatgtggcagcaagcattttcaattttcattcgtagtaagaggagagagaattgccatgctctacacgttgtctggacaccaggcccacactaagctattcacacacgtgatcttacagaattctcatactcactctttgacgcaaggacagttattcttttgccgttttgcagatgaggaaactgaggtgaggagagtttatttttattttttatttatttttgtttttttgtagagacagcgtctcgttatgttaaccaagctggtgttgaactcctggcctcaagggatgctcccacctcaggttcccaaaatgctgggattacgggagacagccaccacacccagcttagcacagagtttagataatgtgcccagggtcccacagccagtcggtaggaaagccgtggctcacctgcgggtccaagtgactcagcgtgcgtgcaggtagccactagtcgacacctaaggccctgtcgtggagcagacactctcttcaaccattcctgcattgtcactgtcattcattcacttgtcacactctgtgttggccttgtgcttggcctggggatgcagaatgaagagcacacgcctggccccttctccaggagccctaggcagcctgggcaggtagagtgggggctgtaatccatttctgaatctcttcgaagaccaggctgtttggattttgctgtgggccatggggcctcttgaggtcctcctaggtcagcagggccttggctcccctctgccttctcttgcacactggctcagtgcttgcagctgcttgcccaggaaatccagggcctcggggatcccaggggcccagtggaatcctgtggggttagaagcagccacttggggctgggcatggtggctcatgcctgcaatcccagcactttgggaggccaaggcgggtggatcactggaggtcaggagtttgagaccagcctgaccaacatggtgaaaccctgtctctacaaaaaatacaaaaattaggcaaggcgtggtggctcacacctgtaatcccagcactttgggaggctgaggcgggcagatcacctgaggtcaggagtttgagaccagcctggccaacgtggtgaaaccctgtctctactaaaaatacaaaaaaattagcggagcatggtggcaggcacctgtaatcccagatactcgggaggctgaggcaggagaatcgcttgaacctgaggccacagtaagctgagatcgtaccactgcactccagcctggacaacagagcgagactccgtctcaataaataaataaatgcatccatccatccatacatacatacaaaaattagctgggcatggtggtgtgggcctgtggtttaccccagtgattgcccacatccaggcccacaggcggcatctgtaaacgtgtgctgtcagtgaattgagccagcatgttcaagctggcaaaaatcacaggggcctttctcccacactgttttgtaaatgagtaaactaagactcagagaggactcacctgaggccttcttttttaacaataatagtaaaaccatcaacaaaaatgacatttgtcaagtgccacccaggaggatgttctagagtctgcccatgggcccgttgggatgctatgggtcctcacccacctcccagcccttctgctccccatctttccctggtggatggtgggccattggaatcctgggaggcctgagctggggagaggctcaggggctgggaggtgccctggggcctgcagggctgctggctcacagtgaggctgtttgtgccccaccacagggtcgctggacacccatcaagccccagcccaggccctgaacgagactcagtgggcactagaacgcctgaggctgcagctgggctccccggggtccttgcagaggaaactcagtctgctggagcaggaatcccagcagcaggagctgcagatccagggcttcgagagtgacctcgccgagatccgcgccgacaaacagaacctggaggccattctgcacagcctgcccgagaactgtgccagctggcagtgagggctgcccagatccccggcacacactcccccacctgctgtttacatgacccagggggtgcacactaccccacaggtgtgcccatacagacattccccggagccggctgctgtgaactcgcccccgtgtggatagtcactccctgccgattctgtctgtggcttcttccctgccagcaggactgagtgtgcgtacccagttcacctggacatgagtgcacactctcacccctgcacatgcataaacgggcacaccccagtgtcaataacatacacacgtgagggtgcatgtctgtgtgtatgacccacacgtgttcaagtct

SEQ ID NO: 15654 - DNA, 139071 bp, Homo sapiens
acttccggtctcgtgccgccttcccaggaccctcagggagagcgggcagccttccaggtggacaggtgaggtacagcttgccgagctcagggtgactgcccaaaggaaggacgggtgggcaggcacgcgggatctggcgccccttcttctctatggttcctcgcagagcccctgttgccctgggccagatggcccgtagcagcaaaaataatactgttccgacagctcgcgagttcggagccacttggcctgggagtcccttgagttgcaggccgggcagtcgctcacccgagcgcggtaatgcagcatttgaacccctaagtgtagcccacctgtagggagtcttatggtgcccccgcggaggagtagaggccaaaaagttgggcagctggccgggaagaactcgctaggaggggtcaaactctgggccgggagtgttctttgcccccggcgtttagtgctcacgccgccttttattcacgctgaagaccttaaccgtaaaccctcatccttgggtcttagtttggttttgttccccacgcaagacagaatgcagattggaacactttattccttggttaattcgtatcttccctcgcaagtagttaccggacacctgctttgtgtcctgtgtaccaaacacaagagttgatagtcctggccgggcgccgtggctcacgcctgtaatcccagcactttgggaccccgaggcgggcggatcaggaggtcaggagatcgagaccatcctggctaacacggtgaaaccccatctttactaaaaatacaaaaataaatacataaataaataaattagccgggcgtggtggcgggcgcctgtagtcccagctactcgggagactgaagcaggagaatggcgtgaacccgggaggtggagcttgcagtgagccgagatggcgccactgcactctagcctgggcgacaaagtgagactcagtctcaaaaaaaaaaaaagagttgatagtccttgagttgaaagaacaaatctgtatggagaaagagatacaaccaaaagaaacccagaagatttagaagcatctccagaatgtttattctcaaaagctgttttttaattaaacttctttctgaaactatacgtaggagtgtctcttgtgtgtttccccatttttccacctgaaggttaaagacttagaaacctgctaaggcccctctttccagcatgtagcattctagggggataatcagggcaacacagtgggtgcccatctaaaattttatattttaatattttgctttttgataacttaatgccttcagactggaggattttttctttcttttttttaatttttttaaaattatactttaagttctagggtacatatgcacaacgtgcaggtttgttacatatgtatacatgtgccatgttggtgtgctgcacccattaacttgtcatttacattaggtatatctcctaatgctatccctccccactcaccccaccccacaacaggccccggtgtgtgatctcccccttcctgtgtccaagtgttctcattgttcaattcccacctatgagtgagaacatgtggtgtttggttttttgtccttgcgatagtttgctgagaatgatggtttccagcttcatccatgtccctacaaaggacatgaactcattcttttttatggctgcatagtatcccatggtgtatatgtgccacattttcttaatccagtctatcattgttggacgtttgggttggttccaagtctttgctattgtaagtagtgctgcaataaacatacatgtgcatgtgtctttatagcagcatgatttatattcctttgggtatatacccagtaatgggatggctgggtcaaatggtatttctagttctagatccctgaggaatcgccacactgacttccacaatggttgagctagtttacagtcccaccaacagtgtaaaagtgttcctgtttctccacatcttctccagcacctgttgtttcctgactttttaatgatcaccattctaactgctgtgagaagatgtctcattgtagttttgatttgcatttctctgatggccagtgatgatgagcattttttcatgtgttttttgtctgcataaatgtcttcttttgagaagtgtctgttcatatccttcacccactttttgatggggttgtttgtttttttcttgtaaatttgtttgagttctttgtagattctggatattagccctttgtcagatgagtaggttgcaaaaattttctcccattctgtaggttgcctgttcactctgatggtagtttcttttgctgtgcagaagctctttagttaaattagatcccatttgtcaattttggcttttgttgccattgcttttggtgttttagacatgaagtccttgcccatgcctatgtcctgaatggtattgcctaggttttcttctagggtttttatggttttaggtctaacatttaagtctttaatccatcttgaattaatttttgtataaggtgtaaggaagggatccagtttcagctttctacatatggctagccagttttcccagcaccatttgttaagtagggaatcctttccccatttcttgtttttgtcaggtttgtcaaagatcagatagttgtagatgtgtggtattatttctgagggctctgttctgttccattgatctatatctctgttttggtaccagtaccatgctgttttggttactgtagccttgtagtatagtttgaagtcaggtagcgtgatgcctccagctttgttctttttgcttaggactgacttggcaatgcaggctcttttttggttccatatgaactttaaagtagttttttccaattccatgaagaaagtcattggtagcttgatggggatggcattgaatctataaattaccttgggcagtatggccattttcacaatattgattcttcctatccatgagcatggaatgttcttccatttgtttgtgtcctcttttatttcattgagcagtggtttgtagttctccttgaagaggtccttcacatcccttgtaagttggattcctaggtattttgttctctttgaagcaattgtgaatgggagttcactcatgatttggctctctgtttgtctgttattggtgtataagaatgcttgtgatttttgcacattgattttgtatcttgagactttgctgaagttgcttatcagcttaaggagattttgggctgagacgatggggttttctgaatatacaatcatgtcatctgcaaacagggacaatttgacttcctcttttcctaattgaataccctttatttctttctgctgcctaattgccctggccagaacttccaacactatgttgaataggagtggtgagagagggcatccctgtcttgtgccagttttcaaagggaatgcttccagtttttgcccattcagtatgatattggctgtgggtttgtcataaatagctcttattattttgggatacgtcccatcaatatctattgagagtttttagcatgaagagctgttgaatcttgtcaaaggccttttctgcatctattgagataatcatgtggtttttgtctttggttctgtttatatgctggattacgtttattgatttgcgaggacttttttctttgttaaaatgttgctctgctttcagcattttctcccttgtagtattaccataatgtatttaagattgagcacttaattctgaagtcactttaagtatacctcaaccaaagggaaattaatatattatttctaatgagtgtatttaatataggtaagtagtttgtacacttgtgaaattcttggcattaattgatgtccagaagctgaaagctactctctggtacattaaaaaaaaattgtgtgtgtaattacaagaaagtttgatgtcacagttgcaaaggagttgtgcaaaacaaattgcctttttccagtaaagataattcagcaagttcatcttgagtgtagtgtgtggtttcgtttttaatatgtcctcagcagtagtcatagattttatcttcatcatttaagctttattttctggcccacttgcacagatttaagaaaaatctcactggggttagtgtgcagtcattcagacagcaaatacagcaaaagtaggtgaaaatgtaaaagtcattaaaagaagaattgtgaaattgctcatctcgcaaccacatcaagcaggagcaaagacaactacacagaatcttggtgtaacatacactcattaccacttggactttctcctacagtattttgcagtttgttttttggattctttagtgttatataatatttcaaagtaatatgtgactgggaaatattggaataggtatcagaagactgtagaatttattttgccatttaaatgcttatgtccttgaacaaaaaatgtaaacatctttgaccttcaatttcttgttctattaattgcctgctttttaggtctgatgagaaaggaagagaatataatttgcaaataaaaagaagcaaaaaaaaaaagcagtagttttattgcaaggggctagatggtgatcaagttaggatatagaaaacaattacttgttcttacatgttattctggagaaagatgagatggatacccatagttacagcagaagcgtaaaaagaattctgtttatgcatcatctgtttatgtgttgactttcacctgtatgttttcaagtttatatagggctatgtgctaagattcccaattttcccctttcataccacttattataccagttgcaattaaatacatatataattattaataacttttttaaaaacctttttgttttgagagaattgcatattcagaggaagttgcaaaaaactttacagggaagtccttgtgtacccttcagactgcctgcctcaatggtaacaacttggataactgtggtacgatattaaaactgggaaattgacattgatacaattcacagagtatatttccatttcaccaactttataaggactcatttgtgtgtgtacacaggtctatgtgtagcttcttataactaccgtaatcaagataaagaattattccatcaccacaaggctcccttatgctgcctccttatagtcagtctatcttgtcccagccctatccctaacccgtggcaaccactgctctatctctataattttgtcatttcaaggatattgtgtagatggactcataccgtatgtaactttttgagatccatccaaattgtgtgtatctgtcatgcatttctttatttattgctgagtagtattccatgggatggctatgctacagtttgtttaaccattcattcattgaagaacatttgggttacactattataaatagagcttctatgaacttttgtctgaagatttttgagtgaacatacatttttccccctctgggataaatgcccaagagtacaattgctaagtcatatggtaagtgtatgtttagtgaattaatacttctttagcttgttgatatggtgagttacattgattttaaaatgttgaacacaactggtataaatctcacttggttaaagtatataattatatatttccatattctatttgctaatattttgttaaggtataggtagagaggtgtgagaggttaaggtataggtatgagagatgtgttgtagttttttgcttgtttgttttgtactgcctttgtcaggctttggtagggtaatagtattctacatggtttttagtgataacccttgtttcattattgctactgtattagtaatttgtgtcattttatctttttcagtgatgatttgctggttatagtgacctttttcaaagaactcgctctttatttcatctttgtctatttttatatttttaatgtcattgatttctgctcttatatttattattttcttccttctcactttaggtttattttgcttcttgtctagtgctgtgattattagtttaaggtctttctttgtttctaacgtaagcatttattgctataatttccctcttggcattgcttttgttgcatctcacaaattttgctgtcttgtattttcatttctatccagttctatatagtttaaatttttccttagaaatttgcttgacccatgaaaatatttgggagtgtgtcatttagtttccaagtgtttggtgatttacctgttgtttttctgttgttgatttctagtttttttccacaatgatcagaaaacataagctgtataatttttaatttttaagtttcttttatgactgagggtatggtgtatcttggtggatgttccatgtatgcttgaaaagaatgtgtattctgttattattggttgcagtgttctatacatgtcagttatgtcctgttcattgatggtggtgttctgttcttctgtgtcttcttgatcgtctaatagttattttcgttgctgaagatcccaactataattatggatgtctctgtttttcctttgagctctgttggttttggcttcatgttaaatatctgttgtttggtgcatatacatttaagatgttttcttgatgaattaatccttgtatctttgtacaataattttctttgctctgaagtctacttaactgatggcagtgtagccatcactacttaaaaaaagtagttagtatggcatatcttttccatacttctgttttcaacctaccaatgtcattatgttttagtgaatttcttatagacgctatatgcttgggtcttttaaaaaagaaacttctctgccaatctctgtcttttaactagtatagttatatcatttacacttaaaagtaattgctgtgttagggcttaagccagccattttattatttgttttctgtttatttcctgtttttcatatctgttcctcttttctggtctttctgtaggttgcttgaatattttcagaattctatttgacatgtttatagtgtttttgagtatctggcttagttaaccttttttagtgtgctttgggtataacaatagatgtaacaacttatcacaagggatacttttattgccttttgccaattgaagtttagagacctttcttccatgtaggtcctttctccttttccctttttaaaatttaatatttgtattttctctatacaccttgaacaccacatcaaatgttgttataacgtttacttcaactatcaaatatgatttaagaaactcataagatgaagaatagttcattttatatttaccatgactattacccgttccagtgttcttcctttactcaaattaaaccttattgatacatcatttcctttttgtttgaggaacttttttttaggagaacctcctaaagatatgtctgttagtgacaaattagtttccgtcatctgagaatgttgttcccctttgttcctgaagggtggttttgtcctatatggaatttggccttgacagttctttttctttaacatttgaaaaatgtgccatttctttctggcttccatgatttctgatgagaaatctgatggcattcaaattattgttccccttaaaggtaatgtgccatttctctttggctgcttttgagatttttttctttgtttttaattttctaaacttgacttatgatgtatcttttatttttattttttcccacttagggtttttctcagcttcttgactctgtagatttatgtcttttgtcaaattgtgaagttttcagctattatatctttatttttttcagcgccatactttcttctcttcctctaaaactctgattggatgaatgttaggtcatttgttattgtcctacaagtccctgatgcctttcttgtttctttgtctgtttttctgtgttcagactaagtaaattctgttgatctgttttcaagttcactgatcctgttctctgtcaattccactccactattgagcccatccagcaagtttttaattttaattagtattttttctattttgtaattatttttggttcttactttttaaaacatttcatccttcaaggagagctactttcaatatacatggaatttcttggaaaaactagtaacagttttaggttatttgtatatatgaactaatgttactcaagattttaaacctctgcagagttatctctgtaattagcagatgaagcatgaacatacataatttttttctctttttgtctcaggtaattccttgttacaggccctaataaaagggaaatggggaaggaaatggagaagagaatttaggccttggcaaattgaaaattgtctgtagtatctcactgacaggtaaagtaggaattttgaaattagagaaaaggaaccaggaatgaagatgaaatgaaaaatttatatttacttcactaaaacttttaaagttgtcatatagtttcagatttaaaaagctatttcttccagcctaggcaacatggtgaaaccccttctctaccaaaaatacaaaaagttagccaggcatggtggtgtgtgcctatagtctcagctacttgtggggcggaggctggaggatcacttgagcccagaaggttgaggctgcagtgagcgaagattgtgcccctgtattccagcctgggtgacaaagtgagatcctatctcaaaaataataataaaaataaataaaaaatcaaaaagttctttctcctttccttcatttcccttgaagaatactgaagattttacatagatgacaaattaggtaaatctaagaaaaaacaaaaattaagtagaacaggtaactttcagtggccatacttgagatttaggttatattgactgctgaggtttatcagtttgattcctatccctacaatataattaaaaataaaccatggaccccccccccccattgtcagactcactgacagtataacattgtgattaaaaagctctttctcagtaagtatgaaaagttaatgcatgaaaaataatatatgttaatttagtgggggaaaagatggtttctgtattacagtggtattaacacaagtagctttccatctgaaagaaaataaagttggatccttatataatggattaaaggtttagaagtagagactaataaaaattaaaatagacatctgggaaacaatatgtaaaatatggaaacccagaaaagagttagtatctgcattatacaaagttttcttacagactgataagaaaaagataactcacttggaacctagacaaatgatatgaagagacaatttacagaaaagatagtctaaaaagctaacaaacatgaaaaaatgcttaaacacacttgtagtcagtgaaatgcaaattaaagagtaaggtattttatatccaaagactgtaagacttacaaagtgtggtatcacttagtgatgatagggttgcagagggaaagataccattctacatcgctaaaagaattacattctttttttgagaataatctggcaacatctattaaaattcaaccagtaatttcacacttggcaatctggcctataaaaacaaaagcactggtagatatgaatgtatgtgagaacataggtatttaagggtacttattgcagcattgttctgaaaaaactgggaactaattgagtgcttggcaccagggagatggtcatataacttatggtatatccacattatggaaccattaaaaatgaattacttatataaactctttgacttggcaggatatccatatgttattaagtatgaaagcaaaatgcatagaagtatatataatatgctactatttgtcaaacactggcaactcattcatgaaaaaatacataaatgcttaacatatatttgtgtataattatagaagaatatggaagactatactaagttaataacatgggtttgggagagatatggatggtaaggaggagaggtagagtggaggcatgatgcaaaaggttaaaaaattgtttagaaaaatcacagcatgcattatatctcatttatccatataagtgaaattatatatatgcatataagtagaattttaaaaataaagaacatgagctctggaatctttcagacatttctggattcaaattctgactctgccactttacaacttactagctgtgtgacttaggcaaattgcgtaatgtctttgaatcaattttctcacatattttcttggggtgggaggatgaaataatagtacccatctatagggttgtcatcaggattaaatttagatagcatctgttaagtgcttagcacagtacctggcttacagaaagcactctcagttattagttcttactgttgccttggttcttacgctcttggacatttgttaatatctatttttaaaactttatcaccatcctgccactttcttgaaacactcctcactggcttacattactttacatgtcttagttaatgcctgtttctaattgttcctttttattttgctgatatcttttttccttacctatggatattgctcccaaaatatagcaggggttgccaaagaagcttttgaattagggtgactgggagaatattagtccatatatggcagcagagaagtcatgatgtagggtttatagggttgatttttaaaacaagatgattttgatacttgctctgcagaagttttatgcatcaatgaggcacccagatgaaaatgctcaatagctggaaaaacttgacaggaacttgagaagtagatataaaggattctctcacttggctaattctcgaagtggatgtaatctccaggggagagcatatagagaagggaatccagggcagaaactttggggacagggaataggagaggaaaaggttcccattgaggactgggaggtggcatagaagccaaaatagagaatttctttaagaagctgctggagaaactgtatgtctactttgttctctcttgagctttagttctgtggctcacattgtcttctggccttgttccttattttcttgaaacttaaactacatttgtaactaatcccagcttcctttcctcccactaaattcccttcttttacatttccccctatatgtatgtgaggagtgctttcattcccctcatctttggcatcaaaatctgtcatctctgcccctttcccttccctggttctccatatcattaccaagactctcattcactcctttttcattcccactcttgcctacatttgattgattattatcaaaataatctaaacaggatattttgaaataatctaaacaagattattttgatagctgccaaactctagtgtaatcttgtgttttttctgtctttcatagtcctcttaaaagaactagtttaggccaggtgaggtggctcatacctgtaatcccagcactttgggaggccgagaggggtggatcacgaggtcaggagatcgagaccgtcctggctaacacagtgaaaccccatctctactaaaaatacaaaaaattagccaggcatggtggcaggcgcctgtcgtcccagctactcgggaggctgaggcaggagaatggcgtgaaccccgggggcagagcttgctttgagccgagatcgcgccactgcactccagcctgggcgacagagcaagactcatctcaaaaaacaaaaaaaaaaaactagtttaatccagttaatccagtccctctgccttttaaatccaccagattatctttcctccaacatcttcccaaactgttctgaggaaggagatgaggtattaatgagagagattagtaggatcaccattaatgaaatatagtcaaatcagtttttagaaggttgagtccgggcgcggccgctcacgcctgtaatcccagcactttgggaggccgagatgggcggatcacgaggtcaggagatcgacaccatcctggctaacacggtgaaaccccgtctctactaaaaatacaaaaaaattagccggccgtggtggcgggcgcctgtagtcccagctactcgggaggctgaggcaggagaatggcgtgaacccgggaggtggagcttgcagtgagccgagatcgcgccactgcagtccagcctgggcgagagagcgggactccgtctcaaaaaaaaaaaaaaaagaaggtcgaatacctttttggcaccagggacccattttgtggaagtcaatttttccacaaatggtggggagtggggagtgatggttttgggatgaaactgttccatctcagatcactgggcgttagtttctcatagggagcatacaacctagatccttcgcatgcacagttcacaatagggtttgcgttcctgtgagaatttaatgcctccactgatctaacatgaggcggagctcaggcagtaatgcttgcttgccgcttatctcctgctatgtggcctggttcctaaccagttccagaccatggcccagggattgtggacccctgttgtatactatgtccccctctaaagcattctcagttcttatcggtgtgctttgaaaaagttcctcagaagtaaagcttatgtgcctttgtgtttaacttaactttgcagattgtgttttccaaagatggccacaatagtaactcccataccacatgttctttttacaatatgactttgacacttcttctactgacccctctcagtagaaatgtcacagtcatattgtacaaagaacatgctgtctttgaatattgatgggcttctgtctaacatggaagtgatgctatgtgacttttgagggtaggtcataaaaggtgatacaactttaatctggtactcttgagacatttgctcttggaaccaagccaccattttctgaagaagcttaagtagcccatattggcaggccaaatggagaaggcacatgcaggtgttccaggccaacagcctatgtgacaacagcatcagtcaccaagcatatgaacaaagatacttccagatgactcctgcctccagtgatcagatcacacccagttcttgagttttctcagctaaggccccagactttggatcagagataggctatctttgttgtgccctttctgaattcctgacccacagaatccataagcatagtaaatggttgtcttaagccactaagttttaaagtaatattttagatagcgagagtaactggaacacccaatgtttcctgagaacactttattttcttaagtatggtaactggtagcttgtgatacatgttccttggaaaacctgtttgtggaatttctggttttctaattttttagcttgccattcaaggccttcatagtgaacagtaggacagcttcggtattggcctatacatatccagcaaatcagtctcctccctgaatggtattttatttatagtttctgtatcagtattcttttactcttctagaaagcccttatgtttattcgctgatagtctcttttgtgaagtgcctgttcaaatatcatttttctattgagttgtctcttactgatttgtaaaagttctttgtaaattctggatatgtgcatgttgggacaaaaatctatttttatatcctgtgtgtatatatatatttcctaacaacaggctcgttttcagaatactatacatatgtgtatatatgtgtgtgtgtatatgtatagtgttctcccactctgtgacttgccttctgactctcttaatagtgtcttttgctaaatccaagttcttaattctaatggaggatggaatttgaaagtcttttcctttttttttgagatgaactctcactctgctgccaggctggagtgcagtggtgcgatctcggctcactgcaacctccgactccctggttcaagtaattcttctgcctcagcctcctgagtagctgggattacaggcacgcgccaccaagcgcagctaattttttttttttttgtatttctagtagagatggggtttcacgatgttggccaggatggtcttgatctcctgaccttgtgatccacctgcctcggcctcctaaagtgctgggattacaggtgtgagccaccacgcctggcagtcttttcctttatggctcatgtttactattaccttgtttacgaaacctttggccaccctaagctcataaaggtatgttccaatgttatcttttggaagctttattgttcacgtttcacatttagatctataatatacctagtactatattttgtctgtggtgtgagaaaggagtcaagattcatttattttccacatggatatccagttgaaccagcatcatttatttgaaagaccttgttttccttactcctctgcatgaacgccattgtcatgaatcatgaagatatatctttggatttgtttctggattccctgttcttgtccactgttttgtctatgttgtcttcaataatggtatatttttattaaacctggatatagggtaaagtcctccaactttgtggttgttcttcaaacttgtcttggctattctttttttttttttttttgagacggagtctctctctatcgcgcaggctggagtgcagtggcatgatctctgctcactgcaagctccgcctcccaagcgattctcctgcctcagcctcctgagtagctgggattatagacgcccgccaccacgcccggctaatttttttgtattcttagtggagatggggtttcaccgtgttagccaggatggtctctatcttctgacctcgtgatccgcccgcctcggcctcccaaagtgctgggattacaggcgtgtgagccaccgcgcccggccttgtcttgttattcttgactttttacacttccacatacatattagaattagcttaacaatttccatttttaaaaaaaggaaagggaaaagacctgatttggattggaattttacaaatctaagaattaatttggagtttatactagtgagacttccagttcacgaatacagtttgtcccctcgttatttaatttctctcagtaatatccagcaaaccacgtagctttctgtgtagaggtcttgcacatcatttgttagatttattcctaagtatttgatttttttgatgctgttataagtggtctcttttatgttttattttcaaattgtttgttgctggtatgtagaaatatatttgattttcatatattgaccttttagctaatgaccatgttgcattcacttattaattcaaataatatatgtaagggtttttttttttttgcattttctatgtatgtcatcatgtttgtgaataatcacactttcttcctatccaatctaaatatatttatatctttttttgttttcttattgcattggctgagacctcaagtatagaagtgttgatagcagacctccatatcttgatcccaaactcagagagggtttcaatattttacccttagtaaacatttactgaagatttttaatacttgtattatatgaaaaaaatgaatttcatatttatattttataaaagatttctttatttctcacttgttaagaattttttcatgactattggattttatgaaatattttctgtatcaattgagatgattatataagttttctttattctgttaatgtggtaacttaaactgattaaattttgaatatttaaacaacttctcatttctgatatatacacaatttagttgtcatctattacccttttgtatagcactagatttggtctgctaatattttgaatagtttttgcatctatctcaaccttaattataatgtacattttaaagtaaaaattacaaagaattgctgattgcataaaatgagttgggaagtgtccctctttttctattctctggacaactgtatgtaaaattggtattattccttccttaggtgttaatttcatctggaccaagaattttgtcttaaaatataagtttattaagagtcttctagtctgttttctttttgtatctgttgggtttggtttttttgtttgtttgtttgttttggaatttgcccatgtcaagtttattggcatacatttcttcatatttgtttattattttttgatgtctgtagaatctggagtgatatccttttttcacttctgatattgattgattgtaccatctcttttcttgagaagtcaagggtttacttatttataggtgttttcaaagtaaaaacttttgggtttgctaatcctctctaatgtaaactttttttcctatttcattaatatctactcttcattattatcttttttctattttctttatttggattcatttattttttttctaattccttaggccaaatggctaagtcctttatttgcagccttgttttctaatatatgcatttcaaaactttgaattttcctgcattcgtatctttatctgcatttcatacattttgtgtcctattttctattctctattgcttctctgctttctgcttatttctatattaattattttctatattttattaatttgttatacagtcttataaattctttcagtggttatggattttttttaacatttttaaaaaggttttctggcttttctaattgttctcaatggaagattatttgggatgtacagatcaccagcatgtttatgttggcttctaggccaattttaaaaaatgactaaagtaaaacttctgttaccaattaaaaattttgtttttctgccctgggcctttaaaagtcaaacctgcacttgaccagtcaccatatattttccaagtaggtttaatactagtgcctaggaatagcactaatgaaggttcagacacatgcaaagtatatgctctgctctgtgtcatcgtggcacaataacagagtccacagaatggtccacatttaatattattatgtttaaagtttttggcatttgaggaagttttagaagcttcctgttcatcttacatatgtaataaataatgtaagttatgactggatattgttggtactttaacttggaaagaaaaccatcttattacctctttttcaagtttttttgaaagactgtctggacatttaattgaaaactatttggacattgcaacacaaaccttaaaaaagttgttatcatctacagttcttacatgaataaagcagtattaccaagtagccaaagtaaaatgcagacattttactgtttgctgaagctgattaagatgtattatttataactccactttcaaatattttatttattagtacagtcttactgttctcaatggctaactttataataaataaatattatatttacatagaatcacttaatgtatactaagtatatatttaaacatataaataaatcagcccatgactttatatgtttgtattataaatagtataacaaatattataaatttgaacctctaaaatttatactagtcaaattatctaggtttgtatgagatttaattggaaaaaaccctcttactaaataaaattagaagcccattaagcaaattaaaacctatatttaagaaaataggcttgcctaagttacacagattgtatgcacgcttggtttttatccagcacaagtcttactgcttatgaaaattgattttattaaagattgcttatgggctgaggctgaaggcgtgccattatcctttaccagtatataattacaacgtactctcctttgttaatctgacagttatttgcagaactgaactaccttggattcttaggtagggaagagttttaattctcgtgcctcagattttccattgctgcttttacgtgggtgtgtgagattcagaaatacgagagtgaagtaaaataaacgatgctttataaatacatggaattaggtgcctacaggggaagctatacagcagctagccagcattttaattccatgtttctcagcttattttatttgaggtgttagagttgtacttttttgttttccaatgtttatagactgagcttgattttcatatctagttgaattctcactaattttgtggctaatcaagctcccacaatgtcatttacttgaagttaagtattgatatttatgatttgaatatatttaacaactttatagttaataactttaaattctcttctggtgaaggtattcagtttggccagtgtcttctcagtcagtgctctaatttaatatagtgtttagtgctaaatctaatattgtttctaacacattataaaggtcagaacttacataaatatactgtagtttgtgatagttttggagaatgggctacagtggcatttattagtgaagtaaaaattcagtccataagaaaatatgaagtgatactttatttagtccatatatttttaatggacagtggtctccactttctaagtggggatttttcatttttctaagtattcttaagagaatcagttttggacttttggttaaacatagaggttagaataaatatgtttatttcttcctaaattcactaaattaacagaataaacaataaaggaataaacaaagagaatgaaagaggcaatataacatcaggctagagaagtgaaattttagaaatgttagaaaagaaatgcataaattataaccaacttagagcagttttgatggaacataatatttgatcattatattgagttacaatttatttaattattccttaatatcgagtcatatatataatttttttagtgtctgataatgggttatcataattaagcattcatctatccatgaccatttagttttttcagcttttcactgttataattagcattccatgcatcagtcttaaaatattttaggtttttttcagaattgaatgactgaatcaaagtttataccttttatgagtattgatccatgctgccagattgctttgcaaagccatttttatgattaccatcaatgtgtggaatttcccatttcactacaacctagccaacattgcatttgccttaggatgttcaatctgggcagggacacatagcccttgcatcagttgcttgtctgtggtgctgtgggaaagtgtggcatgacatgacaaattttaccaggtgaagcttagctgtgtgcctttaccactgccaccttataataaagacagatgctgtgagtttagaggaagaggtgatttcctttgtttacctggggtgctcaaggaaggcttcatgtaacaaatagaatttgagctgtgtataatgagggaaagatttataaagaaaaatttgcacagacacatgagagatatatcagtctggatcaaatcagaagacagaagccacatagtaactaaaattgttagtttaacttaaagaattattagggtatgataagagaaaaactatgaagtcactctataaggagaactccaaaagttaccctagggctgaggaaaagtacccaatgaaggacggaattgaaatgaggttcagacctcattgaaagtgtggctatagcccattggatggtagagaaatttgctgcgttgtctgagccaacgctggtgcacaatcacagtgtgagcaggtgagttaagactggtaggagagcatgcagagggaatcagggcagtgcggcagggccacagtaacaacccttggggtgcaagtgagttgaggttggctagttagtagaaggagttggagcaccactttagataccactggaattgcaagttggagaggcctccctgtgtagcaatctagagcactgctgtttacagcttggggcaggacagtataccaagctgctgtgtggaacaaaggtcaggtggctggctggccaagccggtgcatatggtttgaggagaggggctggggagtagccacctggtctggggctcctggctatagtgctgctgctgcctgagtagagagctggagaaagaaagcacacagccgctagccagatgctggagaaagctttcccctgcaggcacctagtactacagcagtgttgtttttcagccttggcattattgaccttcagggctggataattatttgttgtggggagctgtcctgtgtattgtaggatatttggcagtatccttggcctctattcactgtatctcagtagttccccaagttatgacaatggaaaataatctccaaatattgccatatgtcctctgagggcaaattgtctctagttgtgaaccactgcaatagagaaatctcacagcagtggaacagtggaggggtaaaatataagctctccagaaacctgctgagaaaactccttccctccctttccagtgcactgtattgacagagcttagcatcatgtcatactggcaaatgaaaaatattttaaaggcccagatccacttttccagataagacaatgaagaatgaatttggagtagagaggtaataaactgatagctgtacaaagtacagttatgggattaaatatggttggagaattaaatatgagcaaagttatagaagcagaaaagcgtaggggcactagggaaattcaaggacaagaagactaaagtgcaaggctgatgtaaagtggtaagaggagaataagctagaagggccctttgaatcttaactctggagtgctttgagtgagtggaagagaggggaagagaaagacagaaagaccaatgaaggtttgagatttggtgctgtcagtagatgaggaaggcagaggcagaggtggaggagtgatagaaataattgggacctacatttttgcacataactaattactcaggaaatggttcatgatagtatatcctgggttttttcccacctatccatttcataatttaatgtagtgctttaatacataaaatatgcttattggggctggatgtgatggctcatgcctgtaatcccagcactttgggaggccgaggtgggtggattatctgagatcaggggttcaagaccggcctggccaacatggcaaaaccccatctctactaaaaatacaaaaattagccaggcgtggtggtacgtgcctgtagtcccagctactcaggaggctgaggcaggagaattgcttgaacctgggaggcagagtttgcagtgagccaagatcatgccactgaactccagcctgggcaacgtatatatgtatatatatatacatgtatattgtgtgtgtatatagatagatagatatagtatgtgtggatatgtatgtatatgtatatatacatatatatacacacatattcatacatacacacacacacacacacatacacacacacacacacacacacacacatagaatttgggagaagagaagagtaatatgaggaaataagagaccatagggagttcattgtccctcttactcttctatggagtgaatgcaagggcaagccagaacctctgcactttctcaccaggtgaaggtaggggaacctgtctcatggtaatgcacagagctaaaagagaattctagcagagggaatttgtggaagttacggttttgactcaaacccctctatagtctttcatttttccaaggatatgtctcctcctttctaagtactttcgtggcttgttttacgtgtcttgcaatcgtataatccagcatcactgaatagtcttatagtttcccagatgtccttgtggcatttccttctaggtatattgaaacttgcccttttttattcttgaattttgtctttggctcaaggttttacattttactgactcttcatactacttttctccccttatttagaaatggactcagaactcaaggaagaaattcctgtgcatgaggaattcattttgtgtggtggagccgaaacccaggttctaaaatgtgggccctggacagacctctttcatgatcaaagtgtcaaaaggcctaagctgcttattttcattattcctggtgagcgtaaaagtctgggtgaggagactttttgtagatactcataactatgtctgattttaaagtatagagaatttggtaaatatggaaaaccttggagaaggaattaaaatcgcttgacccattgttaacaaccacccttaatattttgacgtctggattttgtgtttttcttctatgtatttacattatgttgtctgttgtgtgtgtgtgtgtgtgtgtttgtgtcacagttggaagtatgtactatatatgcagttttgtaatgtggtttttaaagcatttcttaatatttaaaacttcatcaatatttttgccagttttctaaactttttctgcctcatttcaacatgattatatgtttattatagaatatttggccaggtgcaatggctcacgcctataatcccagcactttgggaggctgaggtgggtggatcacaaggtcaggagatcaagaccatcctggctaacatggtgaaaccccatctctactaaaaaacaaaaaattagctgggcgtggtggcacatgcctatagtcccagctactcgggaggctgaggcaggagaattgattgaacctgggaggcagaggttgcattgcccccagatcacaccaccgtactccagcctggggggcagagcgagactccgtctcaaaaaaatatttaaaaaaataaaaaataaaaaaataaaaattaaaaattagaatattctgatatttggcagctgagtcacttgtaacttttgctagatcattgtcaatagaattagggacagatgcttgagcgattgcaggtattcaaaatgcattttaaattgtgagtttgaacatacatgtttattcttattctgtgaattgccagttcgaaacccttgcccatttttcaattgtgttttcaatgttttccttattgattttcagttgattcttacacaactgtaaaattgtgttatatctgtcatacgtgacaagaatctttcctggtttgtcttttgacatcatttacaatgtttatttggttgtatagaaagtatctttgttatgtggccaaaatgctaagtctcttcctttaagacttcagggttttatgagtttcttagagagggctttcctactccaagattataaaacaattctgccatgtcttctagtatttttacaatttcatttgtgatctttaagttgatgcatctagattttaagggcaggcactgaggaagggatctacttttcttctccctctcctttggatggcttattacatggtccacaaccatttattgtatcatctgcctttctcctactgccttgcaatgctaactgtattgtaaagtagattatcctgtggccaggagtttctttccatgtttttcgcctcttcatgtgttcttcatgttttttaataaatgcagttttatgatacttttacatattttttggaacttgttcatttttattcttttccagaatattctttagcttcttttcttttggctgcagaatatattttttggcttcattaggaggaaaaaaaaagcttaaatgatctttaaagtcaactttcctaaaattgatctcgtaaaggcagagtataatgatagatactaaaggctgggaagggtgcagggctgggaggagggatgaagagagaggtaaacaggtacaaacatgcaagttagatgaaaggtgtaagttctattgttggaacttatttataccaacagaattggcatagtcggcagagtagactgactatagttaacagtagtgtattgtattggtataaagtagctagaagagaggccttggatttttctcaacacatagaaatgatgaatactcaaagtgaatgtactaaaacaccctgacatgatcattacacgttctatacaggtaacgaaatatcacatgtaccccatgaatatataacataaatatcaatatctttaaaaaaaataaataataaccaaaaaatcagcttttctagttccaacagatgttctcagaggcaaccacttttaacactggtatattcctgtgatatttattccacattcttttttgtttgtttgtttgtttagacagagtctcactctcttgcccagactggagtgcagtggtatgatctcagctcactgcaaccctccacctcctgggttcaagagattctcctgtatcagcctcatcagtagctgggattacaggtgtctgccaccatgcctggctaatttttgtagtcttagtagagacagggcttcaccatgttggccaggcgtgtgtcgaactcctggcctcaagtgatctgcccaccccagcctcccaaagtgctgggattataggcatgagccaccatgcctggcctttactcgtttctaaatgaaatacttatatttcttcttcttcagttgtcttttgttttgttttgagatggagtctctctctgttgcttaggttggagtgcagtggtgtgatctcggctcactgcaacctccgcctcccgggttcaagcaattctcctgagtttttaatattagatgttatctattgtcttcctccatgaaagaaaaagattagctttcttatactttcccttctccatgcacaatcatatacccctccttctccatctattttcctagtatgggaatatttcagttttttgttaggtcaatattcagtgcttttattattatgactatgtattatattatattatgtatattatattatattatattaattatattatacatagctaagcctatagggaattgcgcatgcatttcctttcttatatatttttgtttgttttccctgggttaatgatgttctgttatctttttgcttagttttttgtgctttaatcactcatttatcctagaactattctctagaagtgaaaagaatcctttcaatgcatttgagtcatcagtcagttttcagaatgctctgtcctttggctccagtctggactcattgctccccaggcctgctgcacagttgccatcctggggacttctgtcactttcttctggcttggatccctcgtttctcagatcccacatttttatcttagtttattctcttgtttttggtagagcatatcttctagtagcttccttagaagaggtacatgagaagtaacacagcatgctgcaaaatgtcttagactctaggttggaaataatttttctttaggaggaaaatggagggcgttaatggagggcattaatcattgttttccaacactcagagctgcttataagaagtattggtatcatttctgattttcgccttttgtatgtgaagattctctacccacattttcgagaccttttctttgttctgagattctgaaattttacagtgaagcaccttggtgtgactgttttttcatacaaggtacttgggttttggtgggcccttttaagccagaaactcatttcattctaatagcgctttgtttttcttttcttttttgtagtctcatgtttaatggatgcaatatcattttcttttcttttcttttttgtttttgcatttgcaagaattttcactgtgttccttttttcatttgcattagtctttagttttcctcaaatgtctggcaatccttgactatccattcatgtttaagaggaagacaaaaaacaaattggaagctttgcactcagagctggggcttatccagaggtgtgtctagggtgattagccatcctagcttgcctaggactgagaggttttctaggacataagactttcagtactaaaaccatgacagtctcgggcaaaacagaggagttggtcgccctaggtgggcctcatcctaaggtgattgagtagggacccagcatttcattgacggatttccagctttcagtgtctgaagctctttcttttattgttcagttttcctggggaggaatcttccaggctcctgtttgaagagtggaaacctgtctgttaatgttcaaagaggaacaggggaaaggaggtggtagtttcagtgtttggttatgcctagtccagcctcttctcagtatggtactttcattctcagctggactaagattcctgatcgagaatttctctttgttttaaccactaatgggaataaactattcttctgccaggatgtaacagtctttgtggaagtcagtccgttcagcatctattaacataaaaatacatgtacttttccagtagtgaaggagagtttgaaattatagtcatggcaagtgctgtttgatggagcagagatttggaatagcttatagcataggatagagaaaataagtagaaacattatcttaaactcgagaagggatatccttctaaggctagaaagaaggaggtgaaattggttactaaaatggaaaagtataaaggcgtatcagagggaagtgaagtctcctgcttcctgactactgttttttctgttgagagttgagaccatgttttgaatgctaatcatttccagctcatgaaaagatactaggcctgtggttcttaaagttggtgtcaggatcagaagtattgcttgagaactttaaaaatgcagttcctgggctctatccctgaccttctgaaccagaaagtctgggggttgggcaatcagtgttttaacaagccctgcagggaactgtgatacgcatatctgatccagggtgtagtcatgggaatgaattgcttaagtttaatgtaggtgaagttctttggatttcatcataataatgaattatgggacaaagtttttggctcagtcagtccaactggattttgaaatgtcctgacatgacatgacaagtgaaactgtcatttaagggtcaaggctttcagagaaagtgtgagtgactaaaaagttgatagatggaaatagatggcttgagtcttaaagaagaagaggttgttgtaatagtgaggtgaaatagtaagtgggacagacaacccacccacttccccacctggagatagtatttattccctcactcttttatcccaggtgctaggaatactgtgttgcattaagtctttgctctcattgagttatatgtggtgttagagaagagtgactgaggcctctgctgaagaggattgaaaggaagagagcccattacaggggagagccagatttcagatatggtgaggagataaagggagtattcagtgaagacactgagaatggagggaagcataaaacatttgtagtttgatagtctcattgtttatagtgctttgacattttcagatcatatttcatttcctagtgttcttttatgtttgccctgctcattagtttgtgggatttagaattgtattttgtgtgtgtgtgtgtgtgtgtgtgtgtgtgtgtgtgtgtggcaggtttcgggggagctaatctatttacactgtggtaataatcaggataacagtatttcaaggattgtgaagccactatggacaccatgttatgtccgtctctgatagactgacataacatttcattttaaatcacattgcttttgcagctagcaaaattaattcttcacttctaagttagtaatgataattgtgagttttcttttcttttttgtagtctgatgtttaatggatgcaatatcattttcttttcttttcttttttttgcatttgtaagaatttttactgtgttccttttttgatcagaatccacagattgaagaacttttaatttagtttcattttttctgatgaaccttagatcttggatttctgtaaagtaacattgtccttggactttctttaactagtgagatgaacaaagggaatcagattgagaactcaccatagagtacactgaatcataattcttaggaggtcatatggagataacagaaccatgtgaagtatcaagtgctgtgagcacagtggttggagatatagcagataaggctccatgaatgagtccaataggtctgtctacatggcaacctattatatagatactgtgccatattaacttgatatgtggcagttttcgttcctctccctacaaaattaactggaaggtataagtctatacttgcagcattgtatagttggagattattagcagtcagggcctagagatgatcactacaacttctgttatacattgcatgggtatttgactgatttgactgttatgagcatgttcaagtgtgtgtttataacacatttttatgtaaacttttgattaaatattttacttgcatgtctgcattggaatgttttccaacatccttacacctggacctctcccatacccctccgtgtgtgtgtcttttttagttgcataagtgtaggccttttaattttctttgtggtttcttaacaaggaggtttaaatggtgaagtatgaagtactgtatgcaatggtatttaagcattttgcattgcattttccacttctgtctctgttataagttagacctttgtgatacttgctatgcgttcagtttgaaaggatttattgtatgtgagtgccatgtacccaatctagtgctgcttggtgccactggatacagagaactatagcaagtgatggctacttttaaagaagttaaactttcaagtttggtacgttatacatgctacaatgttaagtatatttctgacaggataaaacttccatttttttctgcatctgttgaggatcgtatggtttttcttttacggttggttaatgtggtggatgatgttaatttttgaatgttaaaccaatccagcattcctgtgataaatcccacttggtcatgatgtattatgcttttaacattttgatggactcagtttgctaaaattttgtttagaatttttccatctttgttcacgaggtatagtggtctgtagttttttctttttctttttgcaatgtctttatgtggttttggtatgagggtgatgctggcctcatagaatgagttagaatatatttctttcttgatatggtttggctgtgtccccacccaaatctcttcttgaattgtaactcccacaatttccacgtgttgtgggaggggctcagtgggaggtaattgaatcacgggagcaggtctttctcatgctgttcttgtgatagtgaataagtcttatgaaatctgatggttttataaagaggagttcccctgcacacactccctttctttttgcctgctgccatccatgtaagatgtgacttgctactccttgccttccaccatgattgtgaagtgtcctcagccatgtggaactgtgagtccatgaaacctcttctttgtgtgtgagttgcccagtttcgggtatgtctttatcagcagcatgaaaacagactaatacatttctcttctattttctgaaagagtttttatacactgggcatttttcttccttaaatgtttgatagaattcaccagtgaagctgtgtgggcctggattttctttgtgggaagatttttaacttaaattctaattaatccaatcaatttagggctatttaggttatctgtttcttcttgagtgaactttgatagtttctgtctttctaaaagtttattttatctaagttgctaaatgtattgctatgaaaattttcatatttttcctaattactcttttaagatagaagactttttttaaatttaaatctgattatgccttaaccctgctcaatctcttttaatgttacttagattaaaagccaaattacttatcatggcccaaaaggtatcacatgattgtatttctcttcctcttcaacctgatctcatacaagatttgatatctcttgttatgctttagccacactgatagattagatgcaaagggaagaaccaaggattatggactgtcttccatttcttcaagagctaagatctttatttcttgagggcctttgaattagctcttcaagagctaagatctttatttcttgagggccttctccctccttagtatttattctcttccctcaaattttcacaaggcttatttcttgtcattttggggtcttagctaaatgtcacctcctcagacctttttttcactctattctcttcccttctctatcatgtgaccctgtttattccttttataggagttctcacactctttatctcacctatttagttatgtgttgtatattctcccactagtacataaattccaaaaaggccctcatctgtcttttgcctgacatagtgactttcatacagtaagtgctcaataaataattgagggctaaaagaagctgtaattctgaatagaattaatgaacataagtaattggcatcatcatttacttgatgatgataaaattgtggatcagaaagcttaagaactcagacttaatcccagagatagggagaaaactttgttttatttatttatttattcttcctcatttaaaaaaatatgttaagttctgggatacatgtgcagaatgtgcacgtttgttacataggtatacatgtgccatggtggtttgctgcacctgtcaacccatcatctaggttttaatgcctgcatgcattaagtatccattatctagtactcactgtttttcatatatcgtgtcattgtaacttacatctaaatcatggggttatctttagtgtctccttaatgttacaccagtttttaattgttataatagctgtggtattaatagctgccatttattcagcccctaccatgtgccaagttttgtgcaagtggctatccattcgttatttctaatgaaaatgccaactactttatagagatattgtaagactaactaaaacaaggaaggcagaagatcctacaccggattactgatgttttttaaaaattcagtattatgattttcttttgtatatactttcagtcatcaaatatttatttagcacttaccatatatgtgatgttggctaagttatttaacctctctgtactcagtttcctcatccataaaatggaagtaatgatagtgctacctcatatgataattaaataatatatgtaaagcacctaaacactgcctggcatgtagtaagttatagtacctaaaaatattagctattattattttctagccatatgaagaaatctatgagcaacgtaagacatgtgaatatgaggtataacatattcctagaaggttatactcagtaatataaaaatataaaatttttgtaaagtaatatattaatgagatgaaattttagtcacaatcccaaagagatttttaagaattgaaactagtgaaaataaccctaaagtttatgagaacagcctagaaaatttagaaaaagaaaaagggaagggatttgccctacctgttaacacttaaaaaaaaatgtagtaattaagacagtatggtcctggcagaggagaaaaggaaaaataaactgaattatttggtatcagaattagcaagtgaatgtaaaaatgtagtattgggtctgaagatatttcaaatcaatgcagaaagaatggattatataataaatggtcttggaacaattggccagtcacttggaaaaaagttggattgctacttagtattttatactaaaaagtattctaaacttactgaagacttaaatgcataaaacatgaaacagtgccacccacagcttccatagatgttatagcccctgtgctggtatgcccttcctcccttctttcttccttagctatacagtggccaataaactgaccaaagaatatatttctgcatttgaggaagttttcatcctatttgacaaagaagccaaaagcaccatcacaaaaaggaatttggaacttgggtcactaggtcagaatgcaacagaagcaaaataatatggatgctacggccgttgtatattaccgttatagctagacgttgttgtacaagtttgaatacctaacatttatataatacttgctgtgtttcaggcagtgttacaatgctttgtacattgattcacttagtcttcaaatgaggtagtaccattattacacattttgtggatgaggaaaccaaggcagagggaggttaaatagcttggccaaagctcacacagttggtaagtggcaaagccaagattccaacccaggtagtctggcttcagagtctatgctcttaaccactttactacactgcttatctagcaaactgaaagatataaaaatggagtagaaatcagtgaaattcgacaaggatgacagtggttatttacatcagtgctccagagccatgtcatgtaattgcagagaccagaaagcctaacaacatgaagaaatagataaactgatcagagaaatagatattgatggaaatggactagtagctgtgaagactttatatagatgatgattacaagatgaaaatcccatttcgttgtaatttcccccctacagatctatcagattgaatgtttttaaaaagatcgtttatttattgtttctttatagcaaactcatgtcaaaaataccttctgtacacacataagaaaaatctacatgtacttgtagacgtttgtttccccaaaagatcaagctgtacacctgtttacaattataagtgctagtgataagtgacaaggaaacagtagactccttaaagctctccctgtgcatgcttcttacactattttggctggcttgtttttctggttttcatgcatcttgttaactgagcatgaccaaatcttgaagtgccttatatgcagtattactgattttagacttcttccagatgactttatctggaagacactgaagggtgtttaaatagggtactgctgtgattttaatggaagtttgaagataatctctcttgggtactctgaagaattcagaggaaagtgtgaaaagaaacagacccatcttttctagcctgcgtgtcatcttatgcctgtttattactttgattaatctaaggtctgtgtttcttttcttaggtaacccaggtttttctgccttttatgtgccatttgcaaaggctttatactctttgacaaacagacgctttccagtttggactatcagtcatgctgggcatgcgttggctcccaaagacaagaagattcttacaacatcagagggtatgtccttgttaatatctactttcctttagagtgagtgcagggtcatgtttctagcaagcttgctaaggttaagagttacaccagtggaaacctctgcttgtggcattaggcccatggtgccatattttggtaaacttaggatttttagagacattttaactcttcatgtaattttctgtaagaatatgggtagataaaacaatctatgacttgccttctttatttaccaattagtaatcaactgtgtgttttttgatcatgtattatttttccagggttgttctaggaggaatggtggggaaaaagcagtccccaaccattttggcctctgggaaccagttttgtggaagacaatttttccacagactggggaggggtggatggtttcgggatgaaactgttccacctcagattaacaggtgtgcaacctagatctggcatgcacagttcacagtagggtactcctatgagaatccattgctgccgctgatctgacaggaggcagagctcaggcggtaatgctcactcgcccgtcgcacaccttcatctgtgtggccgggttcctgacaggccacagacaggggttgggaaccccttttataaaccatgttctttactttaaagaagctttttctctcatatttagagaataattaagtgataaaccgtggcctgctaatcatatagacacctaaggggtaaacaaaggagaaaacacagtgtgggttaggagagactttgtggagtaggcatgtgtcttagtcagtttgggctgctatagcaaaataccatagactaagtagcttttaaaaatggaaattgatttctcatagtttcttgagactggacgtccagtccagtctgcactggcagattcgatgtctgatgaaaacctacttcccgattcacaggtggcattcttgctgtcctctcgtggtggacacaggaggcaagccctcttgggactctcgcgggctctaccctcatgaccccatctgatcctaattacttcccaaagacccctctccacctcttaatagcatttgggcatagggtttcacctatggatttgggggccatataagcattcagaccattacagctggttttcacaattgaataaaatttggatttagggcatggaggtgggtgcagaggtacaacagacagaaagagtagcacagaagggagcaagatttaatagcgatgttactgctaagcagggccagtttgagagggactttgagagctggagagagagccaggactccatgctggaaggtttctaaatggaagaagtaataccatggagatgcaaactacctcctttaaatctgtgagaattctagcatgttcactgttccaaaaaataaaaaatgagagaaaaaataacttaaatataagtttataaaacataaacataactttataaaagtacagcatatccaagagttgaaggacactttcaaaaggtgtaacaattggaatgctctataggcattccattcaagggcgttttgtcctagggggtttcctttagttaatttgaggtgagatcgaggtggctgtgacttcattgcccagtttgcttctggttcttgtacgtctctctagtggtatgagcatctttttgtgcttattgagcttctcagttttaaagatattttacaataaagttacattttacatctatagtcttcgttattatatatgcatgattcttttagacattgatgtacaaggttgaacatacaaaagcctgtactctttgaaggctagttttgattatatttatttttaattgtaatctctgacctcagcctctgatcctcatatcagatacaattttttgtttctattttaaaatttgaatgtggtggcaataaatatggctgcatatgtgaactcctctgaatactttctgaaaaacattagtttactaatctgttattaatttgtgtaaatgttgcacgtcagataaacagtatcaatttatctagttttatctaattgttaaccttgtattttgcaactgaccctttagctgcagggagtatgttgtataattttctatttattttcaaaatggattaccttcctttattgtatttttagattaaaaagttatatgtgcttattaaacaatttagtatggaaaactgaataagaaaataaaaaatcggtgtcctgtaagttaaaggttgaaaagaaatactaaaacttcataatggtttaattatgcttaaacattttcagcctaaagcctaacaaacgttagcaccttggcactaagagatgagatttttcaatgaataatactttgtgtaatagctcagatattttctaggctgaagtaagcatctaggaatagcagcacaagggaccatatttttagtgctttttcccctatgtcaatatcgtgatgaagtgtgtatcttaaatgttagtgaaatagttacatttagattttcagggtattttttttcaacatttatttgcttattacctgttcaaaacttgtatttggcatatgttatacattaagaaaatatttagcatagaatttttttaaaaataaatagtggacttccagtttcagctctgacatgtagaacttggagtttgtcacttctctcctcgcaataagaaaaaagctgaggctaagtgtggtatctcatgcctgtaatcccagcactttgggaggccaaggcaggcagatcatgtgaggccaggaagttgagaccagcttggccaacatggcaaaactgcatctctactaaaagtacaaaaattagccaggcgtggtggtgcttgcctgtaatcccagctactcgggagactaagacatgagaattgcttgaaccttggaggcagaggttgcagtgagccaagattgtgccactgcactccagcctaggtgacagaatgagactgtgtctcaaaaaagaaagaaaaaaagaaaagaaaaaagctgaacaaaactaaaaatcatttttcttagacctttcagagaattgaggtcacaggacaaattgtcacctaaaatctagagagacaaggaaatacaatgaagattgtagaagacactagtgccgtttatgtagaatacactacataagtgtagaatacataaatggtgattttgatgaattgctgggggtaaagtacagactattttaaaagtaacaaacttctgcaagcctattcttgggggacttcttcactttcataggtattacttctaggaaccttatcaggtacttttgtgaaaatttgagaaatgtcctctatggttttttgttaggagtggaagagaagtaagcattttgcagtatgtccagaatattctcaataacatggcttactttccaagggaaaaagagttccagagctttatccaacctggggggaagggcagttagccaactccgtcttcccctagccttcatgtctcacatgctggaggagaaaaaaagatgacaaaaacttttgaagatcacagcacaggcattcaggcccactgaaagactgaggtttaatcattacattataggatgtttccctcctcattttaccaccatgtctacaggcctctaccttaataatagttcattataactataggagctacaagacacaaactctatttaagaaggagttcttagggaaaaccaaaggcaatggaggaaaaaaaaacaagaacattagaggaaactgaagtttctgatacctatagctacagaaaacattaagcatagccctggccaggcgtggtggctcatgcctgtaatcccagcactttgggaggctgaggcgagcagattgcttgaggttaggagtgcttgaccagcctggccaacgtgatgaaaccccatctctactaaaaatacaaaaattagccgggcatggtggtgcaagcctgtactcccagctactcgggaggttgaggcaggagaattgcttgaacccgggaggcagaggttgcagtgagccgagatagtgccactgcactccagcctgggcgacagagtgagaccctatcttaaaatacaaacaaacaaaaaaagcatagcccagcttctagtggcattaacatatagcctcacataaaaggtctatttacctcattcctattacttaatacatcatgtccagctttaagcaaaaagtaaaattagaaggcattgtaaaaggtaagaaaaaacagtctgaagagacaaagcaagcatcagaaccagagtcagatatatacttattaccaattttagaaatatcagatcgggaatttaaagtaaccatgattactacgttgagaactctaatggaagaagcagcatgcaagaacagatgggtaatgcaagcagacagtagggaactcttaagaaagaatcaaaaggaaatattagaaaacaccgtaacaaaaatgaaaaatgcctttgatggactcaccagcaggctggatgaagctgaggaaaaaatcagtgggctggaaaaataggttaatagaaattttcctaactgaaatgcaaagagaaaaaaataatttataaaagtacagcacatccaagagttgtgggacaatttcaaaaggtgtaacatatgcataattggaataccagatcaagaagaaagagaaaatggagaagataagagttgaagtacttaatgccagatgacaaaacacaggtctaggaatctcagagcacactaagcaggatcaatactaaggctctacacctacatatgtcattcttaagttgcagaaagccaaagacaaaatcttgaaaataggcagaggaaaaagtgccttacctgtagaagaacgaagatgagaattacagggaacttcttgtcagaaatcattcaacaaagaggagaatggagtgaaatatttagtgtcgaatgaaaaataacacttacctggatttctctatctagtgaaatcatccttcaaaagtaaaggagaaagaaagactttttcagaccaacagcagctgaggaaattagttgctggaaacatcctatgcaagaaatattaaaagaagttctttaggggaagggaaagcgatagagattagaaactcaaatctgtataaagaagagcatcggagaaggaataaaggtttaaaaagtttatttttcttgttccaaattgatctggtagatagctgtttattcaaagtaataaaagtaacagtatgttgggtaattacaacatggataaatgaaatgaatgtcaatcatgttataaaggatggaagagaggaattgggaatactcagttgtaacatacctggactaacggtgaaatggtatagtgttacttcagatgaacttgtgtttttttgttttttttgttttttttgagacagggtctcactctctcgcccaggctggagtacattggtacaatcttggcccactgcagcctcaacctgccaggatcaggtgatcctcccacctcagcctcccaagtagctgggactacagacgtgtgccactacacctggctaatttttggatttttagtagatgcagggtttcaccatattgcccaggctggtcttggaactccttgggctcaagcgatctgcccgcctcagcttcccaaagtgctgggattacaggcatgagccactgtgcccagccaaaaaaaaatttttttaataagtataattattatgagaagaagagagaatgttagatcatttaaaatgctcaattaaagctaggaatagagagtaggattttaaaaagaaagaacaagtataacaaagaagaaacatttataaatatgatagctattaattcaactatatcagtaatcactttatttatttatttagagatacagtctcactctgtcacccaggctggagtgcagtggtgccaacgagactaactgtagcctgaaactcccaggcttaagtgatcattcccacctcagcctcctgagtagctgagaccacaagtgtgtgccagcatgcctggctaatttttatattttttatagggacaggattttgccatgttgcctgggctagtcttgaactcctgggctcaagtgatctacctgccctggcctcctaaagtgctgggattacaggcatgagccaccatgcccagcctcagtaatcactttaaatgtgaatggtctaaatataccaattaaaatacacagattgttggagtggtagggggagatccaactatatgttgtctacaagaaaccactttaggaccaggcacagttatacacgcccgtaattccagcactttgggaggacgaggtcaacagattgcttgagcctaggagtttgagaccagcctgggcaacatggtgaaactccaactctacagaaaaatacaaaaattagtcaggcgtgctggcacgcacctgtggttcagcctactcaggaggctgaggtgggcagatcacttgaactcgggaggttgaggctgcagtgagccgagatcatgccactgcactctagtctgggcgacagagtgagatcttgtctttaaaacaaacaaataaacattttaaaacaaacaaacaaaaactttaagtataaagacacagatatgttgcaagtaaagggatatacagagatataccatggtagcactagtcaaaagaaagctggagtagctattttaattttagacaaagcaggcttcagaaaaagaaaatgtcagggataaagaggagcattacataatgataatagaaccagttcttcaaggaaacataacaatccttaacaaatatgtacctaacaacaaaggtcagaatgcaggaggcaaaactgatagactgcactattataagtggaaacatcagcaatcctttttctgtaatgaatagatccagcaaacagaaaggcagtaaagatatagttgaactgaattgcaccttcagtcaactttatttaattgacatttatagactacttcatctaacaacatagtcttctcaagcacacatggagcattcaccaagatagactacattccgggccataaaacataccttaagaaacttaaaattgagtataaattatacaaggtatgctcttagaccacagtggaattaaactagaaatcaacaacagaaacatagctaggaaatcccaatatatttagaagttaaacaacacacttttaaataacacatgggtcagtgaagtctgaagagtaacataaaaatactttgagcaaaataaaagtggaaatacaacttataaaaattggtaggatatagcaaaactagtgcttagaaggaaatttatagcattgactgcatgtattagagaagaaggaagatataaagttaattacctaagtttctgccttaggacaccagagaaagaacaatttaagcctaaagcaaagagaagaaaagatgataaaaatgggaacacaaatcaatgaagttgaaaacaagaaattattagaaaaaaaatcaacaaaccaaaagctagttatttaaaagactaataaaattaataagcctgtagccaggctaaccaaggggggagaaagagaagacgcaaattacaagtattcagaaagaaaagaagattcattgctgctgatctcttagataataaaaggacaataaacttaacttagataaaagggaccaatttattgaaagatacaagctcccaaaactcacacaaggaaaaatagatgatcagaatagactgtatctgttaaagaaattaaaccaccaaagctgaataaggacaaaacaagaaaagtataggtcaatatccttgagggacatacatgcaaaaattctcaatagaataccagcaaactgaattcaacatcacattaaaaggatatggtcatgatcaagtgagctatcttaagtcatactatagacagaagcgaacatttgaagagaacatgaatggcaactttgaaagttgaaaacagactcagaggatcacccttgatcaggtgttctcaaactttggcatgcatcaaaatcacctggagggtttattaaaacacaggtggctacctctgagttgttgatttagtagatctggggtgggacctgagaatttgcatttctaacaagttcccaggtaatattggtgctgctggtcctgggaccacattttcgggaccacattttcagaaccactgccctagatgttcacaataaacactgatacggaaaaccagtagaaaatatctgtcatgtgtctgaatttttaggaaacagctttaattcttattgtaaattgacatcttattatttataactttactttgaatatgtttatctctagttggcctgcttgtgtactattgagttaataacttagtaattagtctgggttctttgctacctaatgagaatagtgccatctagaggcattagcccaaagggccaccatagcgccaaaggaagctgtggtttctggagagggtgagagggcaactcattatcatcaaggacttattgacaacctactaggttattaactgtcatgctacaagggtatacaaagagttagaattgcttgccagtctccaccttttaggtttgtgactttctgtatctgagtagctcaaaagttctgtgaaggctaagtagggctctgggccttggaccagccccccattcagctagaacagttctgctctcatctgttgtacacattggaggttatgtttgcaaatgtatgctatagtggctttggataggcaacacagatatattatttgctgtccaagattgtcctaaggtactgattttctggcatgcaaaataatggcgtgaaaaatatgtaatcattgagaaaaagggcataagctattaccacacatcaaatgttgaaagtatgttttccttcatattagcacatgttaaaattatgaacagttggaaataatattctagtagaccacattatcacaatcataagttgaatataattggaagaacagatgttcaccaatgtcagaaggggatgattcgaggggaaaaaaagtgtgaaaagaaaatttgaggagttaggagtataaactgttttctggatttgatttgctatagagtcagcacacatgatgggaaattcattatcaactatttcaagtcattgtttagaaagtatgaaatgaaagctagaaatcatgctggttttgtattagcagataaaaacattacctaaaaaagttatacaatcttgcaactaatgatgaatttgagtcatgcttatccaaagaaacaataaactactctcactgcagtcccccaaataggaagaaagagagaaaacccagtggagctttctcttgccaggactgggagtggcagggcaacaaggaggtaagatggaatgactagatgagcccaaggcaggaacaaccaatcaatcaactctcagggctcacagtccctagaaatgaaagcacgtaaatctgtgggtcagaagagcaaaaaaccaaagtgcagagcaagagaagaagttaggaatcaagcaaattgttaagagtcccagggcagacagaagtagggagagtgagcattgcagttaacgtccataacacagaccagattgtgcgctcctctcttggcaatctataggtatcttctcattgatcacagaaccgagtccagactccttggtgtgaagttcagtttcctacttcatttatacccaactttcctttttaaccttatgcttcacctttccatataaccacacatagccacagaactcatggctttttccaagtaacagccatggaaacatggctgtttccaaaatatcactttacaataaaaagtaacacactttttatgcctttttcttttattgtttgctaagtctataacattatgttctccttgctgaatctctctgctgtttcctgctaaggactgttgaagtccttagcagataattggttttagtcaagtggaaagcataatttgatgactgtggttttcaccgtttggagaataataattaaaaattattttataaaacatatgcttggggtttacaaattttgaaatttgttttctaaataagatagcagtgttaaatagaataattatctcccatctccttcactgtaatgcatactttaagagctaacagagttgtaccagtgtttagatacagggagcttacagaatacttagggagggagctggggtttgatgagagtgtactcccacttcagcctagtaacctcaggacagttgtgaaaggaaggccttatggatcgatgaagtaggtaagcctacagaattagggaccacagttctcattgagccaattcactgatattcagtatcaacccacaacatctttgggggcttctgtattccatgtgagaaagaaatcaatggtgattttccctacaaaataggtgtaagatatctaggaacaaccgcatgtcaatgcattcttttttttaaatttattttgagaaatttttaaaaacgtagcaaaatagagttatataacaatcaaagtttctattactcacaattgacagttaacattgccatatttacataaatattttttgttaacaaaataagtgaaataaaacaatacagaaaaaggtttgttttttgtatcccatctctagttctatcatgaatttagagtaaatatttcatgtctctttttatgtttgtagttatatatatttatatatatgtatagcatggtgaacaacatattatttttttgtgtatttgaaagaaattaaggaggaaactttttattttattttttcttaaaaaaaaaggtatacatgagcagaatgtacacgtttgttacataggtatacgtgtgctatggtggtttgctgcacctattgacctgtcctgtaagttccctcccctcaccgccccacccctcaacagccctagtatgtgttgttcccctctctgtgtccatgtgttctcaatgttcacctcccacttatgggtgagaacatgcttcacaaggaaactgtattttcatcttgatcaaagaattctttaaaatatgaaatattattcttagcctttcaatttttacatgcaagttgtttagttattaagatacagctttggagtaatgactgggggcaggatggaagggtttagtagctgagcaaattctggtgtgagatgtagttactgtctgcagactcagtcctaccaaaggcatgtgtagtgctaatctccagtcttgtctgttccatggtcagagatgaccaataaatactgtttgtatgaaaataaatagttgaacttatacatttatattcagtatatagccatatatatatatatatatatgaatggcagttaaatatgtagttaaatttaaactgttttgcttggattcagatacatagttaaatgtatacatttatagtaatatacatgtaataaagaatatcttctagttatttatcttgggtagagtgggaaaaggtacagtactttttatgaatcaaagggccgttacccttctattgtgatccaataaactgtgttcttttctcacacaaatgcttgagatacttaactttggcatttaatgattgtgtttttatctatgtctgtttcctgttagtagattatgatctcctgaaaggcaaaggtagtatattttatttatgtctgtactttcaataataccaagggccaattagtcactgttttctgtcagagtagtcaattcagttcatgtaaaatgaagaaaataataatcatcagatttatctgtgttctgaggctataagggaatttaaaattgaaagcaattttaatgactgcttaataactttaataactggagcagcaaatttgaacgattagacaaaaagttaatgcgaagtactgatattatttaatttctctactaactatttcagaacaagttgtgtgtaccttttgaaataaactctagaaccgttaggtgagctgtgaagtgatatctaatagagatgggtctaagaaataggctcaggttctaagagaaaattgtcaatatgatattggggctggggttacagattaacagcatctcaaggcagaagaatttttcttagtacagaacaaaatggagtttcttatgtcttcctctttctgcatagatacaataacagtctgatctctctttctttcccccacaatttattggtaacaatatggtggattggattgtcatccaccaattcgggcagttctcaatttagaaatctcaatttagattatgttccaaatgtgcttcattgattataacttggagtacattttccttatagaaagaatggtataaatgatttccatattagcattcttctggttttgatacaattgaatgtaattttttctacattttttggagagtaagttaataatttctagcattttctcagaatatattactattaaaataataggaatgaaaatatataatcaagtatatagtcttttaacatttcattttctgctagtaaaataatatctagaattttatttactagtaaaatgaaaaaagataggctgggaatggtggtttacgcctgtaatcccagcacttcaggaggccgaggtgggtggatcacctgaggtcagaagtttgagaccagcctggccaacatggtgaaacctcatctctacaaaaattcaccaggcctggtggtgcacgcctgtaatcccagctacttgggagtcatgagaattgcttgaacccgggaggcggaggttgcagtgagctgagattgtgctactgcattccagcctgggcgacagagtgagactccatctcaaaaataaataaataaaaataaattttaaaagatagcacatttaaattttcagtcattgtacatttttagaaagtactttccccattaatcttaccactttggcaaacactagcaagtactgtgttcttgaaaatctactgaatagttcccagaggtaaagctagatctacctctgaaatattctgatttataatgtcctttaaagtttatctgaaatacaatgttttaggaccttatttatgatgtcagtgaaattttagaatatttagcccattttctttgctctaaccatgtaaatgttcttggtatatatttggaggaggacttaaataacaggaattgaaatgatgacaatcatagcttttatttatctgcttatgccagacacttaaacaacagccattggaggctagcattattatctctattttgtgtatgaggaaactgaagcctaggttaaaggatttgctcaagtcacacagttagggagatgctgagctgagatttaaacccagatgtatctcatctccagagcccgtttatctttgtactgcacctactgtcccaacagaaggaaaacttggatatttccaaatgctgcatattttgaaaaagaacttgggatgcaaatattaacattattgtggttttttatatcaaagaatgatatgatcacttctgggtagagtgattagagaagcaaggtataaactcttcaaacctaaatataatatttcatgcataaaaaggtggatttggagccattagaagtcctaccaaagtcaggttccagattctctctcttcccaattctgtttcatgctgaacttccttgttaagtggagaatggattgtaagctgacctgggaaaaagagtgagagcataacatgtttaacctgggagattaatagtactatggaaatagggaagtaagcctcattgagtcaagaaaaagcttttcaataactgtatgctggactttggggagcagtgataagcaagacctgaattgtaaagtaggagtgaattaggagtagtatagtgagataaataaacagggatgttgtggaaactgaaaagagagccactttactcctcacatcatgaatcataaaaaggtctctcagaggagataacgcttgtttcaagtttgtaggataaacaggacttagactaaaaggggagatgagcacacacacacacaaaaaaaaccatatacaaacaaaacagaagagtagtttttctgagtttggggtgcctcttgaatgagccataccgactgtaattcccatcaatgccttgcaagtcatgagagcaagaaattcagtgttcagtcactcaaattttaggaaacagttgactgtcttgtgatattttgaaatattacaccctgtcattgggttatatatatgttcatagggaaaacctattcaagttttctacactcgtagaatattagagtggccagcatcctcagagatcatctagtcagttccagttttcattcagccataacatttgctgtgtactagtcacaggacacatgaaaagatggaccttgccttcaaggaactcacagcctaagagaggaaataaacatacaaacagacaatgtgcaagtttgataaagtgctataataaaagaggtactgattaagcacagaagagagctcattaatttttcttgaggattagctaggtaaagttttaattaggtcttgaagaacctagaagagcagttcatttgtgacagggagggaggatatttcaggtcaggactgctgattatttaaaagggacagtttttaacatttctacctaagtttttcgatctggattctttaaataaataaagattatctaaaataattaagtcatgtcatggactttcttagttgtctattagtaatataaattagcctaagcagctggttctcaatgtgtggtactgggacccagtgcatcaacatctcctggaaacttggaaatgcaacttctcaggccccagcctagacctactgaaacagaaaccctggggtgtggagcccagcaatatgttttaacaagcctttaaggggattctgatgtatgctcaagtttgagaaccactggcctaagctaacagtaatacacagaattattgaaagttcatggactttgaggatttggagacctgaatttgaatctcacctctcccacttaataagtttgtgactattaatctgtcacctaatatctatgagcattgggattttcacctatcaagtgaaggttataatgtttccttcccaaaattgttgtgaaaattagttaatataatgaatgcctaatattatcactggcacactgtaggctttcgataaatggtaactgctttttatcatgattgttatctttttcttgatcttttttcagtgattacttttacttaatgaaaacgtgctcatatttttgcttttagattcaaacgctcaagaaattaaggacatttatggactaaatggacaaatagagcacaaactagctttcctgagaactcatgtgccaaaggacatgaaacttgtgctcattggccattcaataggcagctatttcacacttcagatgctgaagcgagtccctgagctcccggtaagtaggtctccagaggtaactgtgggtgctggactgtgtgcctgcacaaatcctcctcacctttcctatgttcttttgtctcttgttcagttgataaatagaacagagagagggatatttgctttctgcctttatccttatctccatattacgatgggcttatgtgaatgtatgttcataatgtttcaaagaataatgctgagggagataagaagtttctgaaagaatgcctttgaatctagggttatcggagttcttatgttacacattacttgctgttttttataaagaaatatttaagagcggtcactaggtaagacctagacaagaatctgtcttttgtgggaaggtattttgtaaatattcttgcctttttcagaaggaagaaatgtatcatcatcatcactgataggcaaacagctgtctttatggaacactacatctttattaattcataagttcagattcttacctattctgtatcttggcagcctttttgagacacatattcacaaatgcttgcaaatatttgttggataccactgtgtgccagatattaagtgaggcgctagagacgcaaagacctatttaaagtgcccaggaaagcaagtgaactataagagatataaaacaaaacaaaaaaattgtactttcactagcatataccattgaaataactcactgaatggatgcaattcacaagataattcatttctttattcaacaaacatatattaagccctttccatgtgtcagatcctgtgctatgttttgaggacatcccagagagtaagacagtctttgaagtaggagagcctggagtctgcttgaggagacagtctaaccaatagatgtgatacctactgtcttgtttcagttcagggggtgtgggagcatggagtgctggtaaacctagtaatctgaagccaagataggacgtgatcgcttcatggctgctttgtgctaggattttgactgtttctcactccgtgggataaaatatcttcagtggggtctcagagctcactaagcactcgctccttttcttgccagcttcacctgcttgcttcttattcgtaattgcccttgggaaatgtacaactatagcctccctcgctgtggtttttgatactaaatggaggttttaaattattattgggtataagaaaatatgtttttcatttctaagtgtgaattcaataaattcaagattgtactctgttctctgtattattgtctactgtgttgggtgttttttccctaaataaggtgtcttaatcagaatgcaggctttatttttccttttagcattttgcacagcttctaatctcttttgtgccttcgaagtctcctctagtactgtgtcatgtggttgccatctttatggtgtccagctctgcctcttagtggttctacttgcacagttgctgtgagttctggcagtagaatcaggacacctaggttccaatatttattgtccttttttttttttagtctgtctgatcttagacaagttattgagtctctactttagttttgagtctcaacctcagtttcctcatttgtaaaatggggataatatgttcttcaaagtatttttgtgaggaattatataaagcatcaagaatggtatctgtaactttaaagttccaaataagtattagctattattattattagggaaataactctagagtcattgtctcagtcattaggttaactattgtattaggtatctattgctgtgtatcaaattgccccaaaacttagcagtgtaaaacaatacacatttcttcactcgtagtttctggtcagaagtctggccacagcttagctggattctctgcttcagggtctctcccaagattttaaccaacatgtcttccagggctacagttttatctgaaggctttagttgagatggatctgcatccaggctcactcttgtggtttttgacaggatcccattccttgagagttgttggacagagagccttcattcagcagtggcatttggggggaggccaccttctttaacgtgtcggcctgtctagctgacttcattagagcacacctggaagaagagtcaaggaggcagacagcctgctagcagatgaaaatcacaggctgtaacccagttacaaagtgacatcccatcacgtttcctgtattcttgttagaatcaagtcactaggtctagcccacactcaaggagagataattacacaagggcatgaatactaggaggtgaaagtcactgggagctgcctcagagctgcataccccatcattctaaaattaggatttcacttgtgtgttgtgcagtcaagaacatggacataggatgtacataaattgttgcatttatttactggtgtaggcaatgacttggacctgtcaaataaaatgtagcaaactgacatgaaatgtagttatttgttgttagttgttccaggtgtcttaaacactttaaaaacattaaaaaggatacttgcatatttgaaataatagcattactgttctataaacataggaaagaaaatattcattttggagcccatcacagactattattaacttaatcacagatctgttttggtttttgtgtttgcttcagatctgttctgcatgtgatgtgtggtttctcttttgtgtgtttgaaaatgattgttcaatacattgtcttgaacctttctctctttttgggcccatattcacaatgtctgttgggaaagaagtagaatgcatctcaaggttaatgtgctttcttatagctttttcagcatcataactttctaattattgtcctgccttcaggtgtccttgcttttgcaggaatagtggtgaaaaggggaaacaaagatgaaacgtgaacttaacctactctatttgtggagacacaactcaaactgattatagagttttcagaaagatatgtgaagctgtgttttatcttcttaaaaagggtgtaagctagaaaataatgtgtgcaataaattgtccaaagggtgtaagctagaaaataatgtgtgcaataaattgtccaaaaggtcacctcttttggggggtaggaggggcagtgaacatctgtatgatttttaaattattattcagaagctttatctggtttcaattaactacattgttgaaattccctaccccatccccagcccccattaaacacctgggtcagtgaatattggtggtgtgatccctgccaaagtgttgaaatttcagtgtctctgggctactctaagacaccgcagtgcctgcatgcctgaagttagcatgacatgctccatttaagatgcatttgacaaatatgtttgtgtaagccagaatgttacaatccttaatcattttgccaaaaataagttagctattatgttttataacatatgaagtgtgataataagaaacttgtgtttccatctcttctgttattttttactggaatatttgactcttgtaagattttgaggacatatgtgtagtttagtagctagctggtttatttagttttattttggttcagctctttgtaatattttcataactaattataggcaacttggtcttaaatcattttaagagacttattgtatatgtcagatatactgtctgacctgtattttaatatactaaaaaaaagttgcccctttaaaaaaatctggcatttaaagttgtttatctaaacaaattccatacatagaattagagatattcttcatatattttgaaattagtgctcagtatagggaatttaaagagaaacttgagcaaataggtaattgaaagactgttaaatagtagctatcatgacttacaataataaacataattgtttttagattcatagaatcttagaactgagataggctttagagacaatctggccccatctttcattttatcagtgggaagtgagagaaaggtcccttgccagtattcagccttggctctgcctgaatctggggtggggcatactggtattagctgtgagtataaaaagaatccaagaaggtattgatggctccttcaacctgtggatgatagcagagcctatagctattacagtgtgccctgcagtgtacacaactgctaagttcgtgtgactcattgtgttggtgctccaagagtaggaaaccccgtgaatgctctagcaatttcaggattgtgtgttggggtggggggagaataatacagaagcaaaaaagtagtaatcttatctccactatctagaatcttctttctcttatcaaccctctatatgttaaaaatgtgtcacctgattttgccagtaaatctttttcataaagttcaagtttgggagttgagttgaaagcccttgattcttcactgagtcttggggtgaactttaattaatataactttaattttcctctaagaatttatataacctttaatgataacatgttctcctcttcgaaggatatcagatccttcacaaacttaattttttatattatttggccttctgtgcataataacacagagtttcctttgtcttctggttagcaaaaatgtcttctctctgaatgaaatttctggattacttaaactcactctcttaagtaccagactattttacccaactggataaaaatttgtctaaaatatattacttacttatctgccttcagcaatgcatattgactatagaggaattttttcttagtgatttaagggcagtggtaataacactattattttgatagtgttatgctagaataaaatgtaatcaaaaggaatgtgcctgtgtcctgaaatttcttaggtgataatgctttttcattttttaaaaaaaatgtttcatgtatgtctattttagtttttctatctcctctctcagtgttaagtacttcttctcttccctacttctaatttattgctactaatttgctgtgggcagagaaaaccagtaactacattataatttttttcagtaggaatgaacaggtcctaaatagataaaggagtaaaattgacagcattaaatgtgtggacattgttatcactcagcctttttttctcttcttttgagatcctcaaaaaggatgttttggggcattttaagtactcaaaattttagagactcaacatacaactatagctgagaagtttgcaaaactttactaaaagaattagaataacatgttagatcatatatgttttgattcaggaatatacctcatccatactaaggaaaaaatagcttcagtgttctccaacaatgagattattgagactgtggtttacttacactattctgctgagccttcatgtctgctgtcaaagtaagacatgcttgtaagaagcattcatattatgtcactcagctatgtttaacagttgagataatctggagggagggagaagaataggaaataactcatttgtcgtagtaaattttgtcagaatcctatccctagattcaagtgacaagtgacaagacacggaaggcaaaatgaggcagtactgtaaggctcagaaagttttgtggagagggttgtcttctacctgggaagctcagaaaaagcttcctggaagagcttcagggccactgaaggatgagttgtatctggaagtagaggattttatatggtggctagggggtactgtgcattctaggcaagggagacagcatgaagagaaatggttttcatcactgggcacggggagagggcagtgggtggtgtgactgggttgcggcagagtgtgcgtggaggggtcgatcgggcatgagattcaaggttgatagagatggacaaaaagctgggctagggagcatgggctcattttctggacagcagaaagccattgaaggatctctgatgatagcagtcatgcatcaggtaaattaatctctcagagaaaaggaaaatgagatggagatagaaaaagtgcagcataaaaagtgaagatccaggtgacaggaaagtttactagtccaaataagaaataatgaagacagtgtaagggataaaattgcccagggaaattgttgagaaaagagagaggccatagatgtgtatcagcggaatgatttcatttgccataaaggagtgttacaggatctttggggtgttgctgttctggccagaaacctgtggttggcggaatctttgcctgagttttgctcgggcccactgggctcgttccaccgactctgcctgacaggctatgctcagctcatgctgccggcctggatcctatgcctccaagggagactagagtcaggcgtggagtgatgaggggtgtgtgtgagcgagtatggggtccagccactgcacagtcagacatgctggctgctgccatggggcaggcagctccaggtgccagcatgggtgtcagctctctgtgaggctgcagctggaccaggcacactgtaagcagcttccccagctggcaccagggaatgcggtggcacccagaagcttagagactccaggaaccacaaggccccaaagagggagtcacagctctggctcagggagctcccaggtctgggctccctgaagtgctgcagattttctctccttctcttcactcgcaacatggcgagcagggggcatgtttcagctttgtttgtgttacagcagctcttttagcctcgccactcatcaggtcctgagttcttgttctgcgaccaggaagaatgaggtttgcagacatgcagagggtgagcaagacagagaggagctttattgagcaataaaacagctcagagaagacccgcagtggacagctcctctgtgtagccagggtgtcccagtgagtgttcagctcctagcagagagggtagctcctctctgcagctggtcatcccatcctgcagctctcagcagagaggaggccctgtaggtggcttctctgtgcaggcaagtcatccctttgtctggatctcttggcagagatagtagctcctttctgcagcaggtcatcccattgtctctctgtcctctgctctgctctggctgagcccagggcttttatgggcctcagagagaaggaagtgcccactgattggtccatgggcagccaggggtaggcccagaaagggcaccacaagtcccctactctggtccctgggactggcagcctggcccctagccttcaaaccctccctggcctgcaggtggggcctcaccggagatcctccctcttctgcccagtggcccatctgcctcctgccagcatctaaggcacccaggttgcttgtgccaaggggcacctgcaggccagtgctgagccgccctcaacacaccccctcaatttcccctcatgcttgtcagcacccgaagtccagaggggactgaggtggcagggagctggcatgtcagtgctcctcaagtgtgtgcacacccagccgggctgtgacagtgaccaggcttggccccaaccctactccaagatcagagcgggcaccaggagcagggagaggtcatggagtggagcaggcctctccaagccttcaagggcaagggaggggggacttcccaggcccccaagggcacagagaggcctgggtccacagccttgtcttgggctgctgcctgtttctggctctagtggctccatggagcatgaagcccagctgcaccccctcacagcctggggcaggggctctaggtacttgctgggcccaggccagtgtcagggtaggggcaacatctccatgagctcccccagtggccctggcattcaggggcagctgggagctccccctcgcccagattgtggccctgcccagtgcgcacctccaggaatggattgcaggccctggtctggccgtcaggagtgtcaggcctggtggtcaccctgatgcagggcagaccctggggacagagccctgggcggccctgcgcagagccccctcctgaggcacagaaaccctccactgctggccggtccccgaagcaggcgtcacagtcagctgcctcaaggacgtggggcacaggggacccaccaccgccattgcagctcctgtagccacttctgctgccaccgtctatgcctccccactgtggatagccccctgctgccatcaggaggggaaagaggtggaagtcacagaaagaggcagaagatataataattttccaaactattggctgcaatccattaatggatcccaaaatcacttcagtgggttgcaaccagtggatcagtcaagacagtagactgtgctataataacacaatgtcagtggcttttaacaacaaaggtttgtttcttactcatgatacaaatcctttgagggtaggctgcccctatgaagatctctctatgcaagctttctccagaatccagattgatggagtagcctctgcctggaatattcaagtcccatggcagaggatataaagtgaatagtgaaccacacctacattttaaaacctctgcctggaagtgaaaattttcactcctcaaattttattggacagagcaaatcatatgaccaagtcagccatcaatgaggctgtgaagtacagtcctccccagagaatggaagcgtctgtttgtgaccaatgaaacagtgtttttaaacaatgtataataaaatcaagtaaaatagaatagaataaaaatatattgcagtaaaggcatgtattatgaaacttttgtttcactttgtgtgtgtgttgataacatagtagattataatgtcgaatgtatatcttactgtgagttaaggtaaaaaaaaaaaaaagtttgaaaaccattcatctggactagagtacaccacagcagctaagaacagagcaagaatgtcaagaaaggggtagatatatggaggattacagatggccacagatttttttgtcattcctctcaagaaatgaaacctgtttcccttcccctttaaatttaggccaagcatgtgacttactttcaccaataagatacagtggaagtaatgtacttctggtagcttcaagtccaggccttaagaggactaggagcttctatttcctccctctcagaagccagctgctgtgtaagaaagccgactgccctgagaccacgaggctgagagaagcccaagctagctacgtaggaggatcatgaggcaccaggcctgagtgaaaccttctcgggtcttccagcccatctcagcccagcccatccgccactgaatgcagcccaatgagtgaccccagcccacaccacatggagcaaaagaaccatccaactgagccctatttgaattcctgacccacagaattgtgagaaagcaaaatcattgtgattttaaaccataagtctagagatgctatgttatatagcagtagataatttaaacaaggtaacagggttgaatgtaacaaatgttgaaggcttcaggcttctagagtaaaaggttcttggtgtcctcgaagacagacttttagtgaaataatgggacaagggggttgcaggaagttaggtgataaatggatagtgattccactggccagtgaaggagaagaacacataataatttaaggaagaagctggtcaagggaactttttttcctgtaagtaggggagaatttaacatatgctgagaggaacagcccaagcgtagagagatgtcgaaaatgaaagacaaataggaacttttgttggaacaggtttccttccatttgtcttttagtctacatacttgaaaacttggaaaatggaatttttcttaatatttatgtctttgcaaaagtggtttaccccttccctggggtgtagggggaacatatattacatatttggttctccttttccatctagaaaaagtctagctcaatttttaaaattgatgttattgtcattactaacagtgattatacctaacattcatttgaaatttataaaacgtgttcacatgtaacaaggtattttaacaatctgatttttcccatcttaaagatgagaccgaagtgccaaggagccatgtgtccaacccatatgtcaactagtagaaagtagcagagctgggactctgtattctgttttctaactttcccactacctgttttctaggtgagttagagaggtgatgattacagatggttagactaagttgctttcacaaatcaccaaactatttggcctaaacttaagatttctatttttgcttttttaatatttgagttcttcaaacacacagtgagtgttttagtaggaagcaggtgaatgcattgggaggagttcagagagaactgagagaaatgacagcatgtgtgagtgttctggagcataggagataaagagactgttgaggcctgggccaagggcagaaattaaactgaaaagatagtaaatcagagtcctagaattgagctgggaacagaaggactatgaaggaaattggaggattctgcaaacatagtgcatagtagtttgacagttacctctatgtgacccattaataaatcctgctgcgtgaaaaacacaggcttagacaatcagcacctaactactctgatttctgaaagattttccatttcagaaaaccgtaagtctcttactctaagtttgtattgtagatgatgaaatgctatttttccaatcacttatgcatttatttaagtatatatgtatctgcatatttgtgcgcacacacacacattatcttttctgagttacccagaataccttgctaaaaactagacacatggacagtttcaacttttcaacttcagccatttttagttatctgtgtatttttttaaatcctgaaattgctttcaaagtggaaaaattgtgtgggcttttttcatcttttcataactcaaaaacgacttaatatgtttttctcaaactttgcaaaaaaaaaaaaatcacctttgggctgaaaccaagcatggaaaatttcaccacaaagggctaattttttggaaagctgcaagaaagtgaaaacgggtttataatagaacattcttcatgcatgttaatacttagtactttatctaatgcatttcatctgagaatttctgaacacttttcagatttaaatattgagccattttaatatttgtgtaccaatgatatattgtcagatatcgaaaagttcccccatcctctcagatgtctaatagcttgggaattagtgagatgtgtttaaaatgacaggtggggcaaatgaagttaagtggctgctagccagagaaagctgtatatttactgcccaacacattttatcactacctcttcttggcccaggagtactgtagttgtaagtaaaatataatagatgacactgggcactaatttgaataagccaacatgtctcaaagtagtatcaacagcacctgtgatcttgttagaaatgcaaattcttccccctcttcaccccaaggggtggggctcaccaaccagcatttaactagcactgcaggtgattctggtacatgcttaagtttgagaaccacctacctaagctttccaaaagcttggaacagaatgcattgaaatgctgtggacagttaaatctgtccttggtctttctgtgatgtcagctctgtcttctcatatcccttggaagcaggaggaatatgaatcaaattctctgaaggaaaggtcttctgtgttaatgtgctctagttctttccacctatgacgttgtccataaacacagagactcccttgagtaaatgtgctgatatcagcttgttcagggtaacagcactaccaagatgtattttctcatttccttgaattattagggtcaaaactgaaatgggactataaatttctttcttatttctttggaatcttttaagttctaagatggtatcagatgtgtcagtggaagttgattgaagctctttggtgtgtaagttctcaatctgacgctttgcagtagacctctgcatttcagcaaactccatggtctgtatttttgtgtcttcaggcacggaaatagttgtttacgtggcattgtaacaagttttgaaaatattaccctggtgatggaagtcactagtctgtagtatgtgggcctttagctaatccttttagcttaggttaatttcttacaataaataatttgtagaaattcataaaaaggacagcaagttctcaaagatgcaaaggatgtgaacagataattcactgaagaactaatatatcaaaaagtgtgtgcctaccacaatgtgtgatagtgtttaatgaattagtatatagtagtatacttaatgatgtctgtttatattgagtatggtagtatttgctaatgttcatttgatgaatgaacctcaacagttatcaaaattaactattactattacatagtctaaaagaaaagttgtgttgtgtatgtgtgtacttcgatatccattttaaataagtttgaacaggtaaataccaggtggcttatagtagttttctctggtggttaggggtaaaggatgtattggagtgaaaactctacattgtttctgcttttctttataatgaccatgtattatcagaaaaaaataatttccattaaaaaagtattcataccctttgaacctactaattcttttttttggaatttatattaagaaaacagacaaagatagaaaaaatcatgtgcaaaactattatctattataacaaaaaattggaaacatcctaatgtccaaccttaaaggcaaggttaggtagagtatggaaagtacagccattaaaattatatttgcaaaagacattataatacataaaagttaattatagaatattaaggatgtcagaatacatagagaatgtgtgaatacaactgtataaaaatcacacatggaaaagcttgataattataaaatgaatttagtggttgtatttaagtggtgagtttgggttttttttttctattttttatttttgaattttctgtaatgacatatatttattcactattatagacatttaatggtcatgcatttttctctctctttttttttcttttaaggtgatttgttcatgttactttagagcagaaagttgttccaggatagatcttttttaaaaatttaattttggattcatagggtacatgtacatgtttattacatgagtatattatgtaatgggggggattgggcttccagtgtaccagttacccaaatagtgaacattgtacccagtaggtataaattatgtttgctttgtatattgtcaagttcagtgcagtccttcttagggctcaagttatcctacagggcccatattaaataccaaccttcttaagtccttctgggtacaagatagtttataaatagacaaaagaacaaataagtcattagccaaatgtcacttcctgcatgaaaactttgctgattgctccgatagaatataacttctgctacttttgggccaatgatattgtctcctgtagcttttctgttgtggcttgtagcttaagtgtaatttttttttatagccacaagaacaagagctggcttgttttctttgtacccttgcaagttctagcatagggtcttacacatcccaaaaggaagacatccattttttttttcatttaattaaattaaactatatgaaagttacatcagcagcttctgctggtaaaattctcacttggttcataagtgccactgacttcttctgttcatacagattaaccactgcattgaccttaaggaaacagttgtcttgttcgacagtgaaagagaatacagatcagcagcaagagttagcagctatatacatccaaaggagcaatactaattcagcttctataagatagaattgaagaatattattatggtctcggaatagttgaagatttcttaaattggatagcacaaatgtttgtacaaaatactgctgtaagtgaaaggaaagagcttaggggtgtggcggacagactttagggtgggtggcaccccatgatcctcacctcctaatgttcattcctacacgtaatcccctccataagtggatatgactgatgacttgcatctaaccaacaaaatatgataaaggtgacagacaggaagcacatgattatgtgtatgtgatttacatacctaagattgtaaggcctgtcttgcagaagtctctctcccatgctggctttaaaagcaaactgccatgttgtgggttgtctatgttgggcggcctatatggcaaggagttgcaaggggccactagaagctgaaagctgccttccgtcaacatccaacaaaaaaactgaaatccttgatgctacactacaaagaactgaatcctctccacaaccttagtgatttgtatccttccccagtcaagcctcagatgagactgcagccctagctgacaccttgattgcagtctggtaagatgctaagcagagaacccagctaagctaggcctggactcctgatgtgcagaaactgtgcaatatcaagttcgtattgttctaagctgcaaagttttagtaatttattacatagcaatagataacaaatcaagaagaaagtaaaagggtaatagcaactccttgttttctttgcaggaaaacccacctctaagaccagtagtggccctaagttagtatcagcattgtagcagtagcagctagcctagccttttcccctgtcacttttccctgcttttacactatcttacccactcttcctactccactcaattacctagacttttggtcttccttgcaatttttttattaacattacttctctccccacctcaaaaaaaagataatttgggttgttgataagcatgtcttttgatagcttgcctggtgattatttgatgtaataacaaaatcacaggttgggattcattagcatcattcatcctactctaggttgaagcagatcttatttgaaagtattgccatattcaaatctcatctgaccaagaggttaatagtggtaggatattgagaggccctgtggtatgagagagtggcccatgctaaggcagaggtgatacatttgtgaattcccttgcatttgtgtggatataggtctgaaaaatgtcgcttgtacctggccacactgaagccttgttcatagaagagcacattcatagagcctcagtggacagactataactatcagagaagacataacagggaggggagtggaaacagatgaacaacattctgtgaaattgcctctttttggcttttgtttagttcagatagaagcttctttctaggtctgtttgtggagatgagaagtatgattgtgatctttaagaaaggaaaaagctctctaatatggttaaccagcatgtatgaggttgttttacgctcacttccagcttgtatggaaaatctgtgaacaatatgcaatgtaggccacaaaaaatttcctgaaatggaaaaagcctagcaggcactaaatgaaagctaggcactaaatgaaagatgcttcacaagaataaaatgtggttgctttgagatctcacattccaggccatttcagactaattgtatttgtttgggaagaagcaagattgtcaggtatcaggaaggtgtattgatacataaaagatggaagccagcgtcatactgcaaacctctccctaggaagccagacagtaaatcattttccagggtcagtcatatagagaccagagggagcatgcatgaatgaagacacagtctagaaactccatttcaacaaatagtttctcccctcaccagtactgttatgggagcttctgcaaaaagccaaattgagtgttagagattcagccttttcccctttcataatctactacccttaggaagatgctgaggagcttcttataacctcttacaaaggagaaagtctctgagagcttcagtaatattatattaatgtcaatagacattttttcagaagagatttcataaaaacttaaggacatattctggttatctgggtaccaggagggttctccttaaggcccttgtttccttccgttcatagttgctgtgtttgccttacagtccctgcacttagggctccatcctgactttataatttctcattgtctagatatatattttcctatctatgtgcctttgttgagctacttcctttctgctttgtcccacaccatctaactgatgcctcctgttcttctggaaaatcatctcaaacatgagctcctgtgtgaactctttcctgattcttcccagtcatttttactctgtccttcctttggtaacactttttctcataattcttctatattctaccctatattataggcattgcatatttctttgatttttcctgttagatgtttcagctttccttttaactagagcataatctgcatacagtaactcttttgtttgtctccctgcctcgttctagatatttcttctgacttaacattctacttcactaatcctcacttgagctatgtataaacacctttaaactcatctgttacatcctcaattttagttattctattttttgcctataaaatttccattttattgttataattactaattcctgcaaatctccatcttgtcatttaatatcttgatcatattatagttattttaaactccctatctgactttattctcctttgtaccatcaacaatttttaaaattatcattacttttataaaagttcagagatcatatatttgacatgaaaataaataaagattgtgtctgataattccaacatctaagtctcatgtggttgcattcctacttcagctttttcctttgctttggttatattatcttgtctatccgtatgcttgtgtattagtccaggtttgccagagaaacaaccaatgggatgtatgcacatggaaagaggtttattataaggaattggctcacatgtttatgggggttgacaaatcccaagatctgtagtcagcaaactgcagacctaggaaagccaatgatgtaattgtagtttcagtccaaaggtctgagagccagaatttctgatggtttaattccagtccaaaggctggcagcctcaggacccaggaagagctgatgtttcattttgagtctgaagacagaaaaaaaaaaaagtcctagcttgaaggtggtcaggcagaaggaattctcttttattaaaccttttggttctagtcagaccttcaactgattggatgaggctcactcacattagggagggcaatatgctttactcagtgtaccattcaaatgttaatctcagccagaaacaccctcacacatccaaattgtttgaccaaatatctgggcaccctgtggcccagtcaagctgacatgtaaaattgaccatcacagcttggcaagtattttttttaactgaatacctgacattatatgtgaaaaattagtaaaacaatattagaatcttatcttcctccagggaggatttacctttgtttttgcaattattcttagggtaggtcactttgatgccattgggaattgggttgaatcaaagctatctttggaggggctggcctatttccagttcatcgttacttctagggtatagtcctttaatagtttccactgaaagcctagagtgccttctcttttatgggcacacaattcccaggtttttccttcaagctcacaagatttttcagaaactctcttcagcttcttggcttcttagctactgcttgcaaatcagcaaataacaaagaaaagctacttcagcactcctctctgaagttcctttttccctagcattttagccttcaaatctcctctgcctctgatgccttcaaggggactttaaaaaactttcccaacttttctaattgttcttggcaaggagattgctctccaacaagatagcctgccatcttcacctcctatcaacaccattagcagctggtgctgagctttaagttcttccagctctgctattgagaagtatgtcatttcaagtttttaattatttttgtgaactgttttcttcctctggaaagttttagaatattcactttattgtcagtattatattttctgatgatattccttggactatttatcctttttaatccagaaactggcatacttacacactgaaaactcttgtatttttttctctacttgttttctcattatttgtgtgttatactttcagaaaagattttcttgatttattttcttttccattatccatttctttcaatttttagttttttgcaatgagaaataggggatattttccctactttatcttccaattcatctaattaaacttttgattttggcatctatgcaaatagtttctaaggaatttcttgttcttttcttcctttttgtaatatcctttttatttttacttcatgggtctctctttctctctctctcaggaaaacattttttagagtttttgggctcctgcattgtctgtattcattctgaattcctttcttcatgcttttaaaaaaagtactgatctgtctcttgtaagtgaagctttcctcaaatgtctagtgcttattcattatccactcatatttaagaatgaggcaccaggctgggcacggtggctctcacctgtaatcccagcactttggaaggccgaggtgggtggatcacctgaggtcaggagttcgagaccagcctgaccaatatggtgaaaccccgtctctactaaaaatacaaaaattagctgggcatggtggcgcacacttgtaatcctggctacttgggaggctgagacaggagaattgcttgaacctgggaggcagaggaggttgcccggagccaagaccgcgccactacactctagcctgggtgacagagtgagactccgtctcaaaaaaaaaagaaaaaaagaatgaggcaccaaaactatcaggaggttttgtatgggagtgggtttggtcagctggtcagctgtactacagggtaatttggacaggtatccaactttttttggtgtggtattctccagtgtacatattttttctggagccattaagtctcttcagaaaaacattttcaaaccacttatctaacacacagcatcctgaagcaaacagctcaaggagctggagtttgcatgggagaatgtcttagcatttagtattttggctttcacttatattgtttttatgatgttccttttcccctgcctttttctgtgccctgtgtctccagatcaggagcctctttcttctatttctacacagaataaacctccaggccatgatggggttatggagaagttgcttgagggtattggatgaggcaagtgtcccaggggactggctgcctctcagccagcctttcattcatcaagtctgctctgtgccctgcactgttactggcacctgttatggtcttggatccatctgtgaacaaaataggaaaagaaacaaaaaacaaactgcttatgcagaatttacagtttactaaggagagatggtaataagcataaaaatgagtaaattaatatgttcaaaggtgatactgccttgatataaagagtggagcaagataaaggggattggaagcaccatggctgggggatagagggcagtggtggactgcaagtgatttttaaaactttttatttggaaataatttcaaacttagagaagagttgtaagactaagaatagtgcaacaacatgagatacacttttaccagatttacctgttgttaatattttacctcatttgctttatttgctcccctacacacacacacacacacacacacacacacacacacaaacacagacacacaatatttcttcttgaaccgtttgaggataaattgaatatattattgccccttatccctaaagacctccttaagatgttcttaagaataagaatattctcttaatcaaccacagtacagttatcaatgtcagtaaatgtaatattgatgtaatactttaatctaccttgcatattcccattttgtcatttggcccactaatgtccttgatagcattttccctcttccactatggtctggagaatcaggtattgccttgaattttcatgttcctttattctcctttagtatgaaacatctcaagcatattcctttgttttttcataaaactgacattttgaagaatataattcctttttaaaaagagattatcctgattttgtatttgtctcatgtttccttttgactagattaaggttttgcattcttagctgtaaaataatacctcataggtgatgctatgtccttctcagagtaggtcacctgcaggcacatgacatccagctgctcatcattggtgatattaatttcaatcacctaatcgagatgttatgcagaatttctccactgcatgctttactttttcttttcttttcctttttttttttttttttttttgtggcgagggtagttggagtcttgctctgtcacccagactggagtgcagtagcatgatctcagctcactgcaaactccacctcctgggttcaagcagttctcctccctcagcctcccgagtagctgggattacaggcacttgctgccaggcctggctaatttttttttatttttttagtagagacgggtttcaccgtgttgcccaggctggtttcaaactcctgagctcagacaatctgcctgcctcagcttctcagagtgctaggattataggcatgagccaccgcgcccagcctgcgtactttactttttcttagcaatgaataaagagtctatggggaggcacttttttttcatgtcaatatcctcctcttcaacgaaattttctcctagattcaacatccattatttatccttgcctgatccaatctttaccaagattttctaactgtagtactttcttcacataaacccattagaactcaatattcttttataagcaagaaccttccttcttatgtatgtttaatttgtatatatgtatttatcagcatggacttatgaatttcggatttattaaaggtatatgattcattaccatattgattttggtgataaaattattccatatttggccactgggagccacttaagtcgggctcctgttgtaactgcaattttaagcaagatgtttattaggcatcatagaagtgacctgctggaggtagagttagccacatggctatctagggtacaagggttctaaacagcagaatagttattacaaaggctttaaggccgtgagtatgcctgtttgagaaacagcaaggccagtgtgactggagcaaagtgactaaggtgtgaagtaataagacagggaaactttcattgcatttgccctccccacactcttctatatcctgtggtccagaagaaacattaaatacacccttatacccaccaacaaacgaagaagtaaaaactgccattaagccaacttcttgaatttattttgtatgttgtaaaatccagatagctacatatagatgtgtactttttgaaaatgtatcccatcagccagtgatagttgtatttccatggagattattccagtcgcctgtatttgaacaattatacaggatctgactgtaattagaaaaaggagatgggcccaagtcaacctagtacaagtttggatttcacattttaaatcattggttaaataaaaacaaagtgaagatgaaaatgtttcttttgttaaaaaagataagaaaatataaaattggagcttttattaatttatacatgtctcagagaaataatagtcacagagaagtagcagacagtggcatgcacttattagcttctcacattattatattacactggaaacatgggctgttactgtacagtgaaactagagtttaaggtggagaaccagattgacctgatgcatgtgtttatgagtttcacattgaaggtgcctggtttttgttgttgctgttgttgttgttgttgttgttgtcgttgttttctctccaaagaatacagcttagaatgagtgaggcaagctcaaatcatgtagctgtaactgtcaacttggtgaatttctgagttatcagaaagtgagactctgggcatgatgaggccataagtcagggaatatcagcaaccatcagaagctggaagaagcaaggaatggattctcccctagagcttcttgacacagtgcagccagggcatctttatttcagcccagtgatactgatttggcctccaaaactgccagagagtaaatttttgttatttgaagccacccatttgtagcaatttgttacagcagctgctggaaactactacattgccattgacacttgatcgctatttcagtacgaagacctgtgtatctgtcttgttcagtgatactgatttggcctccaaaactgccagagtgtaaatttttgttatttgaaaccacccatttgtagcaatttgttacagcagctgctggaaactaatacattgccattgacacttgatggctatttcagtaggaagacctgtgtatccgtcttgttcagtttgggggaaactttcatgcattatttctgtcatgttcccttccctccctccctgtcttttctttctagaactcacttgataggacattagttttcctgggttgggtgtctgattttctttccacctgtttatctctatgctttcagtggaatttttttccactcagtctttttcactgatatttttaaattgaagtataaatttttttttttaaatactactgtcttgaccaggcacagtggctcatccccgtaatcctagcactttgggaagccaaagtggaagaatttcttgaagtcaggagttcaagaccagcctgggcaacatagtgagaccctgtctctacaaaaaatacaaaaattagcctggtgtggtggcgcacacctgtagttccagctacttaggaggctgagacaggaggatcacttgagcccaggaggttgaagctgctgtgagctgttatcattgccactgcactctagcttgggcaacagagcaagaacttgtctctataaaactaaataaatttaaaaataaaaaaagaataccactttgtttactgcgtgtttcttttatatcccactcatcattgatacagtattttctcttagctctaagcaaattacaatttcgtctgattcttcattgtcttttcctctgagttttatatttgttgtgctgtctttcatgttagaggctttacctaatatctgtcaatctgttgtttctttatagtaaggaagtttttccccctgaaatcaatggatgaatgggaattatatttttaagttattagaataagttaaaaatgtgtaaatagaataaatgcatttgcagggcatttactctcataagactgagggagagcatatgtgtgtattgtggcttattgttacaactatctcctagattcattgaagatagaagttacgtttgtttcatagtctcctcattggcttgtagcaatttttcaaaagaaggaaggaaacatttttaccttacaataaaagtctgaaaccacatattttatggtgatctataggaggactaactggaaccagtcacagggtactgtccctaacagaatgtgcatctttcatgcagtaattatattttactagtggaaactacattccaggaaacctttacataaaggttttacaatgttgaaaataaaagatatgctttttacctttaaaaagaaaggtggaacttaattgagaatattatagaattatttcaaaatcagactgcttttaaaaaaacttcaacttttattttagataccgggggtacatgtgcaggtttgtcaaacgggaatattgcatgatgttgaggtttgcgatacagatcctgtgacccaggtagtgagcatagtacccaataggtagtttttcaatccccccatcctcaagtggtccatagtgtttattgttcccatatttatgtccatatgtgctcaatgtttaacttccttttgcaggtgagaacatgcagcatttggttttctgttcctgcattaatttggttaggataatggcctccagctccatccatgttgctgcaaaggacatgatttcattcttttttatggctgcatagtagtccatggagtatatgtaccatattttctttatccagtctaccactgatgggcatgtgggttgtttccatgcctttgttattgtgaatagcacaacaatgaacataagtgcatgtgtctttttggtagaatgacaaagttagtctttgatttaatggtgacaaatgtgcttaattacttaatgcaaactttgctgtatgcatttgaaaagcgtcagttagttctatcaattggaaatattagctgtacttactgaacaactgtctagagccattgagttaggtgaatttcttggttactgactaacacagagtatatgatcctcagtttcatcatagagcatattcagataccgtggaggcacttttgatggacaaaggctatcagcaatgctatccagtcccattagggaagttaagagtctccccagagtctgttgtcctttctctgagctctgcagaagctgagacctcagaagtttagtaaggcagcccgggcacagtggctcacgcctgtaatcccaacactttgggaggctgaggcaggtggatcacctgaggtcaggagttcgaaaccagcctagcctatgtggtgaaaccccgtctctactaaaagtacaaaaatcagctgggtgtgatggcatgtgcctgcaatcccagctactacggaggatgaggtggaagaattgcctgaacccaggaggtggtggttgcagtgagctgagattgcaccatggcactccagtctgggcgacagaatgagactttgtttcaaaaaaaaaaaaaaaaaaaagtttagtaaggcagacgtaaaaatcaggaactaaatttcggttattgctgagtctgggagataccatggtaccaccaggagggatgctacccttatgaacctgttctgtctgggagtaaatgggaggaggaaacccccttcagagacctgtgaggaagaaataaacatcagatatgtcttctttcctgaactaagcaggacagatcctaacctgttctgttatcaaagctgatatggggacttatacacttcagccatttgggcctaaccttttctctgtgagttaactgcttatattcccaaggtttagtctctatctcatggggtcttagctgccctaactgatggatttgcttcttaccacataaaattgaacaagaaagctgtactctttgccttccagttgacttcctagacgctgagagtgtcctggggcagcttctgtggcagaaatcccttgtggctggggctgtgctgtgtgccctatacatgcctctggctatgggcctttgcattatattattcatccttggcctgaaaccctgtcacggatacctttgcctcatcttagtactggtataaaatggcattttagtatatggaactgaagtatacatgtttcacaatatcttttagtaaagttaaatagggaataatttttttactggtttcactgaataaccctgtattctatcatcagcactttgcttgtgtactcagtgtttgtcaagaaaatttctttctgagctgcttttcaaaggttccttgacccttatagagaagaaattttgagtgcctatttagtatgtttctattttactcttcatttcccatgtcctgatacctctctaaatatctctcccactagactttatgatctctgaaggcagggactttgtcttgtcacccctgtgtctccagcactcagcacagcacctggcatactgtaggtactcagtatatcttcatgaatgaacaaatgaacaaatgaatgaacaaccagtagatctaaggaatggctccccctcccagtcatgctaggcctgcgcttttaaatattggggtttttaacttagaacagtcccagtgccattgccaaagatagtggtggggtgtgtgtgtgcttcctgacccatacatagcactccagctccaactttatgccaagtagcagtttcttgatcagcagagccatcctatcacattctgtgtagctttacctctaggaaccatgagaaaggcctgttattgccaaaggccatagtagtcatgtgagaattttgtagctatagaccttaaggtttgctattcactattcactgaattctgaggctacctggagaacactgtttaattcaaaataacaggtgcttcctaagagatagttgtactgcagagcagcaggtaaagaataatttgcagtgagcctgtgagcatcattgttttctgaatgagctgtcagtgattctaaatcagaagagcccaaaacgaagtggtttccacaagatttcaagctgaggagaacagcattttgcatccaaaataaaataagtgcagagaatataaaatgataaaagcttgagaagaatgggctataggaagatattgaagctaagtttcaggtgtttgtgcagttataagttatgtaaagacctctgcaaatatgcaaacattccttattattaacaaccgtgacatgaagattaaaagtattaaatggctttttttttcacattcaggtaattaaagtgtagaaaaatctctgccccagaggtctgaatataattcacatgaatggaaaatggcaaaagtggttagtttcttgagtaccatcttaactgaaacatactaaaatggcataattttgtttcagtaatcagtagttgaaagatctcatgctttacttcttaggatatggatttaattatttctggagctaaatgatttgagacacttgtaaagattagcccatatctaacaataatagtagtaattggttcaaccataagaaaattgcctccaaacaataacaattacaaataacttattttgtacgtaaatatatagtatatataaaggttaatggcatggattcagaaatcatcctgctttaattcatatctctgtcactttgtggctgaacctcagttttctcttcagtggaatgagggaacttcataaggtttttatgtgtattaaatgaaacaatatatataaagtgcataagtgtagtacctagaaaatagtaagctatcactactactgttaatccaagtacttccctgcgaggcatattcttatctttctgacatatgaagtttttaagacagagtagaaaatctcaaaaagcaaactcttgattaaaatataatggcatttgcagtttataaactgcatacttagtaaataagcttactaagcttgtgtttccagtgtgatcctaaggagaagaacacatggccttatgggaagaggagataaactaaactaggattacttctagacctatgttttgacagctagcaagtttatctttgaaggctgtctggttgacattgcatgttggctaagacatgccttacaaatattgcagtcacataaaaagagaaactgtgtgctatttttttgtttgttttctgcttgtacggtggagaagcaccctgccataaatacattgggtgggttaaactaataaacaaataggcagggtggcagtgataatgtttttttgaagatgttgaagtactatttgtcgcagcttcacttagtcataacacataggcaccattgctgctctcccagaaaaatggatgcatctgtaataagctatataaacaggtgaagtctttcaaggattttgaagatttactgtttttttaaagcctatttaatgaaacaggttgtgcacaatccacacctaagcaccatacttcttaccttgtggccatacctcaaattgtttcttagctccttttctaaaaaatgattacaacaataataataaattcaagaaaaataagcatcaaaatactttcctctaacccctgcaaatgtatccagtataaaaattcccagtgtgcatatttaccttcctgtactgttcaagaaaacacggttgtgcttcattatcaaaagttcattctggtagataacagaagagaatgtgaaatatgcgaaaatgttttcttaggatagaatgaattggctaacatgggagttctttttttaatgagatagtaacataagaaaatgtttggtcgtgtacacagatttggaaaccttcaccacacagctgtgttatcaaattaggcatacttccttgacttaggtgatttttttttttaccaatatgaagaatgaaaaatttttattactgtgatttatcaaatttggactgcaaatttcattgaaattatcattacaatatctaggaaaagtgtcacccagcaggtaataattgttgttctccaaaggcaagagaggaaaaccagtctcatcaactaagtattagttgtgataaggtctttggtcttcttatatttttacaaggcagtgacgcattcaatgtacatattagaacttccttattgttttggtccattcccattatttcagactgcattttaattctcaatttgttattgatatagatcaatcaaatataaccctgtggttgcttatatatttttagagtttcccttacatgcagttttgcttaacatgggtcacagtaaaggatcgtttataaaagtaatggattgtttcctgtttctgccagctgatttgatcaatctgaagttccttatgtactatgggttacataaccagtctggaatctgtgtggtacattcttctagtttggtattaactgaattaatcatttatattctttaaatcattgaggacattttagtaaacacttgaactgctctcttcttcaagtactctgctccagcaatactgttcacctggctcttactcaaacacaccactttagctttctatggcctctgcacatgctcttccctctccccacaaaatttatttttccaagcatctcttagctcaccccctaactgcctttgcacaaatgtcacctttcatcaaagcctttcctgaacaccctatttaaaactatcccaccacccctagcaatttctagtcctcttttattattttatctgccccgtcataggacttgtgacttactaccatcatacatatttgattcaattattatttattgcttaaattgttatgatcatttattataaatcatgtattacagctaattaacatacatatgctcagtcatttacttgattagttattagcctcaattatatcttattttttaatatatatttttatttgacaaatagaaagtatatagattggtacaatatgatgtttggaaataagcatatattgtggaatgactaaatcaagctaagtaacttatgcagtaccttacatgcttatcttttgttgtgataagaacacttgaaatctattctactgtcttagaaatttaaaaatgggcaaaggacttgaatagacatttcttcaaaaaaaatgcaaatgaccaacaggtatatgaaaaggtgctcaacatcactaattatcagagaaatgcaaatcaaaaccacaatgatatatcacctaacacctgttaagatgtctattagaaaaacaaaatgtaacaagtgttgataaggatatggagaaatagaaatctttgtgtgccttgtacactgttgcaagagcattagtagaactactttggaaaactctttgtaattatctactaaagatgaatatatgcctactatatgacccagtgtttctactttgaagtgatacagccaacagaagtacatgcatacatgcaccaaaagacatatacagaaatattattaggacttctggtttccagttccacatgtagggagcttagaagttgccactccaaccctaacaagtaaaaagctaagcaaactgagaaatcaattcttatcggacccaggataggggaggacacagggaaaaccactgtccccaaaagactagagagacagactggcaaataccgagagccacaagttactagagcatgcagtcacaaacagaaacccccacaggaagcagtgccatggtagaaaaacctgagctgtaattgatgaattataggaggttcagtatgaacaactctgaaagttttaaactccaggaggacccactcatggggaaacaccacaattttgttagacttacctacatgagctcaattagattctccaagtaaatattgcagaaaaatccctatgtgcttctggcagggggaaggtgaaatgaaccattttgaaatatgccagagcactgtgctcttcttaacaaggtctgcccccaggagaaattagttagctaaatcctaacctgctggggtattattagagcctgacccaagggaagggaaatacctaactcttgtcagctctaaccttctgcatcagagaagggaaatactaaactccagacaactctagccatcctgtcctaccaaagaggggagaagaatactgaggaaacacttagaagtttgtacaccagaggcatatgcttactaaaagactgagacttaatcataggatgatagaatgtctcccctcccctttcccccacctaactgctacattgctaaaagctgatttataaaagttccttttacctggtacatcatgtccagctaccaagaaaaaattaccaggcataccaaaaggcaaaaaaaaaaaaaaaaaaatctgaggagaatagagcaagcttcagacccagacagatagggattctggaattatcagatgaggaatttaaatccactatgattaatatactaatggctataacagataaagaaggcatcattcaagaataggtagacaatgtaagaagagagatggaaatcctaaggaaaaagcaaagagaaatgctagagagtaaaaacaccgtaaaataaaaatggctttgatgggcttatcagtagattgaacatggctgaagaaagagtctctgagcctgagaatgtctcaacataaacctccaaaattggaaagcaaagaaaaagactgggaaaagaaaaaaaaagaataaggactgcaggacaactacaaaaggtgaaacatatgcataaggggaatactagatggaaaagaacgagagaaagaaacaagaaatatttcaaacaataatgacagagacatttcttaaattaatgtcagacatcaaacttcagatccaggaaactcagaaagaaaataataggggtttgaaactcagatctccataaagaaaagaagagcatcagagagggaataaacaaagactaaaatgttcatttttcttattcttaattgatctaactgataagtttgttcaaaataataatagcaacagtgctttcgattttgtatgtttatatgttatatgtatgcttacatataagtgaaatgaatgacaacaacacaaggagcaggagggaagacttaggattattttgtttttgtatgatacactacttataaagtggtatagtgttatttaaaagtggacttgggggtgcagcgcaccagcatggcacatgtatacatatgtaactaacctgcacaatgtgcacatgtaccctaaaacttaaagtataataaaaaaaaaaaaaaaagtggacttggactagttgtaaatggatattgcaaaatctagggcaaccactagaagaattttttttttttaagtataactgacatgctaagaaaggagagaaaatggaatcacataaaatgctcaattaaaaccacaaaaggcagaaaatatgtggaagatgaaaatagaaaataatgacaaatgtggtctatattaatttaactaccagtaatcactttgaacatcagtggtctaagtgcaccaaataggcctggtgtggtggctcacacctgtaatcccagcactttggcaggctgaggcaggaagatcacttgggcccaggagtttgagaccagcctgcacaacatagggagacagaccatctctacaaaaaatttgaaaaattagccaggcgtggtggtgtgtgcctgtagccccagctactcagaaggctgaagtgggaggatctccttgagcctgggaggtcaaggctgctgtgacagagtgagaccctgtctcaaaaaaaaaaaaaaaaaaggaaaaagaaaagaaaaagaaaagcactaattaaaagattgttagagtggatcaaaaaacaagactcaactgtatgttgtttacaagaaccccactttaaatataaagacacatgtaaatgaaaagtaaatggatggagaaaaatataccaagctaacactaatcaaaagaaaacaggagtagctatatttcagacaaggccgacttttcaaagcaaagaaagttatccagaataaaaaaggtaattacgtaatgataaagaggtcagtcctccaagaagacataacagtcctttacatgcatgtgcctagcagcaaagcatcaaactatgtgaggcaaaaactgatagaactacaagcataaatatatgcatccactatcatagttggagatttcaacacccctttatcagaaatggacagatccagcaggcagtaaatgggtaaagacctagttgaattcaacaacaccatcaatcaacttgatataattgacgtctatagactacttcatccaacaagagcagaatacacattcttctcaagatcacgtggaacattcaccaagatagaccacattatggtccataaagcacaccttaacaaatttagaatagaaattatataatgcctgctctcagaccacagtggaattttactagaaaccaataaaggaaagataactggaaagtcccaaaatacatggagattaaacatggattagaaaagaaattccaagataaattgagaaataattttgaactaaatgaaaatgaaaacacaacttatcaaaatttataggatgctgcaatgagccaggatcgtgccataaaataaaattaatatatcagagatgtatgtactccatgtccattgaaacacccttcacaatagcaaagttaacagaatcaacctaagtgtccatcagcagatgaatggataaagaaaatgtgtatgcactcaatggaatactgctcagtcttaaaaaagaagttttgtcatttgcaacaatgtagatgggcctggagaatattatggtaagtgaaataaaccagacacaggaagacaaatactgcatgtcctcacttatatgtggaatctgaaacaacagaacttataaagtggggagtagaatggtggttactagagtctggggtggtgggcagtgggagaatgaggagaggaatgttagagggtacaaagcctcaaatagacagaagtaataacgttttttcctttgggatatattgcacagtgcagtgagtatagcaaaaacagcctttataacaaatgatgctggaacaactgaacgtccatgtgcaagaaaatgaatctagacacagaccttatacttaccacaaaaaccaactcaaaatggattatagctctaaatatgaaacacaactataaaatgactagaagataacataggagaaaacctagatgaccttggatatgatgatgactttttagatacaaaccaaaggtacagtccctgaaagaaataacagataagctgaacttcattaaaattaaaaacttctacagaaagcagggtcaagagaataaaaagataagtcatagactgagagaaaatctttgaaaagacacatctgataaaagactaatccaaaatatacaaggaactcagaaaactcaaaataagaaaaatataaaacctattttaaaatgggccaaaaaccttaacagatacctcaccaaagaagatatacagatgacaaataaacatatgagaagatgctccacatcatatggcatcaaagaaatgtaaattaaaatgacagtgagataacgccacacctgttagaatggccaaaattcagaacactgacaataaatgctgaaaaggatatagaaacagcaggatatggagcacctctcattcattactggtgggaatcaaaatagtacaaccaccttggaagacagtttggtgatttcatacaaagctaaacatattcttaccatgtgatccagcaattgtgctcgtaggtatctacccaaagaagttgaaaacttagtgcacatgggcatttatagcagctttattcataattgccaaaacttacaagcaaccagtatttccttcagtaggtgaatgaataaatacactacggtacattcagatgataggatattttttagcattaaaaagaaatgagggggcctggacatggtgggtcacgtgtgtaatcccagcactttgggaggccaaggcaggagaatcatttgatcccaggagatcaagaccagcctgggcaacacagggagaccctctctctacaaaaatataaaaaatgagccaggcatggtggtgcacacctgtagtcccagttacttgggaggccgaggtgggaggatcacttgcactcaggatgaggctgcagtgagctgtgattttgcctagttataggctgagagggtggtgagtggtggttcttctcactctgaagagatctctagtcattctaaaacccattcatttgtcattactatatagaagagacaataagtaatggacctatcctttaagaaaacctctcatcaaagtatgcttctttattgcaggtaattcgtgcctttctgctctttccaacaattgaacgaatgtctgagtcacccaatggcagaattgccactccacttttgtgctggtttcgatatgttctctatgttactggctacttattattgaaaccgtgtcctgagacaatcaagtccttgctaatcagaaggggccttcaagtaatgaacctagagaatgaattttcaccattgaatatattagaaccattctgccttggtaagcacagattttaaaatgtgtatgtttattcttgtatcacaaaatgtttacacaatactctctgacagtggacaaatatcaagcaagcaattatttactagtttttttttcctcttccaaaagtttaaaactagaaataaataaaattagaaatagaatgaattttttcataagaaattagaaaagcctcatcaagctttaattttaccttatgtttctgattcttcactctagctgcagcacagtgagaaacacttcttccgcatatagtacatagtatatatggagtccctacaggaatccttggtgtgcctgttagcttagtgggagtactttacgaaaaacagcacaaggacacaaagcctaatattcttgtagagttaacaggttgtttttattttcctcctttaaatgttttgggagaatttaaatcatagaagtaataaatatttgtcatggtaatgtattttaatactgggtgctttgctgatttttatgaatatgctaggaaatgtttttgtgactttactttttggcttcaaaagttgttttaaaatgtagtctatctttttagatcatactattttatactacatttataaatgactttcataataaagtaatcctagtttcttaatctataatgtggggataacaatactccgtacttcaaaaggttattctagtgttaaatgtgataaaatatccaaagcttctatctagtattttatttataaccgacctccaatgaacgatgtaacaattagttgcagcagtagctgatggcactttctaagcttttacctgtgttcctcaaaagaactaataaggtttagtattgctattgtccccattttagatgaagcaactgaggtacaaagaggttacatgattgcccaaagttatacaactagtatgtagtgttgaaacccaggcattctgccactgtattgcatttcctttcaccatagctggtgctgttgcccttgttaatgataacagcaggactcctgaataaagttttccatgctcagctgtattaagaatgccataaggtcacatgcctaatgaactagaaacaagttaacagccctgcctgttcaattgtgcagctgcagttcatatgggaggtgtttttctaaatatgtaacaagaagcagtcctcaaaaatacaaggttcagtatatttgtcctattgatagattttttcccccttccattttccctccaatttccattctttaatatacccttagcatagtggtttaaaaagatgagataggaagagggaaagcaagggctaaggacagtcatagaaattgccagaggttgatgttggaaatatcccttaaagaccatttggtccaactcctcatctctccaccatattattaaggaaaggggtcccgatccagaccctaagagagggttcttggatctcgcgcaagaaagaattcagggtgagtctgcagtgcaaagcaaaagcaagtttattaagtaagtaaagtggtgaaagaacagctcctccatagacaaagtaggatattcctgaaaataagaggagggatgcacccaccctaggtacaatgcttatatatatagggagatgtgttctgctacaagggtttgtgataaaggattaattttcttaattactgtattttgcaagaatctatatattattattattattattattattattattattattttgagatggaatctcactctgttgcccaggctggagtgcagtggcgcgatctcggctcactgcaacctccgcttcccaggttcaagtgattctcctgcctcagcctcctgagtagctaggactacaggcaagcaccactgtgaccagctaatttttttattttttttagagacagagtttcaccatgtaggccaggctggtctcaaactcctgacctcgtgatccgcccgcctcagcctcccaaagttctgggattacaggcatgcgccaccatgtccggcccaagaatcgatatttttatcttaaaagcaaaattaggaatgcctttgttctccagatatcaggatatctggacactcccaagtctgagtctgttttagtaaacattattaatttgttcccttaactttaaacatctagaggctcggaatgccttactttctgagaatacagtccagcaagtttcagcctcattttcctagcccacactcaaaatgaagtctctctggttcacacgcctctgaaaatattatggaacagatgcctactggtgaaaatagtactgacaggaagtcacaaaccctcaactctcattttggttctgccctagagtcactctgtggcttttgtttagttacttcccctcgttggttttcagttgttgactaaatcaagagttagggccagtctacctttggaaattacttgagacccaatggaatcaacatttgaaattctggcaaatatatgtaaaactctccacatatactttgataagatcattttacgtctctttacaggtttgtttgtctctcccagccccttgttgctttttgtcattttctttttgccttgtagaatgtattttataaagcattcttcagttatggattccattttcctcctgggacttctgcttccaggaagatagagtaaatggactttccactatttctcctgctaagtactaaaaaccatggatattatctataaaacaacatcaagaagactatacaaggtagagaatagaaagcaggctatgtagggactttgggacccaaggaacaaacacagtggtgagttctctgggttttctttttaccacatatatcctagatttggagccagcaacccagaaacaccaaagagtagagacttttaaaggtcctaacaaaagcctactctctctagcccaaagaccaggaaaggagcaatgttttatagagtaggaaaaaatagtcttctccctactttgtatagttcttacttggggcagatctttgttacaaaagacagattaacaagaaaaatgtataaatttattaacatttatatttcatatgtacatgggagatacccagagaaatgagtaaatctcaaagaggtggcttctgagttcagacttaaataccatcttgaactaaaacaaagaaaagaggtcagtaatgggaggtgaccaagaaaagcactgcacacaagacaagtttgttgtgcagatttaagttagtgccctttgcgttgataatagagtccatggtgatttagaatcatccttcatggtacagagaggaaaacacccatacaaatggaaatgtcctttatagatgtcaatttccctttaaaaagggaacttctccatttttagagcttctcctgtgtcttcagtttctcaaaatactcagtttaaaataatccttttgcccaagacacatctttagggatggtatattttggtcccctacagtcattttgcagcagtgtattctggttttcaatactttctttctttattattattattatatattttttgagacagagtctcactctgccacccaggctagggtgcagtggctcaatctcagctcactgcaacctccgcctcctgggttcaagcaattctcctgcctcagtctcccaagtagttggaactacaggtgcctgccacgactcccagctaatttttgtatttttagtagagatggggtttcaccatattggccaggctggtctcaacctcctaacctcaggtgatccacctgccttggcctcccaaaatgctgggattacaggcgtgagccaccgcacctggcctctggtctttaatactttctaaaagaaacatttagacagtaactgctctactctactccagccatttccagtcatgcctgcaaagattgagtggactttaccctctccccagcagtaatgaagcaccccctctctttccctgctctacggtactgtcccagaagaggctgagtagagagcgaagactttcatcactgccctgcagtaatggggccaccatcaccactacccccatattatcagtaaaggtcatgtggggagaagtagcaagggactcaccacttgtcccagccaagatggtaacagtggaagcctagtacagagtcagaattccttcccctacccagcagctatgaggagccccttcatcccttgggtgtcaacagaagtcaaatgggtaacttagactctaccctacgtggccatagtgaaaaaaacatctaaaacataaagtttaagtaagatccagaatctcataacataatactcaaactgtccatgttttagttgcaaatcacttgtctaacaaaatctcaacttgactggaaaaaaaaaatcaatgccaacaccaaaatgacagagatattagaattatctgacaataactttaaagcagccactataaaaattatttaatgatcaattaataaacatgtttgaaactaatgagaagatagaaaatcttaggaaagagaagattaaaaaaaaactgagtggaaattttagaacaaatttaaaatctcaatggatggaaccaacaataaaatgaggagacaaagaggaaagaatcagtgaatatgagattagattaatagaaattatccaatagagagaaaatagactaaaaaggggaaaaaaaggaacagaacctcagggacctgttggactacaacgaaagatctaacatttgtgataacactagtcctagaaatagagagtaggtctggaaaagtgttcaaagaaataatggtcaaaaactcccaaattttgcaaaagatatgaatttacagattcaagaagctgagtgaatttaaaacagaataaacccaaagaaatctatactaaaacaccataaccaagcttttgaaaactaaaacaaagaaaatgtcttgaaagcagccagaagagcaaagcggtacattattcatggaagaaagtctgtttgaaggacagctagtttttcatcagaatccatggagacccaaaggaaaatgacaaaatgcaaaatgaaaataactattaatccaaaattctgtatctagcaaaagtgtctttcaggaaagaaggggaaatttaacattctcaaatgttgaaaaactaaaagaacttgtcaacattagatctatcctaaaagaataactgcaggaagttctctcaacagagaggaaatgataaaagaaggaatctgggaatgtcaaaaagaaagaacagtgaacaagttaaaatgtggacaaatgcaactttcttcttctcttgagatttctaaattatgtttaacagttaaagcaaaaattatagcactgtctcttatggttctaaacatacacagaggaaatatttagggaacgattttataaatgggggagggtacagggacataatggcaagtaaggtttctacactttacttgaactgtaagatgtaaccatatgtacatagtaataagtcatgtatatatgtaatgtagtacctagaacagccatttcaaatgctattcaaaagagatactcaaaatcaccatggatagatgaagatggaattctatatttagaaacacattgattggaagaccagaaaaagaactcagagacatgacagagaacaaacagaaaacaaataataaaatgatcatccatgattatattgaatgtaaatctaaatatacaattaaaagaaattggcagggtagattagaaaacatgactcaattgtatgctgtcctcaagtcttagtttaaatataacaatataagtaggttgaaagcaaaaggatgagaaaagatacattatgcaaacatttataagcaaaggaaaccaggaatagctttattaatatcagataaagtagatttcagtgcaaagaaaattacctaatagacatttgtagaacacttcacccaaaacagaattgatatcaacatgttgatatcattgaaaccatacagagtatgttcagtgaccacagtggaatcaaactagaaatcagcaacagaataacaaaagttagatctttaaatacttggaaagtaaaccgcacacttctaaacaactcatgagtcaaaaatggaaattacaaagaaattcaaataatactacatgtaattaataaaactatagctcacaactgtaatcctagcactttgggagtctgagatggaaggatcgcttgagcccaggagttctagaccagccagggcaacacagtgaggccctgtctctataaaaaatttaaaaattggccaggcactgtggctcatgcatgtaatcccagcactttgagaggctaaggtaggcagatcacttgagtccaggagttcaagaccagcctgggcaacatgatgaaaccccatctctactaaaaatacaaaaattagctgggcatggtgtcgcacacctgtaacaggtcctagctagttgggggactgaggcaggaggatcccttgagcctgggaagtcaaggctgcagtgagccgagatcgtgacactgcactccagcctgggagacgaagtaagatcctgtctcaaaaaaaaaaaaaaaaaaaatagccaggcatggaggtatagcctgtagtctcagcttctttgggcaggctaagatggaaggatcacttgagcccaggaggccaaggctgcggtaagccatgatcatgccactgaactccagcctgggtgacagagtgaaagcatctcaaaaaaaaataaaattattaataattaataataaaactgaatcaaaatgaaaatacagcatattaaaatttgtgggacacagctaaaacagtgatgagacaaaaatgtatgctggtgtcagaaatgattacattagaaaagaagaaaagtcctagtaacctaagcttcaacctgaagaacctagaaaaagaagagcaaaataaacccaaaaggaggaaaaggaaagaaataacaagaatagaaattagggttaggagcagtggctcacatcttgaatgccagcactttggaaggctgaggcagaaggtttgcttaaggccaggagtttgagaccagcctaggcgacatagtgagaccctgtctctacaaaaaaaattgaaaacaaaaacaatagagaaaatcaatggaagaagaaagtggctactttgaaagagtaataaaattgacaaacccctagcaagactgacaaagaaaaaacagctgaagacacaaattaccaatatcagaaatgaaatagaaaatatcaccatagagcctgcacccatcaaaaggataataaaggctactgtgaacaactctacacatataaatttgacaactggaatgaaataaaccaattcttcaaatgtggacacactaccacaattcatccaagatgaaatagaccatttgaagagccttataactttgaaggaaactcaatttgtaattttaaaacttccaaaaaaagacatttagaggctcagatgatttcactgaagaactatacctaatgtttaaagaaatactaacacaattctacctattttttaaatagaaaataggagggaacacatcccaattcactttttgaagctagtattatctaatatcaaaaccagagaaaaataatacaaaaaaagaagaaactacaggccagtatcccctatgagtatagagacaaacatctctaataaaatattagcaaacagaattcagcaatatataaaaagaattatatactattctattaccaaatgtgatttattccagggatgcaaggctagtatgatattcaaaaatccattaatataatctaacatattaacaggctaaagaagataaaccacatgattctatcaaccgatgcagggaaaaaaaaatattttgaatgcttttcttctaagactagaaacaagacaaagatgtctgctctcagcactcttattcaacatagtgctggacgttctagtcagtccagtaaggtaaggcaaggaaataaaagatatacagatcagaagagaagaaattaatctcgtttgtagatggcatgattgtctgtagagaaaatcccaaggatggttctgcggctctgccagggaataaaaatatatcaaatgattaaaaaaaaaaaaactaaaagaaaaaaatgacaatcccaaggaatctaccaaaaacaaactttgagaattaatacaagttcaacaatgtcacaggatacaggataagcacaaaagtcaatattatttgcatacactagcaatagaaaccaaaatttaaaatataatgtacatttttagccagtcggaaaaattaaattgttaggcataaatttagaaaaacatatacataattatatgctgaaaatgatgactattaataaagaaatgaaagaagacctaagtaaatggagagacatactgtgttcatggattggaagactcaacatagtaaacatgtattaatgcactctcacactgggtaatttataaagaaaagaggtttaattggctcacagttccataggctgtacaggaagaggcatccacttctgcggacgcctcaagtagcttttacttatggcagaaggcaaagtgggagcaggcgtctaacatgggaggagcgggactgagaaagacaagtgggagaggtgccacacactttaaacaaccagatcttgagataactccatcattatttctataacagcaccaagggggatggtgttaagtcatgagaaaccatccccatgattcagttacctctcaccaggtcccacctccaacattggggattacattgaggacatgagatttgggtgaggacacaaatccaaaccatatcagatgtcaattcttcctaaattgatatgcatattaaacatagttgctatcaaaatccgagcaagatttttttgtagctatcgacatgattattctaaaatgtatttggaaaggcaaaggaataagaattactaagacagttttgtaaaagaagaataaagtggaaggagtgagtctgtctggttgcaagatttattatgtagctacagtaatcaaaactttgtgatattgataaagggattaatacataaatcaatggaacagagaagagaacctagaaatagacccacacaagtgtgcccaactgatttttgacaagagggcaaaagcaatttgataaaagaggaattgccatttcaacaatgttgctggagcacttggctcttcttaggccaaaagaaaaaaagaagaaggagaaggagaaggagagaagaagaaaggaaggaaggaaatgaacctcaacctaaactgtaaaccttacaccttataaaaaggttaactctaaatgagccatgaattttaatataaatcttaaaactacaatccttttagaaaaaaagaataaaatattcaggatcaggatctaggactaggcaaagactagctgggtgtgatcacagtgagatatcattacacacctatcagaatggctaaaataaaaaaaatcagcaaccataaatgctggtaaggatgcagagaaactggatcactcatacattgctgctgataatgtaaaatggtgcacccactctggaaagcagtttgacagttaaaaacctaaacacgcagctaccctatgacccagcagttaacactcctaggcattcatccctgatatgtgaaaactggtgttcagagaaaaacctgtatatgaatgtttattgtagttttattcataatagccaaaaactggaaacaacccagaggtattttcaatgggtaaattattaaacaaactgtggtaaagccataccatggaattctacttgataataaaaaggaacagacttttaatacacacagcaacctgtgtccatctccagagaattatgctcagtgaaaaaaagcaacccttaaggtttacatactgcgtgattccatttatatagcattcttgaagtgataacattatagaaatgaagaacagattagtggttgccaggggttaaaaattaaagatgaaaatttagctaggcatggtggcacacacctgtagtcctggctacttgggaggttgaggcaggaggatcgcttgagcctaggagttcaaggttacagcgagctgtgattgcaccactgcacttcggcctgggcaacagaggaagaccctgtctctttaaaaaatacatacatacatatcctggctgtaacattatactgtggttttgcaagatattaccatgggagaaactgggtaaaaggtacatggatttctctatattatttgttacacctgcatgtaaatctacaactatcttaaaataaaagttgaattaaaaacaaaaagcattctccagctagggataccactttcctccctgggataggtgttcccctcatcctgacggcctgaattaggagctccttgtccttgagacattgagaaggttgaggacccagagtcccagggctgaggacaccattagatatgcagctgtacttatgcctctttagaaatattttctaaactcaaatcaggacatgggatataaattttatacattttttaaatttatatatgaaaagtctagctatgacaaattattcttaacggtatatttactaaatacataatatgtcacatataacatataatcaagtgcttaatgtttttaattaaaacaggaaattatgtaaaggtattttccactttttctgcatcagagttatatacacttcaggagaagtaggctccaaaagctgcacttgaaagaaaggactcttccttttaattgcaataattgacctcctactgcatcttccaggagactgaagtttaggcagcagggagcaagacagtttaggcataagacatatttccctccccaatccaaggcaaccagagttttatactacattgttgcttgaagaaccctgggcttcctttctcacacaaccctgatatatgaaatacattttgtaaatcagactgaacattcagctacatgtcttcatctctgttctaaataacaaactagcaaacaaatttttggagcacagtcctcctatttcttacatcctttccttttctgatcttttaatcccttggctctaatctggccttctgatagccaaataactactacttcagtggtctctgatttttttttttccccataacctacccagtgtgtgtaaccttgggtaaaggaaaatgaggcagtagttagttacctgtcttctttcttctttgggttattggttcattccctgcttgggttcatagttcacttcctagtagccagcctcttccctctagatccccagtgccacccctgcctcctcttgcaataaccctcacagaagctgccttcgcccaggcttgcccttaccatcactatggtgattcctagtaccttgcttcccacaaagagaaagtcccaactgagagagcaacactcaacagaagactttgggagatgatcagtgggctctgctagagtttatactccatgaatagtggacataactaatgttcataccagctacttgcatcggcataattttcatggttacacaaagagaggggttatcaagggaaaagaagatcaggtcagagatcattcccagctgggaatctggtccagctggatatttccccctggcccccacagacctgtttctctgtggcttgactatcatccagacaacgaccttttaacctgccagcatgccttttaggaggctttgcagtgtttgcagattatgtaatgtctgtgcttcagtagaaatcttacggaaacaaatggaggaagtttgctagtccaagcagtggataataaatcctgccctatctagatagaaactggttttctgtatcctttagtttatacacacatttttgttgttgttgttgtaagctctgaaaaattctaggaaccaaaatattcaaatatttcaaatcctgctgcccttttggcaaagatggcacatcctttcctgtaggcttgagttctggggcattagcgttcttctctagtatgagtgagtgaaatgtcatttcctatccagcattcagagaagagtagccctacatcagttagtgtacattataaactttaccacagtgttcatcaatgtcattttgttaactaggttattttaaatgttatttttaaagaacatatatggattttttcttcagttttaattctggaatgtttgctactctgtattttctttagatgttcttccacttcatgaaaaataggcttttcactgagacagctaagttgattttctgatcaaagctaaaagaaaatacgtcttagttcagcagtatagcaagtcaaaataattaactttaaaaaatattctagggtcttttcgttagttaggccaaattgatattttatttcctttcagttacctaactagaaaaacatagcacagagacatagggaatttctggtagattacattactttgttgaatatattcttgtaaaataaattttcataattttttcttcccttaatatggaattagctttttaagatataaaatgaactattaaatgagatgacaacataagcatttgcatcactaaagaatcataaatttcttctagaatatttttaactcaatcccagaataatttttgagtaagacgaaaccagactctcatgttaccttacctattctctcatttatctgagcagcttatgaaaatatgtttataaaacccaactgtggcttttatttatttatttatattagagacagggtcttgctatgttggccaagctagtctcaaactccaggcctcaagcagtcctcgaccttggcctcccacagtgctgagattacaggtgtgagccgtcatgcccggccccagctgcagcttttaatgattcatgcaagtataacctaaaattcaggaatgaaggaaaaggtttttttgtttgtttttgtttttgtttttcggtcagtgttaggatttaggacaagaggtgattagtgtggtactaggatataatctctggtttagaagttaatagcgcaatgaatatcttattttttctaaagaaatttttatatttcaaaattaacgccagtctaaaaagttgcattattttttaaaatcatacaacacctccagttgtttttcactttggtgaactcagtgtcgcttaggtaagattatctgtttgcagactaaattgattatcgtaatgaccacagtcctggcttatagagaaatacataataaactatgttgactacgaaacatttctccaaattatgcagaaagtttagaatgggagaattatttttttaggtctagttttcactttgttgcaacttggcaccattggaaaggtggaaaacaacctggaaataaataaataaccgctgaagaattttcccttggaagaaggtttcatctgggtttctaagactatctggtcctacttaaccttttgacaaaccctgctggtatagcctttctgagtacccagccttactctgcctacagctgtgttggcatgtggggctgctcatgtctccagaatcttctagtcttgcagctcgtcctcaaccctaaattttgttcccacacagccctgcttgacttgaaccttcctaacttccctacactcagcacatcttgccagcctcaggaatagtcagaatatgtgctaggaggagctttcctgtgaaaggctctttttcagtcagctcctaccctgcctcctctcaggcaagccctggatatgtgcagatgccactttctcccccactcaagtaccagagcctgataggcagttaagcacatcagcccttgtgctgtgaccaaaaacacccagaatattcaaaggccctatttctattcacttttatcatctgggattgagtttgactatagataacagaaaaccaaattacagtggcctaaacagatagggatctatttttctcatgtgccaagaaatccaggcataggcagtccagaggtaaataacatctcaacagtgccatctgggacatgggtcgtatgtttctactctgttgtcctttgcacatcacataaacctttatccttgtggtcatcatctcatggtcacgtcatggctcctgcaactctagacctcatgtctaacattcagccagaaagaaagggaaaggggagaaaggcaaaaggcctactcctgattaggctttggcttatttaaaaagagaatgtcctccctaggaacttttagattagtagccaaaatatcccttactctgaggaatagagaaaagccatatgttttgatttccccatgactcagtagagtcaatcaagggaaatgaaaatttttgttggcttttaggtagttacattgcgtctactacatccacactgcaagatggtcttgagattcaacatccatggacttaatctcagaatagcccacctaccaaacactgaggtaagacagtcagtccaccagaactaaaatccatcgttgccatgttcctgcagaatgccttcaggcgttgtaacccttggcaagataagctcacagtgaggtctaccgtttatttcttaattgtgacaggtcttcttcaaatcttgtctaaataagtacccatccacagtagagctcatctcagctcccaagattattgtattttttattttaaagggagttttaaaatgtttggcatttcatcggtattaatgggcttactaatgattattctcctcagccaccccccatcatggtgctgaatctaccaaagccttttcctaacctgtcaaaccttttcatgagtactttaagaaagtgatttttccttgtaaacgtggtggtatattttggacatgtagaatctgtcagaccttttaaataagatcaaagtgactagaagtagtatctcagtcaccatagaccaagagtaaaactcacatatatattgcggtatatacacccacaatggttgatttcctacctcccaaattcacctgtcataatgaaaccatgcccatctcctgtaattccccttgcttcagtaccaacaagtccctctcctcaataatggcaaagccaaacaaactggggcattctaatatgaatcatactagtggtactaggctacgtaccaccaaaacagcagcacaacttggcttgccaccttgcagttctactttagaaaactatttatgcatcaccttccattttatgattagttgtggtttaaattgcctctacattgtctctggctcttataactagtgtgtatgtggcctagtttctgactagtcccaacaggggctgttagacttgtactctggccttcagttattcatctcacttttataccagtacctgccagcttggcttaccagtgtcagtgtgcttcagcctctagttctggcctccatcatgatgtcagctcttggaccacttcctccccaccccgctttccaaagcactagctgagtaaccttctctgtcagtctcttcccatttatttcacttaacaacccttccttactgatacctgctgtgagctaactgttcagataagcactggagagaataatgaatgaaatatagttcctgcccttaagttacttacagtgggatagaagagaaaaaatatgaagaattttaatatatcatagggctatcataaatcagatacaaggtatgaatggtaatgagaaaggagagatcagttctattaatacctaggtaagtaacagaggagaagatgaatgaatttggacttgaaggtgagttgggatttttccagacagacaaaatggcaccaggataggcaattagaaggcagccttctgttatggattatgtgtacttggagaattgggtgataacatttgacctgtgagatgaatgccctattggtcttccagctttagccctcactcggctatttcaaaccttttagccagcataagttaaagttgtatagtaatttttggacattaagcaaatcttagaaaataatgttagtaaataacattagactcttcaattagtcttttttatacctgtgtttaatggagcaaaagtaaagaattaacattcttccaaatcattctctttccttcatgtttttgtttccattactactgctactagacatttccttcactgtagtgcttgaaattctgagttctgctggatttccaggaatgctgttgacagtcattgccaagagaaatgtgttttccacttaggaaattacacttctatttggtattattatttctgaccactatgttgtattatgagcatttctgaggaatgacaaagatggcttccttggagcaattactggaaaagaagctggtgttctattaaaaaaaatatatgcttagataggaaattaccaagaaataaataagggtaggaataaaggtgggatggagtacattccctgatgaaaaaatttactttcagaaaataggactccttacaaattatttgaatttttaagtttttttttaatttaagaatgacaaaaaagtacttaaaacataaatgtgtcccttcatgaattatcacaaaacaaacttctattaactgccacccactcaagaatcaccattgcccgagtctcagaagacccccttatgcttctgcccatctcacttactccattttcccaaatgtaactactactaacatctagatgtacctggttttggactttaaataactggaattgtataatgtatacttgtttgtgtctgacttctctcagtcaacattgtatgttgcaactttaattatttcatttttattactaaatacttttccactggatgaatgcactacagtgtatttatttattctatgattgatgaatacttgggttgtttccaatgtggtactactaaaaataatactgtcaagagcatttttatgcttgcctttcagtgaacttatgcacatatttctcttgggtccatccagagaggaaatgcagaggtcatatggtatgcatatgtttagcttcagaagacaatactaaatggtttccaaagtggttgtaccaatgtgtactcccaccagcaatatatgagtttatgttgcttcatttgctcaccaacacttggtattgtctgtattttttgtttttgctatgttttgtaatttgggtcaatctagtaggtatatagtgccatctgatggtgttaaggttttctaaaaaatattttgagattgttctttttctttgattacataatagttgtacatattttagggtacatgtgacattcgaatacctgtatacactgtgttatgatcagattagggtaaatggggtatccatctcttcaaatatttatctttgttttaagaacattacaattcttctcttctagctattttgaaatatacaattactataattttcccactgcattatcaaatacaggaacttatttcttatatctgattctgtttttgtaccccttaaccaatttctctcatctgttccaccccgcttcctttctaagcctctggtagtgaccattctactgtctacccctgtgagattcactttttttttttttttttttttttgagacagtttcattctgtcgcccaggctggagtacagtggcgcaatctcggctcactgcaaactctgcctcccgggtttaagcaattctcctctctcccaccttcccccgccagtagccaggattgcaggcgcacaccaccacgctcggctaatttttgcatttttagtagagacggtttcaccatgttggccaggctggtctcgaactcctgacctcaggtgatccgcccgcctaggcctcccaaagtgctgggattacaggcgtgagccactgtgcccagccgtaagattcactttttagctcccacataggaatgagaacatgcaatatttgtctttctgtgcctggttttcacttaacataataacctccaatcccatccatttttctgcaaatgacaggatttcattctttttatggctgaataatattccattatgtgtatataccacattttctttatccattcaccaactgatggacacttagattcattagtatcttgggtactgtgaacagtgctgcaataaacatgggaatgcagatacctctttgatacactgatttcctttcttttggatatagacctatcagtgggattgctgaactgaactatgtggtagttctagttttagttttttgggaaaactctaaactgttttccataatggctatactactttacattcccaacagtttacaggtattcccctttctctgcatcctcaccagcatttgttattttttgtctttttcttgatagccactctaactggagtgagatgacacctaattgtggggttttttttttgtttgttggtttgtttttaatgttttatttccatagattttggggaacaggtggtatttggttacacgagtaagttctttagtggtgatttgtgagattttggtccacccatcacccaagcagtatatagtgaacttaatttgtagtcttggttttgatttgcattttcctgatagtgatgctgagcattttttatgtacttgttggccatttgtatgtcttcctttgagaaatttctattcaggtctttggtccatgttttattcagattatttgtcatcatgctattgagttgtttgagttccctaaatatcctggttattaatcccttgttagatggatagtttgcaaatattttctcccatgctgtagactgtttcttcactttgttgattgtttacttttctatgtgtagctttttagcttggtgtaatcccatttgtctatttttcgcttttgttgcctgtgtttttgaggtcttacccgaaaaaaatctttccccagaccaatgtcctgtagcattccccctaatgttttcttttagtagtttcatgtcctattaaagtctttaatccatttgagttgatttttgtatatggtaaaagataggatcgatctagcttcattcttctgcatatggatatctagtttcaataatgtttattagagagactatcctttccccaatgtgtgttcttagtgcctttgttgaaaacaagttggctgtaagtatactgatttatttctgagttctctattacattccattggtctgtgtctgcttttatgccagtatcatgttgatttaattactatagctttgtagcatgatttaaagtcaggtagtatgatgcttccagctttgtttttttgtttttgttttttcctttccttaggattccttagcaattcggcgtcttttgggattccatacaaattttaggattgttttctccatttctgtgaagcatgtcattagtattttgagagagattgcattgaatctgtagattgctttgggtcatataacatttcaatgatattaacccttccaatccatgagcatgggatatcttttcctttgtgtgtgtgtcctttccatttctttcatcagtgttttatagttttccttataaagaaaaacttgttttgttaaattcacttcttttgttaaatttattcctaggtattttttagtagctattgtaaataggattgctttcttgattactttttcagattgatcactgtaaacgtatataaacactgctgatttttgtatgttgattttgtatcctgcaactttactatctttatttatcagttctgagagttttttgatggagtctttaggttttactaaataaaagatcatgtcatctgcaaacaaggttaatttgacttcttcctttccaatttggatactctttgtttctttctcttgcctaattgctctatctaggacttctaatactatgttgagttgaagtggtgaaaatgggcatcttgtcttgttagatgttagtggaaatactttgttcactgttcagtgtgatattagctgtgagtctgtcatatattgcccttatggtattgaggtatgttttttctataccccgtttgttgagagtttttattatggagggatgttgaattttatcaaacacttttccagcatgtattgaaacaatcatatggtttctgttcttgattctattgatgtgatgtatcatgtttattgatttgtgtatgctgaaccatccttgcctccctgggctgaattccacatgatcatggtgatcttttcaatgtgttactgaattcagtttgctagtattttgttgaggatttttgcatttatgctcatcagttatattggcctgtggttttctgttatattcttgtctggtcttggtatcatggtaatgctggcctcatagaatgagtttggaaatattccctcctcttcaattttttaaagtagtttgagtagaattggtattagttcttcttcagatgtttggtagaattcagcagtgtttctatcaggtcctggactttcctttcatgggagacttattattattatttagatcttactcattatttgtctgtttttctatttctttgtttcaattttagtagattgtatttttccaggaatttatccattacttgtaggttttccagttcattggcatgtagctgttgatagtagtctctagtgatcctttctatttttctggtaccagttgtaatgtttccttttttgtctctgattttacctatttgggttttccagcatgttggtattgtctatctttaaaaaaaaaaaaaaaactttttcattttattgatcttttgtggttttttagtctccattttatttatttctgttctgatctttattattttttttattctacaaattttaggtttgatttgttcttgcttttctggttccttgaagtgtatcattaggttatttatttgaagcctgtatttttttgacataggcatttattgctataaacttccctcttagtcctacttttgctgtatcccataggttctggtatattgtgtttccattttcatttgttttaagagtttttaaaaaatttctctcataatttcttcattgacccattggtcatttgggagcatgttgtttaatttccatgtatttgtacagttttcaaagttcctctttgcaaagattctagttttattccattgtggtcagaaaatatacttaatatgatttctattcttttaaatttgttgagactttttggtgacctaacatatgccctatgctggagaatgttccatgcactgatgagaaaaatgtgtgttctgcagtagttggatgaaatgctcataaatgtctgttaggtccatttggtctagagtatagtttaactgcaatgtttctttgttaattttctgcctggataatctatctattgccaaaagcaaggtgctgaagtcccttactattactgtattgcagtctacctctccctttatttctgttaacatttgttttgtatatttgggtgttctggtgttaggtacatatatatttattaatgtaatatcgtcttgctgaattgatatctttataattatataatggccttttttgtctctttttatagtttttgacttaaagtctattttatgtgctataaatatagctattcctgctctttttaaagttccatttgcatggagtatctttttccatctcttcacttttactctatgggtatctttataggtgagataagtttcttgtaggcagcatatatttgggtcttgttttttaatccattcagccattctatgtcttaattggagaatttagttgatttacattcaatgttattattgataggtaaggacttaatactgtcgttttacttgtttgcttgttgttttgtaaccctgtcttcctttcttactctctttatttgtggttgtgattttctctggtagtgtgttttaactcattgcttttgatttttattatattttaggtttttgctttgggttactatagtgcttacaaaaacattttatagttataagaagttacctataactaagctaatgtttttgtaagcactcctgtagtcccagctaattgaaggctaacgtgggaagatctctagagcccagcaggtcaaggctgcagtgatctgtgattgcaccactgcactccagcttaggtgacagagtgagaccttgtctcaaacacacacagacacacacacacactgatagcaacctaactttgatcacaaaaacaagagaaaagaaacaaatacaaaacatgtacacattaactccattctccccctacattttgaatttctgatgttacaaaaaataataaaagaatttacttttaaatttgataatgttttctttcatagaggcagaaaagcatgtaaatcaaagattgacctgttcttgtggtagtcagtttgtctgtgagtccatttggcactccagcatatatcatattggaagagtttcagatttttgaatttacatttccatgatagctaatgagggtgagtactttttcataatttgagtaacttctgaaatttctgctcttgtctattgcccatcttgatgtttggtttccagcctttttcttactggtttgtagaagttttaagataaattccagataccagtacctttgacatatggcacatatcttcttccactctgtggattgtctcattagtctcttaatatggtctttttgctggaaaaaaattctaattttaatgtaatttaacaatcttttgtggttagtgttgtagtgtcctactaaaggaatcttttcctaccccaaagttatgaaatattctcctatgttatcttctagaaatttaattcttttgccttttaccttttgatctacagcccacctacaattgatttttatgtaaagttgaaggtagaaatcaagtttgtcttttcttctccataggactatccagttgacccatcatcatttagtgaaaagaccatttattaattttttcttgctgtgtaacaaatgaacacaagcttagtatcttaaaacaacacccttttattaactcacagtatgtaggtaaggagttcatgctcaaatcaagttgtcagccaggctcttcttgtctggaggctctgggaaaaaaaaatccaattccgaaattgctcagattgttggcaagacatccattttgtgtggctttagactgaggtccatgttttcttgctggctgtcagccagggtgcttctctactcatatatatatatatatgtatatatacttaaagttctagggtacatctacacaacgtgcaggtttgttacataggtatacatgtgccatgttggtttactgcactgattaactcatcatttacattgggaatttctccaaatgctatccctcccccaaccccccaccccacgacaggccccactgtgtgatgttcccctccctgtgtccaagtgttctcattgttcaattcccacctatgagtgagaacatgtggtgtttggttttctgtccttgtgatagtttgctcggaatgatggtttccagcttcatccatgtccctgcaaaggacattaactcatccttctttatggctgcatagtattccatggtgtagatgtgccacattttcttaatctagtctatcattgatggacatttgggttggttccaagtctttgctattgtgaacagtgctgcaataaatatacgtgtgcatgtgtctttatagtagcatgatttataatcctttgggtatctacccagtaatgggatcgctggatcaaatggtatttctagttctagatccttgaggaattgccacactgtcttccgcaatggttgaactaatttacactccaacaaacagtgtaaaagcattccaatttctccatatcctctccagcatctgttgtttcctgattttttaatgatcgccattctaactagtgtgagatggtatctcattgtggttttgatttgcatttctctgatgaccagtgatgatgagcattttttcatgtgtctgttggctgcataaatgtcttcttttgagaagtgtctgttcatatccttcacccacttgttgatggggttgtttgtttgtcctctctcacttccttgagcagtggttcgtagttctcctttaagaggtccctcacatcccttgtaagttgtattcctaggtattttattctctttgtagcaattgtgaatgggagttcactcatgatttggctctctgtttgcctgttattgaggataggaatgcttgggatttttgcacattgattttgtatcctgagaccttgctgaagctgcttgtcagcttaaggaaattttgggctgagacaatggggttttctaaatatacaatcatgtcatctgcaaacagggacaatttgacttcctcttttcctaattgaataccctttatttctttctcctgcctgattgccctggccagaacttccaacactatgttaaataggtgtggtgagatagggcatccctgtcttgtgccggtttgcaaaggcattgcttccaatttttgcccattcagtgtgatactggctgtgggtttgtcataagtagttcttattattttcagatacgttccatcaatacctagtttattgagagtttttagcatgaagggctgttgaattttgtcaaaggccttttccgcatctattgagataatcatgtggtttttgtcgttggttctgtttatgcgatggattacatttattgatttgcatatgttgaaacagccttgcgtcccagggatgaagccaacttgatcgtggaggataagctttttgatgtgctgctggattcggtttgccagtattttattgaggatttttgcactgatgttcatcagcgatattggtctaaaattctttttttgttgtgtctctgccaggctttggtatcaggatgatgttgacctcataaaatgagttagggaggattccctctttttctattgattggaatagtttcagaaggaatggtaccagctcctctttgtacctctggtagaattcggctatgaatctgtctggtcctggactttttttggttggtaggccattgattattgcctcaatttcagatcctgttattggtctattcagagattccacttcttcctggcttagtcttgggagggtgtatgtgtccaggaatttatccatttcttctagattttctagtttatttgcgtagaagtgtttatagtattctctgatggtagtttgtatttctgtgagattggtggtgatatcccctttatcattttgtattgcatctatttgattcttctctcttttcttctttattagtcttgctagcagtctatcaattttgctgatcttttcaaaaaaccagctcctggattcattgattttttgaagggttttttgtgtctctacctctttcagttctgctctgatcttagttatttcttgccttctgctagctgtcgaatttgcttgctcttgcttctctagttcttttaattgtgacattagggtgttgattttagatctttcctgctttcctgtgtgggtatttagtgctacaaatttccctctacacactgctttaaatgtgtcccagagatcctggtacgttgtgtctttgttctcattggtttcaaagaacatctttatttctgccttcatttcattatttacccagtagtcattcaggagcaggttgttcagtttccatgtagttgtgtgattttgaccaagtttcttaatcctgagttctaatttgattgcactgtggtctgagagacagtttgttgtgatttccattcttttacatttgctgaggagtgctttacttccaactatggggtcaattttggaataagtgccatgtggtgctgagaagaaggtatattctgttgatttggggtggagtgttctgtagatgtctattaggtctgcttggtgcagagctgagttcaagtcctggatatgcttgttaaccttctggctcattgatttgtctaatattgacagtggggtgttaaagtctcccattattattgtgtgggagtctaagtctctttgtaggtctctaaggacttcctttatgaatctaggtgctcctgtattggttgcatatatatttaggatagttagctcttcttgttgaattgatccatttaccgttacgtaatggccttgtctcttttgatctttgttggtttaaagtctgtttcatctgagatgaggattgcaatccctgcttttttttgctttccatttgcttggtagatcttcctccatccctttattttgagcctatgtgtgtctctgcacgtgagatgggtctcctgaatacagcacactgatgggtcttgactctatccaatttgccagtctgtgtcttttaattggggcatttagtccatttacatttaaggttaatattgttaggtgtgaatttgatcctgtcattatgatgttagctggttattttgcccattacttgatgcagtttcttcataggattgatggtctttacaatttggcatatttttgcagtggctggtaccggttgtttctttccatgtttagtgcttccttcaggagctcttgtaaggcaggcctggtgacaaaatctctcagcatttgcttgtctgtaaaggattttatttctccttcatttacgaagcttagtttggctgtatatgaaattctgggttgaaaattcttttctttaagaatgttgaatattggcccccactctcttctggcttgtagagtttctgctgagagatccgctgttagtctgatgggcttccctttgtgggtaagctgacctttctctctggctgcccttaacattttttccttcatttcaaccttggtgaatctgacaattatgtgtcttggggttgctcttctcgaggagtatctttgtggtgttctctgtatttccggaatttgaatgttggcctgccttgctaggttgggaaagttctcctggataatatcctgaagactgttttccaacttggtttcattctccccatcactttcaggtacactaatcaaacatagatttggtcttttcacatagtcccatatttcttggaggctttgttcatttctttttactctttttttctctaaacttctcttctcactttatttcattaatttgatcttcaatcactgataccctttcttccacttgaccaaatcggctattgaagcttgtgcaggcatcacgtagttcttgtgccatggttttcagctccatcaggtcatttaaggtcttctctacactgtttattctagttagccattcacctaatcttttttcaaggtttttagcttccttgtgatgggtttgaacatcctcctttagcttggagaagtttgttattaccgaccttcagaagcctacttctgtcaactcataatgtcattctctgtccagctttgttccattgctggcgaggagctgcaatcctttggagtagaagagccactctggtttttagaattttcagcttttctgctctggtttctccccatctttgtgattttgtctacctttcatctttgatgttggtgacctacagatggggttttggtgtggatgtccttttggttgatgttgatgctattcctttctgtttgttagttttccttctaacagtcaggtctctcagccgcaggtctgttggagtttgctggaggtccactccagaccctgcttgcctgggtatcaccagcggaggctgcagaacagcaaatattgctgcctgatccttcctctggaagctttgtcccagaggggcacccacctgtatgaggtgtctgctggcctctactgggaggtgtctcccagtacatgggggtcagggacccacttgaggaggcagtctgtccgttctcagagctcaaatgctgtgctgggagaaccactgctgtcttcagagctgtcagacaggaacatttaagtctgcagaagtttctgctgccttttgttcagctatgccctgccctcagaggtggagtctatagaggcagcaagccttggtgctgcagtgggctctgccctgtttgagctttctggccgctttgtttgcctactcaagactcagcaatggtggacgcccctccccctgccgggctgctgccttgcaggtcaatctcagactgctgcgctagcagtgagcaaggctctgtgggcgtgggacccgctgagccaggcgcaggatgtaatcttctggtgggccattagctaagaccattggaaaagtgcagtatttgagcaagagtgtcccatttttccaggtacagtctgtcatggcttctcttggctaggaaagggaaatcccctgacccttgtgtttctggggtgaggcgatgccccgccctgctttggctcaccctccctgggctgcacccactgtccaaccagtcccaatgagatgaaccaggtacctcagttggaaatgcagaaatcacccgtcttctctgtcaatcatgctggaagctgcagaccggagctgttcctattcggccatcttggaacggaccacttctctactctttttttttttttttgatacggactctcgctctgtcgccgaggctagagtgcagtggcgcaatctcggcccacttcaagctccacctcccgggttcacaccattctgcctcagcctcccgagtagctgggactacaggcgcccaccaccacgcctggctaattttttgtatttttagtagagacagggtttcaccatgttagccaggatggtctcgatctcctgaccttgtgatccgcccgtctcagcctcccaaagtgctgggattacaggcgtgacacttctctactctttaaaggccactctcaggtcctttccatgtgagttccatcttcatacctactatggtgcatttaatccttctagtgctccaaatctctgacttcctttctgcaaccaaccagagaaaactcagattttaaagggcacatgtgaataggttaggctgggcccactagcataatcctcccttcttaaagtcaactctgccagataacatgacctatcataggagtaatatgtcatattcacagggtcaaatatttgaaagacgtcttagaattctgcttaccacaaactgtctttttcccactgttttgaagtgctacctatgccaaaaacaaaatagtcatatatatgtgtatatatatgtatatgtgtataatatatatgtatatatatgtataatatatgtgtatatatgtataatatatatgtgtatatatatgtataatatatatgtgtatatatatgtatactatatatctatatatatatatctatatatatatatacacacacacacacacacacacccctatatatatatagtccggggtgagtcatatatatagtcatttctgggaagagtttatgtagaatcaatatttcttccttaattgttcattgaattgactaatgaaatcatcttggcctggggttttctttgtgaagagattttaaattacaaattccatttctttaatatatgtaagactattcagggtatctgtttctttttgagtaagcttaacatttttgtctttgtgcagactttgtccattttgtccaaggtgtctacattcatgacataaagtttttcacaaaattatgtgattatccttttgatatctggaatctgcagagatgtcacctctctctttcctgatatttgtaatatcttaatatcttttgtcttctcacatttttttccctgatcaatctggctaaacacttatcaatttgattgttttattgaagaaccagcttttagttccatttattttcttgattattttattggcttcaatttcattaattaattgcattaatttctggtgtgaactttatttcctgcctacttcagagttaactgctcttctctttctagtttcttgcaatggaaactgaaataattgattttgtaatgtaagtttttagcgttataaatttctctctaactactgctttggccctgtcccacaaagtctgatatcttggagtgtgacttgcttctttcacttagcataatgttttcagggttttttcatggtttagcatgtgccagtgcttcattactttttattgatgaataatatttcgttgcatgactttaccatgttttgtctttccattcatcaattggtggacattcagattgtttgcactctttgactattatgaataatattgctgtaaacactcatgtacaagttttttgtggacttatgtttctaattctcttgtctataggtggaattgctgggtaatatggtaactctgtatttaatattttagggaactgccaaacagttttccaaagttcctgtaccagtttataattctaacaacaagacatgagggttacagtttctccacatcttgtcaacactggttattgtttgtctttttttattatagccatcctagtgaagtagtatctcattgtggttttgattatatttccttgatgactaatgatgttgaacatcttttcacatgcttattggccatttgtacagattgaatatcccttatctgaaatgcttgagatgagaagtgtttaggatatgggattttttttggatttggaaatatttgcatatacataatgagatattttgggaatgggacccaagtctaaacacaaaatttacttatattttatatacacctcatacacatagcctgaaggtaactgcacaatatttttaattttgtgcatgaagaaagttttgactgcaacccattacatatagtcatgtgtgaaattttccacttgtagcatcatgttggcactcaaaaagctgaattttggaagatttcagattttatgtttttacattagggatactcaacctgtacatcttcttaagaagatatttagaaatgtctgttgcaatcctttgcccattttcaatcagattgtctttattattgatttgtaagagttctttatatattatggctagagatctttatcagacatatgatcttttcccattctttagattgtctttttactttcttgatggtgtcctttaaagcataaaagtgttagttttgatgaagtccaatttatttatttatttttgtcacttgtgcttttgatgtcatagttacaaaccattctgtaatctaaggtcacaaagatgtatttctctttcctactgagagttttatagttttagttgttacatttagggctatgatccattctgaatttatttcctatgtcatgtgaggtagtgatccagcttccttcttttgcacatgtatatccacttgtccaagttccagttgttgaatgtttattaattttattatctttgtcatttctgcatcagttttgactgatcagtttttctcctcatttgggttgtattttcttgcattgcatgcatgataattttttattggatagcttacattctgaattttaccttgtcagatgctggatatttttgtacttctataaatattattgagctgtgttatgggacacagttttgttatttggagacggtttgatactttctggtcttgcttctaggctgttagttggtaccagaatggcatttggtttagggctaattttactccaccaccaaggcaaaaacctctctgagttctctagttaccagtccccaacctttttggaaccagggaccggttttgtggaagacactttttccctggaccaggctgggggaatggtttggggatgattcaagcacattacatttattgtgtactttatttccattattattaaatgttaatatataatgaaataattatacaactcaccataatgtagaaaagtgggagggagccctgagcttcttttcctgcagctagacaatcccatctgagggtgatgggggacagtgacagatgatcaggcattagattatcataaggagcacgcaacctagatcccttgcatgctcagttcacaatatggtttgcactcctctgagaatctaatgctgccagtgatctgacaggcggtggagcttaggcagtaatgcaagcaatggggaatgcctgtaaatacagataaagcttcacttgcttgcctgctgctcacctcctgccgtgtgacacagtactggtgctgctctagtggatgcattgttggttgtgacgttctctggtggactggtagaaacagtgactattctcaattcagggattattccctctaattctttcagatgattccttcacccagcttctcaaaatttctcatacaattgtgctgatctgcacctagctgaaattcagggggtcccctctgcagatctctggagcgttctctcactcactacagctttctccttctacaactctgccctaccaaaaaccactgcggtagcctccccaaactatcacctctatctccttgattacaaatgcattgttttaatcaggtgtgttaacatggcaagcatggagacaactgcctttgaaagaagagctacttagaattcttgaaaggagggggcattgcacactaggcagggcctcatggggaagcacccagttggggaaggaggcagaaggagcacaggagagcatggcccagagccttcattgtggtccccatgggaaggaagggatgaggcagtttaggcagctgagcaggtttagttaggattggctggtatgaaaaattttggtgggctttgagctataggagtagttcctagatgtcttgtgtccagccctgaaataattcccagcaggatttagagtgatttagagtatttggcttgttgtgtgagagttttctaagggaggtggttggtgggtatggcctttggattggttgtttgctcaatatgaaagaaatgttcaccgtggaatcatttgctatctctaagaatttagctagtcatgggaggggcagcctctccccgacaagcaaggcctccaagatgtcaaagcatcataaaatgaagacaataaaaaacaattaatgcacttatcaactgagggagattaccaagctctgcttgtacttctccttcttgcactgtagcctgaaaacttttcaaatgataagctgagacaatcataagactcctctcattcgtttctcttttctcagggattgctgtctttttgttgcccaatatccagtgtcttgaaaacttttttcttcatgtattttatctttttttttttttttagttgtttcaggattttaggtaggagggtaaatccagtccctcttactccatcttgttcagaagtagaactatggaaaatcatttccatttgaaattaaaattcagttgagatttttgggaaccaataacagtttaaacaggtttggcttctatatcgataattcagcagtctttattaacagattggagtgttagagcaaggtagcgaaaagacagagcatctaagccaagacaaaggatgggtgggaagacttcaagtagacagaatgccatgaacaaaatggctgaggatgcaaattttatgtgtttagaggataagtagctcacattcactggaaagcatgagtctttaaatgaagccaagcttcaacataggttgggatcagattttgtagagaaggctaatgggagttataaagaaaatgagaatttctctttcaataaaatctgtcttttcctcatggtgttccccaaacttttttttctcctaagcccccactaatattcatttttcattccttcaccttctcctaatatctaatccatttcttagctctgtaaggtcggccttatttgtagctctagaaagaacttcactgctcagtaaggtagacattagccatatgtggctatttaaatgtaaatgaattaaataaaattgaaatttcagttccttattgccctggccacatttcaggtgttcaagaggcacatctagccaagggcctttgtattggttggatagcacagggaacatttccaccatcacagaaagttatattgcatagcactactctagaatgtgctcagaggcaaaattttaaatttcatatgcggtataactatgtgaaaactaagacttaacaataaaattttaaagatttaaatgaagtcatcaaaatagtaatattgattatttttcactaagttcttgctaatcatttcttctactcatataatttctgcattttatatacagagcacatgtttatagtaggaaaaattatgtctttgatcatttattctttttcatactataagcactttaagtctcattctctcccccactagacaatataatagtattctaactagtctcttagaaaataatacaaattgaaaaagagaaaggctatagaagaaaaatgacagaggattagtctaagagagccaataccctactagtaggagttccagaaagaggggatggagaaaacaggggaagaaattaccaaagaaataataaaagaaaattttccagaaagaaagttggtaagtccaaacagtgaatgggcccactggatttccagtctaattaaggaatagaagacttgtattagggcatattcctatgaaacttcaggattctagagctaagacagctgagtttgaggataaggagatgggataggggcaggacaaagggaagtagtcacattccaagaaactaaaattgaaatcataaaccttggatgctggaagataataaacttgagggtaagcccctttcagcttaaaattctatatacagccaaactatgtgattcatgtgggaaaagaaacaaaaattagacatgtaaacatctataaaaattcctgtgtatctttttattagttactggaaaatgtgcttcagtaaagtaagggaataaaccaagaatgagaaagtcatgaacagaatccataaaacagggaatccagtccagagaagtggcaaagggaagtccaaggatgacagctatgcagcaggcctggagagcaacccgtccaagattggatcaaaagaatggaaggctctgtggggggagggacagaataaatgaattattggatgtgtttgtacatttgggaataaaatctgatgcatttttgaagaaagaattttcattgtctactcatgagaaaagaaaatcaagtaaaggcaacaaataattctaggaaagacaaaatgatgtacaaagaaagaaactataacctatttgaaagggaggcagggaagtgagaggagaagaaaggacaggcagatcacctgggattccatcaaccagagataacgtgttattattttattgtttatcttttcaaataaatctgtaccatacacataatgtatctttacaatagtgggatcatactgtactatttcatggtttgttttttgtcagttactattatttttaaatatgtatttgacattatatattctgcaggataatttttaataggttatagaataattaatttagtgaatagaccataatgtattaatcaaatctctgttgctttaatttagttggtccttataaattccctgaaatatagtaaaacaaagacagttctgattttggaaccgggacttagagtcttatagtccagcttcttagtatataactgcgactaaatatcctgttctgatttaggagattaggccaagaaaatgcagaatatttactcctatatgtactcatgctaatatcacagacagacaagaatgattaaagtgctactttttaggattatatcatggctatatttaagggagcatctcctaccctattctctgtctagagtgctgctaacccaagtatctgcatggtccattttctcatttcattcaagttcttctctgttcacacatccccttatcagggaggtcttttcagtgaattttacataaaataggccacctctgtcactgcacagacttatctcctaagctgattttatttttctccatagcactttctcaccatctatcatcccaacactaaaatataagctcaagaatagtgtttctgtcttgtttgttgctccatctccagcgcctaaaataaggcctggcataaagtaagtaggtgctcagtcatctttgaatgaataaacaaatgaatgagttaattaactgggacttagaaaacaataggaacaacccaagaaggcagtgaagggaaattctaagtcgacagtggtccaggttagagcagaaggtctcagggtcctggaaaggaggtctccaggaagaattgactcagaaaaatattgagtagagttaagagggaaaaaaaggtaactgtaacgaaaacaaatgttggaggacagagaatggaagtgtaagagtggaagtgtggttctagataccacttggctcagcagtgaacaatattcagaagtaaaggtgtaagtatattatttaagtaagaatagaataattcaaaataagatataaacatgttgagaagatggcaggaaggaatggtagggctgtaaaagggagctaaatcctcatctttcatagcaactcagcaagggtaatcaataagttatcaagaaatgacaagatgatcgtaagtgtttagaggtttgaagataactggtggaaggacagctaaaagagttcagagaggcttcctctaggaaacgggtctagaaatgggaaatgatggaaaagaaaactatggtttggcactacaaccatttctgtgatatttgatatgaaactatatatgtgtatgtgtgttaccttgataaaactttaaacaaggaaagcagaggcaaaatgtaaaaattaataatctgggagctgggtgcggtggctcatgcctgtaatcccagcactttgagaggccaaggcaggcggatcttctgaggtcaggagttcaagaccagcctgaccaacatggtgaaaccctgtctctactaaaaatacaaaattagcggagtgtggtggcgcatgcctgtaatcccagctactctggaggctgaggcaggagaattgcttgaacctgggaggtggccgtgagccacgatcgtgccattgccctccagcccgggcaacaaagagcgaaactccatctcaaaaaataataataatctggaactaaaattccagatggttgaagcaacagggatggaggcaggatgggaggaaggcatggggaaagtgcaagtatgctaaggtcatgccttgtttagatgagtaattccagacagcaagagaaaataaaaagtaagtttgcagtttttaggtaaggctaaccactagataaataaaaatggaatttatactttcagattgttaatgaaaagaaatttgttaaatcctgggtggggaggaaaattcatcattcacactaaagataagaggcagaaataacaagaaagcgtagggtatataaagcaagatgactggcgtcagaccaaatagctttgatctcaatatatgtgaatatgtttagtccttctatttaagaaacagagactttcaaactgcatttttaaagaagtccacttacatgatttcaagagacatacttgaaacaaaatgacaaaagattgaaaatgaagggaaggacagatgctggcaaaaaagaaagcaagataagaataataataccagccaaaatggaattcagggtacaaagcattgaatgaaaattttcttaccagtacaagaaagccacataaactcatgttatctctggcgttcttcctctttcctaggtatttgacatcttgaaagtgagcatcactttgcttattttgcagccagtgtaatgggactaaccctattgaaaactcctggagaactttaaacgtatttttaaagataaataatccttttagttgtttcctttaaaaaaaaaaaagccagtatattttcatgttagtaactgtttgcattttcttggtatacatgatttattggtaacaatttgtacttctaagccttaaatcgaaatagcacatattggtctggtaaaattgcacacatcatctgctgtggtatctgacattgggctgtggcactgttaaacttttgctatggagaagccagatgaggttggaagaaggttcttttaaatgaaatgctcttgtttccagagactgtgtgcatgttgcctgactcacattcctctgttggcctcaccagtatctctcatcagatagcacgtgccaaaagaaaggaggaacatgaatttactaaaattaatttgaaatttgtgtttgttctatatattctaaatgtttgactttttattttttaaatgtagctaatgctgcctaccttgggggccaagaaatgatggaggtggtgaagagagatgacgaaaccataaaggagcatttatgtaaggtaatcactttagtgctgcaaggggatagataataagtagatgggcagagatacgagggcaaaggactagaactagttagaatctgtaagactttaagggttggtagaatgacatagagttctacttccagttaaaattgaaattatccctgaaagttgtgtagagagtagtaaagctaattgcataataacttatttttttatcacctgtttttgttgaattaattttagaatcaatacttttctattttgtcaatgcattttagcctctctaggccttctactgagaaaactccataatatttatagaataaataatgttggaatataaatgaaacagtggaaaatacattatatgttatatgatctcatgactagtgagcctttcttattctctaatgtgttagagtaggaatgtcctgctctgaccctaagaccagttttgtgaaatattcaacatttgggagttatgctgcaaatactagaatcttgcacacacacatctggaagcaccaatctctgaaactataagagtagggtttagtatatgtctaaggtcaccctagaatttggatgactgtggtactcctgtggcatcatttgtctggctgtccgttctgagtaggacagaactgtactaatattatagccactagccacatgtggttatttgtggctagccttaattgagttgtgccataagtgtaaaacacacattggatttcaaaagtttagttcccccagaagcaaagtatttcattaatttttatattgattacctgttgaaatactaccttagatatagtggattaagtaaaacatattattaaaagtaatttcacccattcctttataattttttaaacattgtaactaggaaattctaaaattgcatatgtaccttgctttatgcttctgttggacagcattagtcttaaactttacaattggtgctgaactatgatacctgctgaaatgatccctgctgagtggcaaactctcataggactcaggagcaatccacaagtgaaatacgagataacccactggacttagaatgtctttataaaccttgatacatttgacttaaacttttctacattgttaattcttaattccataacctcccagtacaattatcttaaaacgagaagtgtatatgttcttaaaattttttttttagaatattgaaaatattcacccagagaggacttttgaaaatgccagtgttgttttgtctcatggccatagtggtcatcatatttctgaaatagcagttggctagagattgaaatttggaaaccagaaggaagccctcactagccgaagggagagtgctggggcctcaggagggccccctctccagggctttcagctacttccagtcactgagcgatgtgaaaatacaagaaaaacagtattttattttccatttaaactgtaagtgaatctgtttcaaaaatgcatttaagttcttccaggttgggagttcataaaaacagctcaactctcagttaataataagactggcagatgctcacttccaaaattcacacttgctgaacaactagacccatcatgtgtcagagtctgctttaccacctgtggaagccagctgctgtaaaatactcatcatttctggattcagcttgtgtgttgtgctcagaaaaaggtcaaagaaaggtgctaacttattcctgtcccaagtgaaatccatatgcaagtgtaatcattcccagatagagggctgttcatggtaattatgtcaggactgtaagtttactgaaattttatggggaaatacgggggtgtaatggtaaatggtagacatttcaaggttagtattaacacacagtcacaggaataaactttttcaactccaggcaatagttttgtttttgagatagcattaaatatacttctagaatatggggaaacaaagcattgtttcatttaatcatgcaaaactaccttgcagttaattcattatcctttctaccagcaaaattcaagctctccactagaataatacaattacagctcctaagtgaaactaggtacagagagacaggaagtttattgcaactttttgtttctgtaataaaaagaggaaacatgctgtaatttaatattggtagaagttgaatcaacatatgtcccagtctgcttgagaaaataaggaaacttaaaagtgcacatagttctaggaagatagtgggcattgcttcctgccttccaaacacccccgataactggtcaaactaaaaccaatgcccgggattagaaatattcctatttaggtatcttaatcgaggatactctttcccatttccacccaaacaaaggcgttcagaaacttcagaactatccaggactgtccagtgtgaatagtcatcaagccacacattttgttgaaaaatcatttcctgtatctcagctattcaactaaaaatagttctgaaaaatatatctttgtgccatccagccagaatgccacaggaaagttagtctaaaaataagctttctactgtatcatgcagacagcattctacttctttctcctccccaagagaactatcataccataatctacaggctttggttctaaatccaaattttctaccactggatttccatttgacacaagaagagagctttttatatgcttgaggaaaatgggcatttttagctctaaaagatctgttgagctgattatcctccttctgaggtccagtgactttatacacagtattggacataaagtaatttattttattaaaataatttttctttcctggagcaaatataacagactcatggttgtttccaaaggagtataccatggtttatggcatcataggttatttctttttcctttttttgtttttttgagacagagtcttgcactgtcgcccaggctagagtgcagtggcacgatctcggctcactgcaacctccacttcccgggttcaagcgattttcttgcctcagcctcccgagtagctgggattacaggtacccgccaccatacccagctaatttttactagagacagggtttcaccatgttggtcaggctggtctcaaactcctgaccttgtgatttaccggcctcggcctcccaaggtgctgggattacaggcatgagccactgcgcccggcctataggttattttgtcatttgactaaatcctgcttgtctagtgtcatccccaagaggccttcccagtccttggttttggttagatgttactccctatgtaaagttatattgcatttatcacacagtatttaaacaatcaaccttcacctttccccacgttgaggtaaggagctgtgtcttcttcgtcttgatgtcccctagggcctagcataattcatacctggtaaacagtcagtaaatatgtgctagacagatggatagatggggacgccattaactagagtgtggattctaaaccttttttgtgccatgcatctctttcgctctctcataaagcttttggattctactcacaatgatgttaagtgcataaaatacacaagattacaaaagaaagaagttgttggataatgagatataatagcagtcagaatttttttttaatttgtaatgataagtataatgttttagttaccttgagcaagttagtgtgatttaaaaatacttatcatttttatagatgacaaaatataggcattactaatattgtagcttgttgcctgtattcctaattgaaagaaatactaaattttggttagagattaacaaaagtaaacatgtaaatttttccaaagtttacataaccccttctccaaacctctggacctgtacaccgcaagcaaagaagccctgcgttagagaaactagaaaaggttaggtagcatgatgttgtggcttaggcactggcctgagaacaaaaagtcatgatatgccacactgaagagactgttttggggagctattgaagggtctaagcatgggagtaacagggtgacagtcaaaacatttgacaaccatgtgatatagggattgaccaatcagaatgtatgccagctatgaacagccagttcaggggcaccagttcatatcagttagccctaggaatttggtgagattaacaaatgagagggattatcttgagggcaaatgtgtggtataatactagaaaaggatgaaatatgagttggggagcctgtttacaaagcttttataagaactaaggcattgggattgaagatggaaagatttaggagatagaatcaaaggtactgagtactaacaggatattggggaatggagatggaggaatctaagattatttctttgtatctggacttggtaataagacagggaatatgggaagagaagcagcagcaagttatgggagatggctgaacaagtggttcattttggtacttgtatttgagatgccagtgggacatgcaagtggatccgtgtctggcaggccctggatgtatgggtgtaaagcttagaaagatatttgaggctgacttttggttggggagtgatgaggctgtagttaaagccaagagcatgggtaatagcagcctaaagaagtatacagaataaggagagaagacttctaatgattgatcattagggaacccagcttaagggttgggaggaagacgaggagccactgaatgaataagatgggaggggaggtaagaagggtgggaaggagaaccaggatgaaataaaccaagggaagagaatcaactgtgcgttttcgccaccccaatcccagtttgtctggaaacctctggagtattctctgtttcatgaggcacctggtgtgtcagaggcaaataagaggtcagcactcccttgttctgtcactgttctaagccataagggatgcatgtctcattcattgaaaagtgaactcatgtttggtttataaacttgaagttttcatttcaaacccacttagggggggaattctaaactgccatgaccacgtttggcccaggcttacggaaacagctggtgtgtgctactgccagactgaatctgagcatcactatcagtaagtaggaatctgaaattgctccaaagagaacacatgaagtgcagctttcagatgaagttaggcagtggtaggggggctgcctgtaaggtggtgctgcccctgcccccagagggccaggccagggctacagtgtggcttgggaaaggggcaagtgtcctcaagaacaggaactcctctgctattgctctctccccatccctcttagcctgccttagcccaaaggtgtgtgttgcctttgggagcaaaccttgtgcagttgtttgcagattggggcatgcaaatccttctgacatgcacatgtcctgcctgctgcagcataggaaatgctccctggaccagctcaccaggcctgcctttccgccaagcctcggtattctgaaacggattgtgttagttctgcctgtttaatttaaagcctgtccagaatgtcataatcatcctgaaaatagataggtttgtttttatctcaatattgtgaccttgaaagctttatttgggcaattgtgtgagcacactctggggttctgcagtggagcctggtgactgaggggaggcaaacgtgctggagagctgggctcccagagtctcagccaagcttcaaacaccaaatccacccttgttcatgaccctgcttaagttaccggacctcactgtgcctcctttattcatcaataaaatggttaataatagtatgtagcctcatacagctattccaaaaatatgctataattcataccttgtaattcagaccttataagagtatctccgccgggcacggtggctcatgcctgtaatcccagcactttgggaggccgaggcgggtggatcatgaggtcaggagttcgagaccagcctggccaacatggtgaaaccccgtctccactaaaaatacaaatattagccgggcatggtggtgcatgcctatagtcccagctactcgggaggctgaggcagaattgcttgaacccaggagggggaggttgcagtgagccaagatcatgctactgcactccagcctgggcaacagagcgagactccgtctcaaaaaaaaaaaaaaaagaaagagtgtctggaatgcactaagcattcaataaatgtttttattactattacaaagttagttatagcctagttatgcttctaagcactttaaaaagactatttgcctaactgttcctcttctcacatccccttttcagatactttcattgtgttaatgaaaggtattagtgatgctgagtatgtggccaagagaccccggaatgcccaatgccattctaaacaacagccaccactccccataagatgcctcaaggagctgttgtataggaaccataatgaggggaaaacacaatagtacttgatttttaccaaggcttgggcccattattctagtccagagaagtctgatgaactggacttagcccttctctcagttagttgagtaaaaccattccagtacatttgcccccttcttggggcacagatccagggaaggacagaaacacagaaggagactggcgctcagggcctcttactttgccagagggcctcgccagaggaaagcagaggccctgggttagcatctcagtgcagtctcacgtgagaaagagacaagccagtcacttgatggcctcgtggcttgtatgtgggagggagaggatcctggccctttacatgttagccacacggaaaggagagtgctgctctgcacaccgctgtatacacagatggttgttccagctactggagagtgagccacacagtgccccataggacctactcctcctttggcgctcccattcccaccgctcccctctgtgcctgcagagagaagcagggttcacgggcgggaagcatttgtgttttcacctccatcctcagccactttttaaaaatctttggagatttcagttctcattttctcaagaatggtaattgagccagttaggaataaacggaagagaggaaacaaggtaactggaaaaactgaagtccctaaaccatctccctttctttagcaattctgcaagtccctaaaaacagaggctcagaaagactgcagtgaaatgttgacactttgcagctgcctgtgtccccaacagggataagattttttaagtaactgaaaggagatgcttatatcacagaatcggtttcctttaacattgcaagattggggcttacatgtctttgactctgaggggaggggagaagtggaagcctgctgctgtcatccagactgtctggactctccccagaaatgggcatgcattggaggacctaacagtttatatcccgagcccgggaaagcttcaaggggatgaaaacaggagataaaggcagggtaggggccctagctgggaagtagggggcctgtatgtgtaggtactaatttgatcccttggtattcaaccgactgctttatatctgaccttttgcttttttcacaaacaatgaaacaagcaaaaaacctgctctagtgcaaattatttcaaagaaggaaagaaaacctggagaaagcaggaatgacatatttttcttagacctctggaagaaaggccaagaagatagatctctctcagaatctgtgtcactcctctttggtcactgtctctagtgctggcttcctggttgccctgccatgcagcgtaagctgccagggagctacagctgttgatgaagtgctaacagaaagccttgcattgctcagaaaagcggtgggcattaccttcactgctgcaagaacccacaggctcaccctgtgagctcaccaggaagaaaagtaactcccagaatgtcggtgcctttcttcatttggaagatgctcaaccaaggatagccaaagggcactatagcttaggctccaggtctcctttatgaggaaaagtaggttttattataaaagtggaagtatagaatccacaccaagagctgactgttagtggcggcttgaggatagggatgtgcttcactgtttatttggttggcgacttatcttctaccccacctgtctttctctacagtcatgtctggggaatatgacatgtacattttttagataatgagtaagtatatggtaaaacaactttgttttatattttaaaaaatgtttaatacttatacattttctgagcctatgtcaaaaacaacttatcagaatagaatatattttctcaaaggctaatgtaaggtcatgtggattctttttccttgagcagggcacagctcccacccacccagcccaccattgcccagtctgtgtcgaggagctccctttgtcctcacctgtaaagcagcagcctttaagagtgcccaccatgtggaaagcacttgatacactttgttttccagtcctcagcactagcccacaggtaactagttctgtcttactttacagatgagtaaacaggcacagggaagctaagtaactggtccaggctcacagcaccaataaatggcagaaccaagattccagtccaggtggatatggctcagggacctgtacagtcttaacactgtactcactgcactacgctcttcttggctgcataaggagcttgagtagtttcacaaattactttagaataatataaatacaattattttaccacactgtgatataaagacattatgagaagccctttcactctcagcatgacacccccagaaatgccgtttaccaccctgctcaggcctgcactatatcacaaaacaggcaccccacaaattgactacccaaagtagtctgtgccaaaggctcatcaagctggatttctcgttggaaacatttcaagttgtattgatgagatatcgtttgtaccaaacttgacttcgtggtgaattatgatttaaagagcttctaaaattcagtttatccataaggttaacaccaacaacaaatatatatatgcaaaaatatatagagatgcaaaactttcattttattagcccttttattcctgtaatgcctgtagtcctactgtcctattgaatagacagataattcagatagagatttttatgtgtggcttttaaaattgttattattttaagatgttgctatgtcattgaaagtgagttttgttattagctaaatcataagatgcttctaatatttctttgttcttactataaatcctctattagtaatgcataaaagcatgcaactccaaatgtatactaaaacaaagctttgttcatgttcactccctcagggcagaatttgggttttcctgctttggggtcccgtagggctttgtccatacctctgtctgcctgttgtatttaagagccagtttatataggtctgttctctcgcctagtctgtgagctgttccagggcagagaccatcttacacacttctgaatgtcagccacttagcctagtaccagatatgggatggaatcagagtcatttttggtggaactcattttaatctatcagcttcagcaattcactgtccaacagtgctgtttgtagaccccccaaaaagtggggaaaaaaaaacacacagaagaaaagacagatgtggggacaagctgcagcaacctgcagggatattttaggagggccctgtccccttaggtgcacattaaacagttaaagggaagttcatctataagcccagagaccatagtaaccataaatccactttcctgcagaaaacacaggaggaaaagccaaagcatggttctggagaatcaaaatctagactgaaaaaaagttaaattttgtgcttaatagaaaacaatgggttacttaacatgacaatttggaaacagaaaaatttctatctcaataatgtatactttttatcaactctcatgagttccaaaacaagtgctaaggataaataaactacaggaaataatttattttcttctaaacctttgaatgtaaacatcctgctgattgcctgcgattctttgttaacaattccagtactttcatggcagttatcacccccatgacacacagtgcctcagaagagctacatagactgtgagaaggctttcagtaaaggtagttgggaaggctgggtgctgtggctcacgcctgtaatttcagtactttgtgagggtgaggtgggtggatcacttgagcccaggagttggagaccagcctgggaaacatagggagacttcgtctctacaaaaaaaaattaaaaattagctgagcatggtggcatgcgcttgtgattccagctaccctggaagctgatgtgcgaaggtcacttgagctcgggaggtcaaggctccagtaagctgagatcacaccactgcactctagactgggcccagagtaagactgtctcagaataaaaaagtaaataaaaataaaggtggctgtgttagctcctgttgacaactctcacactctattagttttcatatccagtttaagacctgccagttgtcaggttttatgtttttataacgggtctatttactggaattgtaagtagtagcaaaaggtacaagttaggaatgttgtctgtggatttgtagcccagctcttcaatgcaaaattgcttgaaataagcaggttaatcttgctaagcctcaatttccttttctgtaaaatatagatacaatactttccttagagtattgttgtgaggatacaacgagataatacatagaaagtgcttacttagcacagagcctggccattgctctcggcccattggttcatcatggtgcattgcgattcatttttgcataccgataaataaagagtatgcactgttaaccactatgtttttggtgtccagttgtttctctttctttctacttcacccctcctcccccatcccccgccagtgccaccacacactccatactttctcattttcctgttcagggctgcaggtgcggagttctccggtcagatctattgcctgtgatttataatttatagggaaaaggaagtatctcaagccagtgtatgtaaaggcattagataaccatgtgttttacttgtaagccaagactttcataggaagccctttagagaatatatagcctgaaaaagaacttgtaaaagaaaacaaaattttacaaaacgtgagcccacccccatcatcagttaggcgtttaaccaaatggggcccacttcaaacgtttaaggattgtagagaatcgagaaataaaatcagataagcatacgggaggtctagactcctcactgttctgctgtcttgaacactgacaccactctttgttgaggttcctagcacatgccttggacagtgtgtgccccataattacttggacatatttgtctcttgataccctgaggtgggtgtcgggtcccttaatccatgttgatcacccctgctcaaatcactgccttaactgcatgtacggggatggtgtttgctcagtgctgagggcttatcaagctggacttctcattggaaacatttcaagttgtaattgcatcacagaaaagtaaatggtacgttcttcatggaaacagtctttgaaatgtcagacagaaagcaacagcggtgcgtacagtgacgcttttcttgttgaggaaactgtattagatgaggtcttttctgtctggctttcctttgagctgactgccattatcataggacttcacactgtagcttgtactggagtgagggtcctagagtagctttctcagggtccagtgatcttgaggcgagagcatgccctgcagcagaggaacagacctgacaggtatgaacccaagtctgactttccagatttctcagcagtgttccctgctctgaggaagtgctgagtaactgcatagcgactgttccctatcctattccctgaatacaatcgaaaagattgctggtggtaaatatagggagtagcttagagagagcctaatgttatcagcactattggtagataattaatacctgcaaatagtttgtactcttgacagtatttcaaggcaaagctatagcagggtagttgctgagagatccggggaaacgtgtttttctactagtggaaagaatagtctcccactggttgtgaggttgcagcattttagagctacagaaagagctgagaccaggaggaagaactaggcaactgctaggctctcatattctctaggaagcaaaagaagttcttactctgctaagaaccatggcaaaatgaattctggctttaggggctttggaatgcccagaaatggttggagtgaggaaaagtaggagaatgcaaagaatgaattaagtgataaatctgtaagttgcaggtcctctgcagcgtgcaaaactggaaccccaggtaacaaccaagaaaacctccatgaagctggaatactatgcagtcataaaaaaggatgagttcatgtcctttgcagggacatggatgaagctggaaaccatcattctcagcaaactgacacaggaacagaaaaccagacatggcatgttctcactcataagtgggagttgaacaatgagaacacatggacacagggaggggaacatcacacaccggggcctgttaggggatggggggtaggggagggatagcattaggagaaatacctaatgtagatgacgggttgatgggtacagcaaaccaccgtggcacgtgtatacctatgtaacaaacctgcacactctgcacatgtcccagaatttgaagtataattaaaaaaaaaaaaaaaaaaaaaaaaaggaaacctccatgaagcaattcagagtaagtctgccacttgaggtttacttgttcataatttactctctggagtactatgttaaattttttcctctataaagtgtttttaactaaccatctaaatattggttaaggcatcatgttattgtaatgaaggccattgttttcgtaagatcagtctcatctgtcccatattcaggtcatggatttaataattgatacactcaaactatccagtgagcaataacgcctgcttccctgcactctcctcccccagcacttgatcacctccaatccttcttctcgttgtggccagagtggttttcctgacatagggacctcagcatgtcacttcactgtgcagtcttttttgccttgtggacttcgggataaagcgcaacctccttggcatgcatagaagatgctgtccatgacctcatccctctctgcctctccagtcttatctcccaccaccctatattccagccatgtggaattccagttccccacacatgccatgctctttcaagctttggtttgcttggtcttctccccacagtgtgctgccccagcttgaagactcaactgaggcatcaactctggggaatctttcctgcctactacttctgaccagctgcacctcacctgagctctcaaattgtcttgtatacatggggtccccttctcccctccccccaagactgtcttatctctattttccaggttcctaatacaaagtaggtgctccatttgtatttgatgaacaaaggaatgagtaagcaattcagtgtctgaatgaaggagcacatttggtatattagggaagctgcaagtgactacagctggccaactaggggctggagctaggcatagctctgtctttcagtgataacagaggtcaaaggatccttaagatttagttcttggtttttgtagaaattgccactatctgttcttctgaatataagatgttgctttgttgcctttatttttagaactaacagaactagaacatagcagtttttcagtgaaacacagcagcctagagcaatatacatatatatcacatgcaggtttaggtagatatccattcagggtcttagtaatgccacagaggaggctctgtctccattcagctgcttgctgtcaattgaagtatgattattgcacttccccactgaatcaacatacaggctgcatagagccttttcttagaaaggtcataaactctctcaggattctgatcacatttcatcagctacattggaaagcctgagtctatctgatctgtgtttgtattcattcaacaaatacatcccatatgactaccatgtggctatttggaaacaactaagtttattaactggtcactagtcattcagtgactatgtctcaataactgtcttcgtcatcctcaccggccttcattccagtgtccatcccaaccttagtacacaaaactttcctggtaagtcgtttcagtgaattatgagtgatctatcacacaagagtctcccagcatggggatcttcccaccaaattcttctaagtgcactcctgtacatcgtgaagccttgctgccttgagagagccacactctggagagagcttagggactagctcccagggtcaggcgtaggtgctgtcctcagagcactgccggctgctggtgtcatatctgtgtcaggaagggaacgtgttttctaataaaaggtttttgtcttgtctttcagcttacattttattatggtactatagatccttggtgtccaaaagagtactatgaagacattaagaaggattttccagaaggagacattcgactctgtgagaaaaacatacctcatgctttcatcacccattttaaccaggaaatggcagacatgattgctgactccctaaaggatgacttgtccaaaatgtaaattggcctgaggaacaagcccccactgccagtacatggaggcagtcagtgtactagacttagtaggtaaatgtttaattttgaagactgatattagaaatgaagaaagtgagaacctttgtcttacaaaccaactctccgctcgccatgttataggctgaagtaaacacagttgatgaatcattccataggtttaaccatacattttccaagactcagggaacacagtgatctacacagagtcttgtgtttgcacaagatgcccagtggcaccatatggtttattttggtaggcaggatctttgcagatgaaaaaaaaatctacatgtacttgattttaattgagttacattgtagaataggctcctctggaggaaattatgaaatacctactagaaaatgtaaaataaatcagtgaatgttaagagtatagttagatatgtgaagtgtatgagattatgacaaggatacactcatgttccaggagcaggaagtgaacctgggtctcctgtaagacagaagatgaagatgagcccaggctaacttagcacagatcttggctgagatcatcaatgtgacgtctaatgtacctgcactagacagagaataaagttcaccagacattactctggtcagctaaccagataaagaattgttgaaggaccccaactgtgcctcctgccacaggacaaccagcaagttctatgctgagccttagcctcccaggttataagctccctgcaggctcctcctctccagagccaggatggagaggcactgggctgtcccaaagcaggcttggatgtgccaacgtacagttgctccttctgtaattcttgcactaaaactccattaaagaccatcaatgagccaaatagtgtgctagccattgaggatggagttcttagctacttaatgattcttttcttctggaaatcttctagtgaataatttttaaaagcttcttttaaactgctcagtaaaacattgccatacattaactctccatttctgcattaacttcatttgctggaaagaaattattttgttaatgaaccaaacccagccattaagttatgtgaattcaccttctctagacacattgaggtatggcagagaagacacatattccctggcctagagtgggctgacaatattgctgcctcccctaaattgactcaatcttgagaaccacatactgcagtgacagttgatcatggatcagaaatattcctttttctcctagaggaaatccctcatggcattatcattccctaaggacaatgagatgtccctccgctcaaatcctaaagccccctgatgaaagatttggctctgatttgctgccaacttattggtaagtgctgaatgagttactgtgctttggcatagcttctacatcacagcaagtgacttctcagaggggaaaagccaagctccagacaaggagtgctgttagcccaaggggaagagctaatagatacataggccgtaagcacagggctgtacacagatcctttattggcatctgcatgagaggcctagaaatcggatgttagaagctaggaatcatggctctgagcgccttgcatacaggagatactcactgatactaaatcaaggcatgtaaacaatactgggtaaatcatacctaccagaataaagagtaacattcagagcttttcttttatctgttattttaaatgttactccatatttcaaaagtctgcacgtatgaaattgtgtcttatttctggtttttagagcctaagaaagatactcattcttaattcctatttatcatctgaaaaccaaatgaatttttgaaataaatgttttaccagcatttctgacctggtctggcctgatctctgtgttgggcaagagagggtacaatttgagcagttctcctgagttagactcggctcaaagtctctcttttaaagtgaaaagccacctttctcattgcttttttcataggtggaagaatcagatttcaagagactgaagttcattctgtttcattagggattagactaaaatggacaaacagtggaagaaatccattttccagaagcagctctgcctgtatgtcccagtcaaccacatggatggtctttgtgaaagttttaacttcctgcagagttaccgagtgctcagcgattgagctttgaccacacccgtgtttgttcctagtctgttcccagccataagcatctccacaagccctctgtggcttgtgtggcctgatgtccatggccaccaagggcctctcaccatacgcttctccactcaacctttggagagacacggaccaccaaaggcttgatttttcttcatcctacattatattcaaaacaaacaggctgggtgccgtagctcacacctgtgatcccagcaccttgggaggatgagctgggaagatcgtttgaggctaggagtttgagaccagcccgtgcaaaaaacgagacctcgtgtctaaaataatttttaaaaaagagcaaaaaaaaaaagcaatttcagattaaaggagactgaagagacatgacaattggacacaacatctgattctgaattggatgtttttgttataaaagacattgttgagacaatttgcacaacttgaatgaggtctgaagattagctgggagtaagatgccactgttaattttctgatttcagtggttgtactgggaagaagtaagagagtgtccttgtttgtactggagacactgaggtatctgggggtgaggggcatcatgtctgtttactgtcagatggttgaggggaaaataatgttctttgtacttgcagattttttggaagtttgagatgttttagaatttgtaaaaataattatttttaaaacccca

SEQ ID NO: 15655 - DNA, 139071 bp, Homo sapiens
acctgaggggggcacttccggtctcgtgccgccttcccaggaccctcagggagagcgggcagccttccaggtggacaggtgaggtacagcttgccgagctcagggtgactgcccaaaggaaggacgggtgggcaggcacgcgggatctggcgccccttcttctctatggttcctcgcagagcccctgttgccctgggccagatggcccgtagcagcaaaaataatactgttccgacagctcgcgagttcggagccacttggcctgggagtcccttgagttgcaggccgggcagtcgctcacccgagcgcggtaatgcagcatttgaacccctaagtgtagcccacctgtagggagtcttatggtgcccccgcggaggagtagaggccaaaaagttgggcagctggccgggaagaactcgctaggaggggtcaaactctgggccgggagtgttctttgcccccggcgtttagtgctcacgccgccttttattcacgctgaagaccttaaccgtaaaccctcatccttgggtcttagtttggttttgttccccacgcaagacagaatgcagattggaacactttattccttggttaattcgtatcttccctcgcaagtagttaccggacacctgctttgtgtcctgtgtaccaaacacaagagttgatagtcctggccgggcgccgtggctcacgcctgtaatcccagcactttgggaccccgaggcgggcggatcaggaggtcaggagatcgagaccatcctggctaacacggtgaaaccccatctttactaaaaatacaaaaataaatacataaataaataaattagccgggcgtggtggcgggcgcctgtagtcccagctactcgggagactgaagcaggagaatggcgtgaacccgggaggtggagcttgcagtgagccgagatggcgccactgcactctagcctgggcgacaaagtgagactcagtctcaaaaaaaaaaaaagagttgatagtccttgagttgaaagaacaaatctgtatggagaaagagatacaaccaaaagaaacccagaagatttagaagcatctccagaatgtttattctcaaaagctgttttttaattaaacttctttctgaaactatacgtaggagtgtctcttgtgtgtttccccatttttccacctgaaggttaaagacttagaaacctgctaaggcccctctttccagcatgtagcattctagggggataatcagggcaacacagtgggtgcccatctaaaattttatattttaatattttgctttttgataacttaatgccttcagactggaggattttttctttcttttttttaatttttttaaaattatactttaagttctagggtacatatgcacaacgtgcaggtttgttacatatgtatacatgtgccatgttggtgtgctgcacccattaacttgtcatttacattaggtatatctcctaatgctatccctccccactcaccccaccccacaacaggccccggtgtgtgatctcccccttcctgtgtccaagtgttctcattgttcaattcccacctatgagtgagaacatgtggtgtttggttttttgtccttgcgatagtttgctgagaatgatggtttccagcttcatccatgtccctacaaaggacatgaactcattcttttttatggctgcatagtatcccatggtgtatatgtgccacattttcttaatccagtctatcattgttggacgtttgggttggttccaagtctttgctattgtaagtagtgctgcaataaacatacatgtgcatgtgtctttatagcagcatgatttatattcctttgggtatatacccagtaatgggatggctgggtcaaatggtatttctagttctagatccctgaggaatcgccacactgacttccacaatggttgagctagtttacagtcccaccaacagtgtaaaagtgttcctgtttctccacatcttctccagcacctgttgtttcctgactttttaatgatcaccattctaactgctgtgagaagatgtctcattgtagttttgatttgcatttctctgatggccagtgatgatgagcattttttcatgtgttttttgtctgcataaatgtcttcttttgagaagtgtctgttcatatccttcacccactttttgatggggttgtttgtttttttcttgtaaatttgtttgagttctttgtagattctggatattagccctttgtcagatgagtaggttgcaaaaattttctcccattctgtaggttgcctgttcactctgatggtagtttcttttgctgtgcagaagctctttagttaaattagatcccatttgtcaattttggcttttgttgccattgcttttggtgttttagacatgaagtccttgcccatgcctatgtcctgaatggtattgcctaggttttcttctagggtttttatggttttaggtctaacatttaagtctttaatccatcttgaattaatttttgtataaggtgtaaggaagggatccagtttcagctttctacatatggctagccagttttcccagcaccatttgttaagtagggaatcctttccccatttcttgtttttgtcaggtttgtcaaagatcagatagttgtagatgtgtggtattatttctgagggctctgttctgttccattgatctatatctctgttttggtaccagtaccatgctgttttggttactgtagccttgtagtatagtttgaagtcaggtagcgtgatgcctccagctttgttctttttgcttaggactgacttggcaatgcaggctcttttttggttccatatgaactttaaagtagttttttccaattccatgaagaaagtcattggtagcttgatggggatggcattgaatctataaattaccttgggcagtatggccattttcacaatattgattcttcctatccatgagcatggaatgttcttccatttgtttgtgtcctcttttatttcattgagcagtggtttgtagttctccttgaagaggtccttcacatcccttgtaagttggattcctaggtattttgttctctttgaagcaattgtgaatgggagttcactcatgatttggctctctgtttgtctgttattggtgtataagaatgcttgtgatttttgcacattgattttgtatcttgagactttgctgaagttgcttatcagcttaaggagattttgggctgagacgatggggttttctgaatatacaatcatgtcatctgcaaacagggacaatttgacttcctcttttcctaattgaataccctttatttctttctgctgcctaattgccctggccagaacttccaacactatgttgaataggagtggtgagagagggcatccctgtcttgtgccagttttcaaagggaatgcttccagtttttgcccattcagtatgatattggctgtgggtttgtcataaatagctcttattattttgggatacgtcccatcaatatctattgagagtttttagcatgaagagctgttgaatcttgtcaaaggccttttctgcatctattgagataatcatgtggtttttgtctttggttctgtttatatgctggattacgtttattgatttgcgaggacttttttctttgttaaaatgttgctctgctttcagcattttctcccttgtagtattaccataatgtatttaagattgagcacttaattctgaagtcactttaagtatacctcaaccaaagggaaattaatatattatttctaatgagtgtatttaatataggtaagtagtttgtacacttgtgaaattcttggcattaattgatgtccagaagctgaaagctactctctggtacattaaaaaaaaattgtgtgtgtaattacaagaaagtttgatgtcacagttgcaaaggagttgtgcaaaacaaattgcctttttccagtaaagataattcagcaagttcatcttgagtgtagtgtgtggtttcgtttttaatatgtcctcagcagtagtcatagattttatcttcatcatttaagctttattttctggcccacttgcacagatttaagaaaaatctcactggggttagtgtgcagtcattcagacagcaaatacagcaaaagtaggtgaaaatgtaaaagtcattaaaagaagaattgtgaaattgctcatctcgcaaccacatcaagcaggagcaaagacaactacacagaatcttggtgtaacatacactcattaccacttggactttctcctacagtattttgcagtttgttttttggattctttagtgttatataatatttcaaagtaatatgtgactgggaaatattggaataggtatcagaagactgtagaatttattttgccatttaaatgcttatgtccttgaacaaaaaatgtaaacatctttgaccttcaatttcttgttctattaattgcctgctttttaggtctgatgagaaaggaagagaatataatttgcaaataaaaagaagcaaaaaaaaaaagcagtagttttattgcaaggggctagatggtgatcaagttaggatatagaaaacaattacttgttcttacatgttattctggagaaagatgagatggatacccatagttacagcagaagcgtaaaaagaattctgtttatgcatcatctgtttatgtgttgactttcacctgtatgttttcaagtttatatagggctatgtgctaagattcccaattttcccctttcataccacttattataccagttgcaattaaatacatatataattattaataacttttttaaaaacctttttgttttgagagaattgcatattcagaggaagttgcaaaaaactttacagggaagtccttgtgtacccttcagactgcctgcctcaatggtaacaacttggataactgtggtacgatattaaaactgggaaattgacattgatacaattcacagagtatatttccatttcaccaactttataaggactcatttgtgtgtgtacacaggtctatgtgtagcttcttataactaccgtaatcaagataaagaattattccatcaccacaaggctcccttatgctgcctccttatagtcagtctatcttgtcccagccctatccctaacccgtggcaaccactgctctatctctataattttgtcatttcaaggatattgtgtagatggactcataccgtatgtaactttttgagatccatccaaattgtgtgtatctgtcatgcatttctttatttattgctgagtagtattccatgggatggctatgctacagtttgtttaaccattcattcattgaagaacatttgggttacactattataaatagagcttctatgaacttttgtctgaagatttttgagtgaacatacatttttccccctctgggataaatgcccaagagtacaattgctaagtcatatggtaagtgtatgtttagtgaattaatacttctttagcttgttgatatggtgagttacattgattttaaaatgttgaacacaactggtataaatctcacttggttaaagtatataattatatatttccatattctatttgctaatattttgttaaggtataggtagagaggtgtgagaggttaaggtataggtatgagagatgtgttgtagttttttgcttgtttgttttgtactgcctttgtcaggctttggtagggtaatagtattctacatggtttttagtgataacccttgtttcattattgctactgtattagtaatttgtgtcattttatctttttcagtgatgatttgctggttatagtgacctttttcaaagaactcgctctttatttcatctttgtctatttttatatttttaatgtcattgatttctgctcttatatttattattttcttccttctcactttaggtttattttgcttcttgtctagtgctgtgattattagtttaaggtctttctttgtttctaacgtaagcatttattgctataatttccctcttggcattgcttttgttgcatctcacaaattttgctgtcttgtattttcatttctatccagttctatatagtttaaatttttccttagaaatttgcttgacccatgaaaatatttgggagtgtgtcatttagtttccaagtgtttggtgatttacctgttgtttttctgttgttgatttctagtttttttccacaatgatcagaaaacataagctgtataatttttaatttttaagtttcttttatgactgagggtatggtgtatcttggtggatgttccatgtatgcttgaaaagaatgtgtattctgttattattggttgcagtgttctatacatgtcagttatgtcctgttcattgatggtggtgttctgttcttctgtgtcttcttgatcgtctaatagttattttcgttgctgaagatcccaactataattatggatgtctctgtttttcctttgagctctgttggttttggcttcatgttaaatatctgttgtttggtgcatatacatttaagatgttttcttgatgaattaatccttgtatctttgtacaataattttctttgctctgaagtctacttaactgatggcagtgtagccatcactacttaaaaaaagtagttagtatggcatatcttttccatacttctgttttcaacctaccaatgtcattatgttttagtgaatttcttatagacgctatatgcttgggtcttttaaaaaagaaacttctctgccaatctctgtcttttaactagtatagttatatcatttacacttaaaagtaattgctgtgttagggcttaagccagccattttattatttgttttctgtttatttcctgtttttcatatctgttcctcttttctggtctttctgtaggttgcttgaatattttcagaattctatttgacatgtttatagtgtttttgagtatctggcttagttaaccttttttagtgtgctttgggtataacaatagatgtaacaacttatcacaagggatacttttattgccttttgccaattgaagtttagagacctttcttccatgtaggtcctttctccttttccctttttaaaatttaatatttgtattttctctatacaccttgaacaccacatcaaatgttgttataacgtttacttcaactatcaaatatgatttaagaaactcataagatgaagaatagttcattttatatttaccatgactattacccgttccagtgttcttcctttactcaaattaaaccttattgatacatcatttcctttttgtttgaggaacttttttttaggagaacctcctaaagatatgtctgttagtgacaaattagtttccgtcatctgagaatgttgttcccctttgttcctgaagggtggttttgtcctatatggaatttggccttgacagttctttttctttaacatttgaaaaatgtgccatttctttctggcttccatgatttctgatgagaaatctgatggcattcaaattattgttccccttaaaggtaatgtgccatttctctttggctgcttttgagatttttttctttgtttttaattttctaaacttgacttatgatgtatcttttatttttattttttcccacttagggtttttctcagcttcttgactctgtagatttatgtcttttgtcaaattgtgaagttttcagctattatatctttatttttttcagcgccatactttcttctcttcctctaaaactctgattggatgaatgttaggtcatttgttattgtcctacaagtccctgatgcctttcttgtttctttgtctgtttttctgtgttcagactaagtaaattctgttgatctgttttcaagttcactgatcctgttctctgtcaattccactccactattgagcccatccagcaagtttttaattttaattagtattttttctattttgtaattatttttggttcttactttttaaaacatttcatccttcaaggagagctactttcaatatacatggaatttcttggaaaaactagtaacagttttaggttatttgtatatatgaactaatgttactcaagattttaaacctctgcagagttatctctgtaattagcagatgaagcatgaacatacataatttttttctctttttgtctcaggtaattccttgttacaggccctaataaaagggaaatggggaaggaaatggagaagagaatttaggccttggcaaattgaaaattgtctgtagtatctcactgacaggtaaagtaggaattttgaaattagagaaaaggaaccaggaatgaagatgaaatgaaaaatttatatttacttcactaaaacttttaaagttgtcatatagtttcagatttaaaaagctatttcttccagcctaggcaacatggtgaaaccccttctctaccaaaaatacaaaaagttagccaggcatggtggtgtgtgcctatagtctcagctacttgtggggcggaggctggaggatcacttgagcccagaaggttgaggctgcagtgagcgaagattgtgcccctgtattccagcctgggtgacaaagtgagatcctatctcaaaaataataataaaaataaataaaaaatcaaaaagttctttctcctttccttcatttcccttgaagaatactgaagattttacatagatgacaaattaggtaaatctaagaaaaaacaaaaattaagtagaacaggtaactttcagtggccatacttgagatttaggttatattgactgctgaggtttatcagtttgattcctatccctacaatataattaaaaataaaccatggaccccccccccccattgtcagactcactgacagtataacattgtgattaaaaagctctttctcagtaagtatgaaaagttaatgcatgaaaaataatatatgttaatttagtgggggaaaagatggtttctgtattacagtggtattaacacaagtagctttccatctgaaagaaaataaagttggatccttatataatggattaaaggtttagaagtagagactaataaaaattaaaatagacatctgggaaacaatatgtaaaatatggaaacccagaaaagagttagtatctgcattatacaaagttttcttacagactgataagaaaaagataactcacttggaacctagacaaatgatatgaagagacaatttacagaaaagatagtctaaaaagctaacaaacatgaaaaaatgcttaaacacacttgtagtcagtgaaatgcaaattaaagagtaaggtattttatatccaaagactgtaagacttacaaagtgtggtatcacttagtgatgatagggttgcagagggaaagataccattctacatcgctaaaagaattacattctttttttgagaataatctggcaacatctattaaaattcaaccagtaatttcacacttggcaatctggcctataaaaacaaaagcactggtagatatgaatgtatgtgagaacataggtatttaagggtacttattgcagcattgttctgaaaaaactgggaactaattgagtgcttggcaccagggagatggtcatataacttatggtatatccacattatggaaccattaaaaatgaattacttatataaactctttgacttggcaggatatccatatgttattaagtatgaaagcaaaatgcatagaagtatatataatatgctactatttgtcaaacactggcaactcattcatgaaaaaatacataaatgcttaacatatatttgtgtataattatagaagaatatggaagactatactaagttaataacatgggtttgggagagatatggatggtaaggaggagaggtagagtggaggcatgatgcaaaaggttaaaaaattgtttagaaaaatcacagcatgcattatatctcatttatccatataagtgaaattatatatatgcatataagtagaattttaaaaataaagaacatgagctctggaatctttcagacatttctggattcaaattctgactctgccactttacaacttactagctgtgtgacttaggcaaattgcgtaatgtctttgaatcaattttctcacatattttcttggggtgggaggatgaaataatagtacccatctatagggttgtcatcaggattaaatttagatagcatctgttaagtgcttagcacagtacctggcttacagaaagcactctcagttattagttcttactgttgccttggttcttacgctcttggacatttgttaatatctatttttaaaactttatcaccatcctgccactttcttgaaacactcctcactggcttacattactttacatgtcttagttaatgcctgtttctaattgttcctttttattttgctgatatcttttttccttacctatggatattgctcccaaaatatagcaggggttgccaaagaagcttttgaattagggtgactgggagaatattagtccatatatggcagcagagaagtcatgatgtagggtttatagggttgatttttaaaacaagatgattttgatacttgctctgcagaagttttatgcatcaatgaggcacccagatgaaaatgctcaatagctggaaaaacttgacaggaacttgagaagtagatataaaggattctctcacttggctaattctcgaagtggatgtaatctccaggggagagcatatagagaagggaatccagggcagaaactttggggacagggaataggagaggaaaaggttcccattgaggactgggaggtggcatagaagccaaaatagagaatttctttaagaagctgctggagaaactgtatgtctactttgttctctcttgagctttagttctgtggctcacattgtcttctggccttgttccttattttcttgaaacttaaactacatttgtaactaatcccagcttcctttcctcccactaaattcccttcttttacatttccccctatatgtatgtgaggagtgctttcattcccctcatctttggcatcaaaatctgtcatctctgcccctttcccttccctggttctccatatcattaccaagactctcattcactcctttttcattcccactcttgcctacatttgattgattattatcaaaataatctaaacaggatattttgaaataatctaaacaagattattttgatagctgccaaactctagtgtaatcttgtgttttttctgtctttcatagtcctcttaaaagaactagtttaggccaggtgaggtggctcatacctgtaatcccagcactttgggaggccgagaggggtggatcacgaggtcaggagatcgagaccgtcctggctaacacagtgaaaccccatctctactaaaaatacaaaaaattagccaggcatggtggcaggcgcctgtcgtcccagctactcgggaggctgaggcaggagaatggcgtgaaccccgggggcagagcttgctttgagccgagatcgcgccactgcactccagcctgggcgacagagcaagactcatctcaaaaaacaaaaaaaaaaaactagtttaatccagttaatccagtccctctgccttttaaatccaccagattatctttcctccaacatcttcccaaactgttctgaggaaggagatgaggtattaatgagagagattagtaggatcaccattaatgaaatatagtcaaatcagtttttagaaggttgagtccgggcgcggccgctcacgcctgtaatcccagcactttgggaggccgagatgggcggatcacgaggtcaggagatcgacaccatcctggctaacacggtgaaaccccgtctctactaaaaatacaaaaaaattagccggccgtggtggcgggcgcctgtagtcccagctactcgggaggctgaggcaggagaatggcgtgaacccgggaggtggagcttgcagtgagccgagatcgcgccactgcagtccagcctgggcgagagagcgggactccgtctcaaaaaaaaaaaaaaaagaaggtcgaatacctttttggcaccagggacccattttgtggaagtcaatttttccacaaatggtggggagtggggagtgatggttttgggatgaaactgttccatctcagatcactgggcgttagtttctcatagggagcatacaacctagatccttcgcatgcacagttcacaatagggtttgcgttcctgtgagaatttaatgcctccactgatctaacatgaggcggagctcaggcagtaatgcttgcttgccgcttatctcctgctatgtggcctggttcctaaccagttccagaccatggcccagggattgtggacccctgttgtatactatgtccccctctaaagcattctcagttcttatcggtgtgctttgaaaaagttcctcagaagtaaagcttatgtgcctttgtgtttaacttaactttgcagattgtgttttccaaagatggccacaatagtaactcccataccacatgttctttttacaatatgactttgacacttcttctactgacccctctcagtagaaatgtcacagtcatattgtacaaagaacatgctgtctttgaatattgatgggcttctgtctaacatggaagtgatgctatgtgacttttgagggtaggtcataaaaggtgatacaactttaatctggtactcttgagacatttgctcttggaaccaagccaccattttctgaagaagcttaagtagcccatattggcaggccaaatggagaaggcacatgcaggtgttccaggccaacagcctatgtgacaacagcatcagtcaccaagcatatgaacaaagatacttccagatgactcctgcctccagtgatcagatcacacccagttcttgagttttctcagctaaggccccagactttggatcagagataggctatctttgttgtgccctttctgaattcctgacccacagaatccataagcatagtaaatggttgtcttaagccactaagttttaaagtaatattttagatagcgagagtaactggaacacccaatgtttcctgagaacactttattttcttaagtatggtaactggtagcttgtgatacatgttccttggaaaacctgtttgtggaatttctggttttctaattttttagcttgccattcaaggccttcatagtgaacagtaggacagcttcggtattggcctatacatatccagcaaatcagtctcctccctgaatggtattttatttatagtttctgtatcagtattcttttactcttctagaaagcccttatgtttattcgctgatagtctcttttgtgaagtgcctgttcaaatatcatttttctattgagttgtctcttactgatttgtaaaagttctttgtaaattctggatatgtgcatgttgggacaaaaatctatttttatatcctgtgtgtatatatatatttcctaacaacaggctcgttttcagaatactatacatatgtgtatatatgtgtgtgtgtatatgtatagtgttctcccactctgtgacttgccttctgactctcttaatagtgtcttttgctaaatccaagttcttaattctaatggaggatggaatttgaaagtcttttcctttttttttgagatgaactctcactctgctgccaggctggagtgcagtggtgcgatctcggctcactgcaacctccgactccctggttcaagtaattcttctgcctcagcctcctgagtagctgggattacaggcacgcgccaccaagcgcagctaattttttttttttttgtatttctagtagagatggggtttcacgatgttggccaggatggtcttgatctcctgaccttgtgatccacctgcctcggcctcctaaagtgctgggattacaggtgtgagccaccacgcctggcagtcttttcctttatggctcatgtttactattaccttgtttacgaaacctttggccaccctaagctcataaaggtatgttccaatgttatcttttggaagctttattgttcacgtttcacatttagatctataatatacctagtactatattttgtctgtggtgtgagaaaggagtcaagattcatttattttccacatggatatccagttgaaccagcatcatttatttgaaagaccttgttttccttactcctctgcatgaacgccattgtcatgaatcatgaagatatatctttggatttgtttctggattccctgttcttgtccactgttttgtctatgttgtcttcaataatggtatatttttattaaacctggatatagggtaaagtcctccaactttgtggttgttcttcaaacttgtcttggctattctttttttttttttttttgagacggagtctctctctatcgcgcaggctggagtgcagtggcatgatctctgctcactgcaagctccgcctcccaagcgattctcctgcctcagcctcctgagtagctgggattatagacgcccgccaccacgcccggctaatttttttgtattcttagtggagatggggtttcaccgtgttagccaggatggtctctatcttctgacctcgtgatccgcccgcctcggcctcccaaagtgctgggattacaggcgtgtgagccaccgcgcccggccttgtcttgttattcttgactttttacacttccacatacatattagaattagcttaacaatttccatttttaaaaaaaggaaagggaaaagacctgatttggattggaattttacaaatctaagaattaatttggagtttatactagtgagacttccagttcacgaatacagtttgtcccctcgttatttaatttctctcagtaatatccagcaaaccacgtagctttctgtgtagaggtcttgcacatcatttgttagatttattcctaagtatttgatttttttgatgctgttataagtggtctcttttatgttttattttcaaattgtttgttgctggtatgtagaaatatatttgattttcatatattgaccttttagctaatgaccatgttgcattcacttattaattcaaataatatatgtaagggtttttttttttttgcattttctatgtatgtcatcatgtttgtgaataatcacactttcttcctatccaatctaaatatatttatatctttttttgttttcttattgcattggctgagacctcaagtatagaagtgttgatagcagacctccatatcttgatcccaaactcagagagggtttcaatattttacccttagtaaacatttactgaagatttttaatacttgtattatatgaaaaaaatgaatttcatatttatattttataaaagatttctttatttctcacttgttaagaattttttcatgactattggattttatgaaatattttctgtatcaattgagatgattatataagttttctttattctgttaatgtggtaacttaaactgattaaattttgaatatttaaacaacttctcatttctgatatatacacaatttagttgtcatctattacccttttgtatagcactagatttggtctgctaatattttgaatagtttttgcatctatctcaaccttaattataatgtacattttaaagtaaaaattacaaagaattgctgattgcataaaatgagttgggaagtgtccctctttttctattctctggacaactgtatgtaaaattggtattattccttccttaggtgttaatttcatctggaccaagaattttgtcttaaaatataagtttattaagagtcttctagtctgttttctttttgtatctgttgggtttggtttttttgtttgtttgtttgttttggaatttgcccatgtcaagtttattggcatacatttcttcatatttgtttattattttttgatgtctgtagaatctggagtgatatccttttttcacttctgatattgattgattgtaccatctcttttcttgagaagtcaagggtttacttatttataggtgttttcaaagtaaaaacttttgggtttgctaatcctctctaatgtaaactttttttcctatttcattaatatctactcttcattattatcttttttctattttctttatttggattcatttattttttttctaattccttaggccaaatggctaagtcctttatttgcagccttgttttctaatatatgcatttcaaaactttgaattttcctgcattcgtatctttatctgcatttcatacattttgtgtcctattttctattctctattgcttctctgctttctgcttatttctatattaattattttctatattttattaatttgttatacagtcttataaattctttcagtggttatggattttttttaacatttttaaaaaggttttctggcttttctaattgttctcaatggaagattatttgggatgtacagatcaccagcatgtttatgttggcttctaggccaattttaaaaaatgactaaagtaaaacttctgttaccaattaaaaattttgtttttctgccctgggcctttaaaagtcaaacctgcacttgaccagtcaccatatattttccaagtaggtttaatactagtgcctaggaatagcactaatgaaggttcagacacatgcaaagtatatgctctgctctgtgtcatcgtggcacaataacagagtccacagaatggtccacatttaatattattatgtttaaagtttttggcatttgaggaagttttagaagcttcctgttcatcttacatatgtaataaataatgtaagttatgactggatattgttggtactttaacttggaaagaaaaccatcttattacctctttttcaagtttttttgaaagactgtctggacatttaattgaaaactatttggacattgcaacacaaaccttaaaaaagttgttatcatctacagttcttacatgaataaagcagtattaccaagtagccaaagtaaaatgcagacattttactgtttgctgaagctgattaagatgtattatttataactccactttcaaatattttatttattagtacagtcttactgttctcaatggctaactttataataaataaatattatatttacatagaatcacttaatgtatactaagtatatatttaaacatataaataaatcagcccatgactttatatgtttgtattataaatagtataacaaatattataaatttgaacctctaaaatttatactagtcaaattatctaggtttgtatgagatttaattggaaaaaaccctcttactaaataaaattagaagcccattaagcaaattaaaacctatatttaagaaaataggcttgcctaagttacacagattgtatgcacgcttggtttttatccagcacaagtcttactgcttatgaaaattgattttattaaagattgcttatgggctgaggctgaaggcgtgccattatcctttaccagtatataattacaacgtactctcctttgttaatctgacagttatttgcagaactgaactaccttggattcttaggtagggaagagttttaattctcgtgcctcagattttccattgctgcttttacgtgggtgtgtgagattcagaaatacgagagtgaagtaaaataaacgatgctttataaatacatggaattaggtgcctacaggggaagctatacagcagctagccagcattttaattccatgtttctcagcttattttatttgaggtgttagagttgtacttttttgttttccaatgtttatagactgagcttgattttcatatctagttgaattctcactaattttgtggctaatcaagctcccacaatgtcatttacttgaagttaagtattgatatttatgatttgaatatatttaacaactttatagttaataactttaaattctcttctggtgaaggtattcagtttggccagtgtcttctcagtcagtgctctaatttaatatagtgtttagtgctaaatctaatattgtttctaacacattataaaggtcagaacttacataaatatactgtagtttgtgatagttttggagaatgggctacagtggcatttattagtgaagtaaaaattcagtccataagaaaatatgaagtgatactttatttagtccatatatttttaatggacagtggtctccactttctaagtggggatttttcatttttctaagtattcttaagagaatcagttttggacttttggttaaacatagaggttagaataaatatgtttatttcttcctaaattcactaaattaacagaataaacaataaaggaataaacaaagagaatgaaagaggcaatataacatcaggctagagaagtgaaattttagaaatgttagaaaagaaatgcataaattataaccaacttagagcagttttgatggaacataatatttgatcattatattgagttacaatttatttaattattccttaatatcgagtcatatatataatttttttagtgtctgataatgggttatcataattaagcattcatctatccatgaccatttagttttttcagcttttcactgttataattagcattccatgcatcagtcttaaaatattttaggtttttttcagaattgaatgactgaatcaaagtttataccttttatgagtattgatccatgctgccagattgctttgcaaagccatttttatgattaccatcaatgtgtggaatttcccatttcactacaacctagccaacattgcatttgccttaggatgttcaatctgggcagggacacatagcccttgcatcagttgcttgtctgtggtgctgtgggaaagtgtggcatgacatgacaaattttaccaggtgaagcttagctgtgtgcctttaccactgccaccttataataaagacagatgctgtgagtttagaggaagaggtgatttcctttgtttacctggggtgctcaaggaaggcttcatgtaacaaatagaatttgagctgtgtataatgagggaaagatttataaagaaaaatttgcacagacacatgagagatatatcagtctggatcaaatcagaagacagaagccacatagtaactaaaattgttagtttaacttaaagaattattagggtatgataagagaaaaactatgaagtcactctataaggagaactccaaaagttaccctagggctgaggaaaagtacccaatgaaggacggaattgaaatgaggttcagacctcattgaaagtgtggctatagcccattggatggtagagaaatttgctgcgttgtctgagccaacgctggtgcacaatcacagtgtgagcaggtgagttaagactggtaggagagcatgcagagggaatcagggcagtgcggcagggccacagtaacaacccttggggtgcaagtgagttgaggttggctagttagtagaaggagttggagcaccactttagataccactggaattgcaagttggagaggcctccctgtgtagcaatctagagcactgctgtttacagcttggggcaggacagtataccaagctgctgtgtggaacaaaggtcaggtggctggctggccaagccggtgcatatggtttgaggagaggggctggggagtagccacctggtctggggctcctggctatagtgctgctgctgcctgagtagagagctggagaaagaaagcacacagccgctagccagatgctggagaaagctttcccctgcaggcacctagtactacagcagtgttgtttttcagccttggcattattgaccttcagggctggataattatttgttgtggggagctgtcctgtgtattgtaggatatttggcagtatccttggcctctattcactgtatctcagtagttccccaagttatgacaatggaaaataatctccaaatattgccatatgtcctctgagggcaaattgtctctagttgtgaaccactgcaatagagaaatctcacagcagtggaacagtggaggggtaaaatataagctctccagaaacctgctgagaaaactccttccctccctttccagtgcactgtattgacagagcttagcatcatgtcatactggcaaatgaaaaatattttaaaggcccagatccacttttccagataagacaatgaagaatgaatttggagtagagaggtaataaactgatagctgtacaaagtacagttatgggattaaatatggttggagaattaaatatgagcaaagttatagaagcagaaaagcgtaggggcactagggaaattcaaggacaagaagactaaagtgcaaggctgatgtaaagtggtaagaggagaataagctagaagggccctttgaatcttaactctggagtgctttgagtgagtggaagagaggggaagagaaagacagaaagaccaatgaaggtttgagatttggtgctgtcagtagatgaggaaggcagaggcagaggtggaggagtgatagaaataattgggacctacatttttgcacataactaattactcaggaaatggttcatgatagtatatcctgggttttttcccacctatccatttcataatttaatgtagtgctttaatacataaaatatgcttattggggctggatgtgatggctcatgcctgtaatcccagcactttgggaggccgaggtgggtggattatctgagatcaggggttcaagaccggcctggccaacatggcaaaaccccatctctactaaaaatacaaaaattagccaggcgtggtggtacgtgcctgtagtcccagctactcaggaggctgaggcaggagaattgcttgaacctgggaggcagagtttgcagtgagccaagatcatgccactgaactccagcctgggcaacgtatatatgtatatatatatacatgtatattgtgtgtgtatatagatagatagatatagtatgtgtggatatgtatgtatatgtatatatacatatatatacacacatattcatacatacacacacacacacacacatacacacacacacacacacacacacacatagaatttgggagaagagaagagtaatatgaggaaataagagaccatagggagttcattgtccctcttactcttctatggagtgaatgcaagggcaagccagaacctctgcactttctcaccaggtgaaggtaggggaacctgtctcatggtaatgcacagagctaaaagagaattctagcagagggaatttgtggaagttacggttttgactcaaacccctctatagtctttcatttttccaaggatatgtctcctcctttctaagtactttcgtggcttgttttacgtgtcttgcaatcgtataatccagcatcactgaatagtcttatagtttcccagatgtccttgtggcatttccttctaggtatattgaaacttgcccttttttattcttgaattttgtctttggctcaaggttttacattttactgactcttcatactacttttctccccttatttagaaatggactcagaactcaaggaagaaattcctgtgcatgaggaattcattttgtgtggtggagccgaaacccaggttctaaaatgtgggccctggacagacctctttcatgatcaaagtgtcaaaaggcctaagctgcttattttcattattcctggtgagcgtaaaagtctgggtgaggagactttttgtagatactcataactatgtctgattttaaagtatagagaatttggtaaatatggaaaaccttggagaaggaattaaaatcgcttgacccattgttaacaaccacccttaatattttgacgtctggattttgtgtttttcttctatgtatttacattatgttgtctgttgtgtgtgtgtgtgtgtgtgtttgtgtcacagttggaagtatgtactatatatgcagttttgtaatgtggtttttaaagcatttcttaatatttaaaacttcatcaatatttttgccagttttctaaactttttctgcctcatttcaacatgattatatgtttattatagaatatttggccaggtgcaatggctcacgcctataatcccagcactttgggaggctgaggtgggtggatcacaaggtcaggagatcaagaccatcctggctaacatggtgaaaccccatctctactaaaaaacaaaaaattagctgggcgtggtggcacatgcctatagtcccagctactcgggaggctgaggcaggagaattgattgaacctgggaggcagaggttgcattgcccccagatcacaccaccgtactccagcctggggggcagagcgagactccgtctcaaaaaaatatttaaaaaaataaaaaataaaaaaataaaaattaaaaattagaatattctgatatttggcagctgagtcacttgtaacttttgctagatcattgtcaatagaattagggacagatgcttgagcgattgcaggtattcaaaatgcattttaaattgtgagtttgaacatacatgtttattcttattctgtgaattgccagttcgaaacccttgcccatttttcaattgtgttttcaatgttttccttattgattttcagttgattcttacacaactgtaaaattgtgttatatctgtcatacgtgacaagaatctttcctggtttgtcttttgacatcatttacaatgtttatttggttgtatagaaagtatctttgttatgtggccaaaatgctaagtctcttcctttaagacttcagggttttatgagtttcttagagagggctttcctactccaagattataaaacaattctgccatgtcttctagtatttttacaatttcatttgtgatctttaagttgatgcatctagattttaagggcaggcactgaggaagggatctacttttcttctccctctcctttggatggcttattacatggtccacaaccatttattgtatcatctgcctttctcctactgccttgcaatgctaactgtattgtaaagtagattatcctgtggccaggagtttctttccatgtttttcgcctcttcatgtgttcttcatgttttttaataaatgcagttttatgatacttttacatattttttggaacttgttcatttttattcttttccagaatattctttagcttcttttcttttggctgcagaatatattttttggcttcattaggaggaaaaaaaaagcttaaatgatctttaaagtcaactttcctaaaattgatctcgtaaaggcagagtataatgatagatactaaaggctgggaagggtgcagggctgggaggagggatgaagagagaggtaaacaggtacaaacatgcaagttagatgaaaggtgtaagttctattgttggaacttatttataccaacagaattggcatagtcggcagagtagactgactatagttaacagtagtgtattgtattggtataaagtagctagaagagaggccttggatttttctcaacacatagaaatgatgaatactcaaagtgaatgtactaaaacaccctgacatgatcattacacgttctatacaggtaacgaaatatcacatgtaccccatgaatatataacataaatatcaatatctttaaaaaaaataaataataaccaaaaaatcagcttttctagttccaacagatgttctcagaggcaaccacttttaacactggtatattcctgtgatatttattccacattcttttttgtttgtttgtttgtttagacagagtctcactctcttgcccagactggagtgcagtggtatgatctcagctcactgcaaccctccacctcctgggttcaagagattctcctgtatcagcctcatcagtagctgggattacaggtgtctgccaccatgcctggctaatttttgtagtcttagtagagacagggcttcaccatgttggccaggcgtgtgtcgaactcctggcctcaagtgatctgcccaccccagcctcccaaagtgctgggattataggcatgagccaccatgcctggcctttactcgtttctaaatgaaatacttatatttcttcttcttcagttgtcttttgttttgttttgagatggagtctctctctgttgcttaggttggagtgcagtggtgtgatctcggctcactgcaacctccgcctcccgggttcaagcaattctcctgagtttttaatattagatgttatctattgtcttcctccatgaaagaaaaagattagctttcttatactttcccttctccatgcacaatcatatacccctccttctccatctattttcctagtatgggaatatttcagttttttgttaggtcaatattcagtgcttttattattatgactatgtattatattatattatgtatattatattatattatattaattatattatacatagctaagcctatagggaattgcgcatgcatttcctttcttatatatttttgtttgttttccctgggttaatgatgttctgttatctttttgcttagttttttgtgctttaatcactcatttatcctagaactattctctagaagtgaaaagaatcctttcaatgcatttgagtcatcagtcagttttcagaatgctctgtcctttggctccagtctggactcattgctccccaggcctgctgcacagttgccatcctggggacttctgtcactttcttctggcttggatccctcgtttctcagatcccacatttttatcttagtttattctcttgtttttggtagagcatatcttctagtagcttccttagaagaggtacatgagaagtaacacagcatgctgcaaaatgtcttagactctaggttggaaataatttttctttaggaggaaaatggagggcgttaatggagggcattaatcattgttttccaacactcagagctgcttataagaagtattggtatcatttctgattttcgccttttgtatgtgaagattctctacccacattttcgagaccttttctttgttctgagattctgaaattttacagtgaagcaccttggtgtgactgttttttcatacaaggtacttgggttttggtgggcccttttaagccagaaactcatttcattctaatagcgctttgtttttcttttcttttttgtagtctcatgtttaatggatgcaatatcattttcttttcttttcttttttgtttttgcatttgcaagaattttcactgtgttccttttttcatttgcattagtctttagttttcctcaaatgtctggcaatccttgactatccattcatgtttaagaggaagacaaaaaacaaattggaagctttgcactcagagctggggcttatccagaggtgtgtctagggtgattagccatcctagcttgcctaggactgagaggttttctaggacataagactttcagtactaaaaccatgacagtctcgggcaaaacagaggagttggtcgccctaggtgggcctcatcctaaggtgattgagtagggacccagcatttcattgacggatttccagctttcagtgtctgaagctctttcttttattgttcagttttcctggggaggaatcttccaggctcctgtttgaagagtggaaacctgtctgttaatgttcaaagaggaacaggggaaaggaggtggtagtttcagtgtttggttatgcctagtccagcctcttctcagtatggtactttcattctcagctggactaagattcctgatcgagaatttctctttgttttaaccactaatgggaataaactattcttctgccaggatgtaacagtctttgtggaagtcagtccgttcagcatctattaacataaaaatacatgtacttttccagtagtgaaggagagtttgaaattatagtcatggcaagtgctgtttgatggagcagagatttggaatagcttatagcataggatagagaaaataagtagaaacattatcttaaactcgagaagggatatccttctaaggctagaaagaaggaggtgaaattggttactaaaatggaaaagtataaaggcgtatcagagggaagtgaagtctcctgcttcctgactactgttttttctgttgagagttgagaccatgttttgaatgctaatcatttccagctcatgaaaagatactaggcctgtggttcttaaagttggtgtcaggatcagaagtattgcttgagaactttaaaaatgcagttcctgggctctatccctgaccttctgaaccagaaagtctgggggttgggcaatcagtgttttaacaagccctgcagggaactgtgatacgcatatctgatccagggtgtagtcatgggaatgaattgcttaagtttaatgtaggtgaagttctttggatttcatcataataatgaattatgggacaaagtttttggctcagtcagtccaactggattttgaaatgtcctgacatgacatgacaagtgaaactgtcatttaagggtcaaggctttcagagaaagtgtgagtgactaaaaagttgatagatggaaatagatggcttgagtcttaaagaagaagaggttgttgtaatagtgaggtgaaatagtaagtgggacagacaacccacccacttccccacctggagatagtatttattccctcactcttttatcccaggtgctaggaatactgtgttgcattaagtctttgctctcattgagttatatgtggtgttagagaagagtgactgaggcctctgctgaagaggattgaaaggaagagagcccattacaggggagagccagatttcagatatggtgaggagataaagggagtattcagtgaagacactgagaatggagggaagcataaaacatttgtagtttgatagtctcattgtttatagtgctttgacattttcagatcatatttcatttcctagtgttcttttatgtttgccctgctcattagtttgtgggatttagaattgtattttgtgtgtgtgtgtgtgtgtgtgtgtgtgtgtgtgtgtgtggcaggtttcgggggagctaatctatttacactgtggtaataatcaggataacagtatttcaaggattgtgaagccactatggacaccatgttatgtccgtctctgatagactgacataacatttcattttaaatcacattgcttttgcagctagcaaaattaattcttcacttctaagttagtaatgataattgtgagttttcttttcttttttgtagtctgatgtttaatggatgcaatatcattttcttttcttttcttttttttgcatttgtaagaatttttactgtgttccttttttgatcagaatccacagattgaagaacttttaatttagtttcattttttctgatgaaccttagatcttggatttctgtaaagtaacattgtccttggactttctttaactagtgagatgaacaaagggaatcagattgagaactcaccatagagtacactgaatcataattcttaggaggtcatatggagataacagaaccatgtgaagtatcaagtgctgtgagcacagtggttggagatatagcagataaggctccatgaatgagtccaataggtctgtctacatggcaacctattatatagatactgtgccatattaacttgatatgtggcagttttcgttcctctccctacaaaattaactggaaggtataagtctatacttgcagcattgtatagttggagattattagcagtcagggcctagagatgatcactacaacttctgttatacattgcatgggtatttgactgatttgactgttatgagcatgttcaagtgtgtgtttataacacatttttatgtaaacttttgattaaatattttacttgcatgtctgcattggaatgttttccaacatccttacacctggacctctcccatacccctccgtgtgtgtgtcttttttagttgcataagtgtaggccttttaattttctttgtggtttcttaacaaggaggtttaaatggtgaagtatgaagtactgtatgcaatggtatttaagcattttgcattgcattttccacttctgtctctgttataagttagacctttgtgatacttgctatgcgttcagtttgaaaggatttattgtatgtgagtgccatgtacccaatctagtgctgcttggtgccactggatacagagaactatagcaagtgatggctacttttaaagaagttaaactttcaagtttggtacgttatacatgctacaatgttaagtatatttctgacaggataaaacttccatttttttctgcatctgttgaggatcgtatggtttttcttttacggttggttaatgtggtggatgatgttaatttttgaatgttaaaccaatccagcattcctgtgataaatcccacttggtcatgatgtattatgcttttaacattttgatggactcagtttgctaaaattttgtttagaatttttccatctttgttcacgaggtatagtggtctgtagttttttctttttctttttgcaatgtctttatgtggttttggtatgagggtgatgctggcctcatagaatgagttagaatatatttctttcttgatatggtttggctgtgtccccacccaaatctcttcttgaattgtaactcccacaatttccacgtgttgtgggaggggctcagtgggaggtaattgaatcacgggagcaggtctttctcatgctgttcttgtgatagtgaataagtcttatgaaatctgatggttttataaagaggagttcccctgcacacactccctttctttttgcctgctgccatccatgtaagatgtgacttgctactccttgccttccaccatgattgtgaagtgtcctcagccatgtggaactgtgagtccatgaaacctcttctttgtgtgtgagttgcccagtttcgggtatgtctttatcagcagcatgaaaacagactaatacatttctcttctattttctgaaagagtttttatacactgggcatttttcttccttaaatgtttgatagaattcaccagtgaagctgtgtgggcctggattttctttgtgggaagatttttaacttaaattctaattaatccaatcaatttagggctatttaggttatctgtttcttcttgagtgaactttgatagtttctgtctttctaaaagtttattttatctaagttgctaaatgtattgctatgaaaattttcatatttttcctaattactcttttaagatagaagactttttttaaatttaaatctgattatgccttaaccctgctcaatctcttttaatgttacttagattaaaagccaaattacttatcatggcccaaaaggtatcacatgattgtatttctcttcctcttcaacctgatctcatacaagatttgatatctcttgttatgctttagccacactgatagattagatgcaaagggaagaaccaaggattatggactgtcttccatttcttcaagagctaagatctttatttcttgagggcctttgaattagctcttcaagagctaagatctttatttcttgagggccttctccctccttagtatttattctcttccctcaaattttcacaaggcttatttcttgtcattttggggtcttagctaaatgtcacctcctcagacctttttttcactctattctcttcccttctctatcatgtgaccctgtttattccttttataggagttctcacactctttatctcacctatttagttatgtgttgtatattctcccactagtacataaattccaaaaaggccctcatctgtcttttgcctgacatagtgactttcatacagtaagtgctcaataaataattgagggctaaaagaagctgtaattctgaatagaattaatgaacataagtaattggcatcatcatttacttgatgatgataaaattgtggatcagaaagcttaagaactcagacttaatcccagagatagggagaaaactttgttttatttatttatttattcttcctcatttaaaaaaatatgttaagttctgggatacatgtgcagaatgtgcacgtttgttacataggtatacatgtgccatggtggtttgctgcacctgtcaacccatcatctaggttttaatgcctgcatgcattaagtatccattatctagtactcactgtttttcatatatcgtgtcattgtaacttacatctaaatcatggggttatctttagtgtctccttaatgttacaccagtttttaattgttataatagctgtggtattaatagctgccatttattcagcccctaccatgtgccaagttttgtgcaagtggctatccattcgttatttctaatgaaaatgccaactactttatagagatattgtaagactaactaaaacaaggaaggcagaagatcctacaccggattactgatgttttttaaaaattcagtattatgattttcttttgtatatactttcagtcatcaaatatttatttagcacttaccatatatgtgatgttggctaagttatttaacctctctgtactcagtttcctcatccataaaatggaagtaatgatagtgctacctcatatgataattaaataatatatgtaaagcacctaaacactgcctggcatgtagtaagttatagtacctaaaaatattagctattattattttctagccatatgaagaaatctatgagcaacgtaagacatgtgaatatgaggtataacatattcctagaaggttatactcagtaatataaaaatataaaatttttgtaaagtaatatattaatgagatgaaattttagtcacaatcccaaagagatttttaagaattgaaactagtgaaaataaccctaaagtttatgagaacagcctagaaaatttagaaaaagaaaaagggaagggatttgccctacctgttaacacttaaaaaaaaatgtagtaattaagacagtatggtcctggcagaggagaaaaggaaaaataaactgaattatttggtatcagaattagcaagtgaatgtaaaaatgtagtattgggtctgaagatatttcaaatcaatgcagaaagaatggattatataataaatggtcttggaacaattggccagtcacttggaaaaaagttggattgctacttagtattttatactaaaaagtattctaaacttactgaagacttaaatgcataaaacatgaaacagtgccacccacagcttccatagatgttatagcccctgtgctggtatgcccttcctcccttctttcttccttagctatacagtggccaataaactgaccaaagaatatatttctgcatttgaggaagttttcatcctatttgacaaagaagccaaaagcaccatcacaaaaaggaatttggaacttgggtcactaggtcagaatgcaacagaagcaaaataatatggatgctacggccgttgtatattaccgttatagctagacgttgttgtacaagtttgaatacctaacatttatataatacttgctgtgtttcaggcagtgttacaatgctttgtacattgattcacttagtcttcaaatgaggtagtaccattattacacattttgtggatgaggaaaccaaggcagagggaggttaaatagcttggccaaagctcacacagttggtaagtggcaaagccaagattccaacccaggtagtctggcttcagagtctatgctcttaaccactttactacactgcttatctagcaaactgaaagatataaaaatggagtagaaatcagtgaaattcgacaaggatgacagtggttatttacatcagtgctccagagccatgtcatgtaattgcagagaccagaaagcctaacaacatgaagaaatagataaactgatcagagaaatagatattgatggaaatggactagtagctgtgaagactttatatagatgatgattacaagatgaaaatcccatttcgttgtaatttcccccctacagatctatcagattgaatgtttttaaaaagatcgtttatttattgtttctttatagcaaactcatgtcaaaaataccttctgtacacacataagaaaaatctacatgtacttgtagacgtttgtttccccaaaagatcaagctgtacacctgtttacaattataagtgctagtgataagtgacaaggaaacagtagactccttaaagctctccctgtgcatgcttcttacactattttggctggcttgtttttctggttttcatgcatcttgttaactgagcatgaccaaatcttgaagtgccttatatgcagtattactgattttagacttcttccagatgactttatctggaagacactgaagggtgtttaaatagggtactgctgtgattttaatggaagtttgaagataatctctcttgggtactctgaagaattcagaggaaagtgtgaaaagaaacagacccatcttttctagcctgcgtgtcatcttatgcctgtttattactttgattaatctaaggtctgtgtttcttttcttaggtaacccaggtttttctgccttttatgtgccatttgcaaaggctttatactctttgacaaacagacgctttccagtttggactatcagtcatgctgggcatgcgttggctcccaaagacaagaagattcttacaacatcagagggtatgtccttgttaatatctactttcctttagagtgagtgcagggtcatgtttctagcaagcttgctaaggttaagagttacaccagtggaaacctctgcttgtggcattaggcccatggtgccatattttggtaaacttaggatttttagagacattttaactcttcatgtaattttctgtaagaatatgggtagataaaacaatctatgacttgccttctttatttaccaattagtaatcaactgtgtgttttttgatcatgtattatttttccagggttgttctaggaggaatggtggggaaaaagcagtccccaaccattttggcctctgggaaccagttttgtggaagacaatttttccacagactggggaggggtggatggtttcgggatgaaactgttccacctcagattaacaggtgtgcaacctagatctggcatgcacagttcacagtagggtactcctatgagaatccattgctgccgctgatctgacaggaggcagagctcaggcggtaatgctcactcgcccgtcgcacaccttcatctgtgtggccgggttcctgacaggccacagacaggggttgggaaccccttttataaaccatgttctttactttaaagaagctttttctctcatatttagagaataattaagtgataaaccgtggcctgctaatcatatagacacctaaggggtaaacaaaggagaaaacacagtgtgggttaggagagactttgtggagtaggcatgtgtcttagtcagtttgggctgctatagcaaaataccatagactaagtagcttttaaaaatggaaattgatttctcatagtttcttgagactggacgtccagtccagtctgcactggcagattcgatgtctgatgaaaacctacttcccgattcacaggtggcattcttgctgtcctctcgtggtggacacaggaggcaagccctcttgggactctcgcgggctctaccctcatgaccccatctgatcctaattacttcccaaagacccctctccacctcttaatagcatttgggcatagggtttcacctatggatttgggggccatataagcattcagaccattacagctggttttcacaattgaataaaatttggatttagggcatggaggtgggtgcagaggtacaacagacagaaagagtagcacagaagggagcaagatttaatagcgatgttactgctaagcagggccagtttgagagggactttgagagctggagagagagccaggactccatgctggaaggtttctaaatggaagaagtaataccatggagatgcaaactacctcctttaaatctgtgagaattctagcatgttcactgttccaaaaaataaaaaatgagagaaaaaataacttaaatataagtttataaaacataaacataactttataaaagtacagcatatccaagagttgaaggacactttcaaaaggtgtaacaattggaatgctctataggcattccattcaagggcgttttgtcctagggggtttcctttagttaatttgaggtgagatcgaggtggctgtgacttcattgcccagtttgcttctggttcttgtacgtctctctagtggtatgagcatctttttgtgcttattgagcttctcagttttaaagatattttacaataaagttacattttacatctatagtcttcgttattatatatgcatgattcttttagacattgatgtacaaggttgaacatacaaaagcctgtactctttgaaggctagttttgattatatttatttttaattgtaatctctgacctcagcctctgatcctcatatcagatacaattttttgtttctattttaaaatttgaatgtggtggcaataaatatggctgcatatgtgaactcctctgaatactttctgaaaaacattagtttactaatctgttattaatttgtgtaaatgttgcacgtcagataaacagtatcaatttatctagttttatctaattgttaaccttgtattttgcaactgaccctttagctgcagggagtatgttgtataattttctatttattttcaaaatggattaccttcctttattgtatttttagattaaaaagttatatgtgcttattaaacaatttagtatggaaaactgaataagaaaataaaaaatcggtgtcctgtaagttaaaggttgaaaagaaatactaaaacttcataatggtttaattatgcttaaacattttcagcctaaagcctaacaaacgttagcaccttggcactaagagatgagatttttcaatgaataatactttgtgtaatagctcagatattttctaggctgaagtaagcatctaggaatagcagcacaagggaccatatttttagtgctttttcccctatgtcaatatcgtgatgaagtgtgtatcttaaatgttagtgaaatagttacatttagattttcagggtattttttttcaacatttatttgcttattacctgttcaaaacttgtatttggcatatgttatacattaagaaaatatttagcatagaatttttttaaaaataaatagtggacttccagtttcagctctgacatgtagaacttggagtttgtcacttctctcctcgcaataagaaaaaagctgaggctaagtgtggtatctcatgcctgtaatcccagcactttgggaggccaaggcaggcagatcatgtgaggccaggaagttgagaccagcttggccaacatggcaaaactgcatctctactaaaagtacaaaaattagccaggcgtggtggtgcttgcctgtaatcccagctactcgggagactaagacatgagaattgcttgaaccttggaggcagaggttgcagtgagccaagattgtgccactgcactccagcctaggtgacagaatgagactgtgtctcaaaaaagaaagaaaaaaagaaaagaaaaaagctgaacaaaactaaaaatcatttttcttagacctttcagagaattgaggtcacaggacaaattgtcacctaaaatctagagagacaaggaaatacaatgaagattgtagaagacactagtgccgtttatgtagaatacactacataagtgtagaatacataaatggtgattttgatgaattgctgggggtaaagtacagactattttaaaagtaacaaacttctgcaagcctattcttgggggacttcttcactttcataggtattacttctaggaaccttatcaggtacttttgtgaaaatttgagaaatgtcctctatggttttttgttaggagtggaagagaagtaagcattttgcagtatgtccagaatattctcaataacatggcttactttccaagggaaaaagagttccagagctttatccaacctggggggaagggcagttagccaactccgtcttcccctagccttcatgtctcacatgctggaggagaaaaaaagatgacaaaaacttttgaagatcacagcacaggcattcaggcccactgaaagactgaggtttaatcattacattataggatgtttccctcctcattttaccaccatgtctacaggcctctaccttaataatagttcattataactataggagctacaagacacaaactctatttaagaaggagttcttagggaaaaccaaaggcaatggaggaaaaaaaaacaagaacattagaggaaactgaagtttctgatacctatagctacagaaaacattaagcatagccctggccaggcgtggtggctcatgcctgtaatcccagcactttgggaggctgaggcgagcagattgcttgaggttaggagtgcttgaccagcctggccaacgtgatgaaaccccatctctactaaaaatacaaaaattagccgggcatggtggtgcaagcctgtactcccagctactcgggaggttgaggcaggagaattgcttgaacccgggaggcagaggttgcagtgagccgagatagtgccactgcactccagcctgggcgacagagtgagaccctatcttaaaatacaaacaaacaaaaaaagcatagcccagcttctagtggcattaacatatagcctcacataaaaggtctatttacctcattcctattacttaatacatcatgtccagctttaagcaaaaagtaaaattagaaggcattgtaaaaggtaagaaaaaacagtctgaagagacaaagcaagcatcagaaccagagtcagatatatacttattaccaattttagaaatatcagatcgggaatttaaagtaaccatgattactacgttgagaactctaatggaagaagcagcatgcaagaacagatgggtaatgcaagcagacagtagggaactcttaagaaagaatcaaaaggaaatattagaaaacaccgtaacaaaaatgaaaaatgcctttgatggactcaccagcaggctggatgaagctgaggaaaaaatcagtgggctggaaaaataggttaatagaaattttcctaactgaaatgcaaagagaaaaaaataatttataaaagtacagcacatccaagagttgtgggacaatttcaaaaggtgtaacatatgcataattggaataccagatcaagaagaaagagaaaatggagaagataagagttgaagtacttaatgccagatgacaaaacacaggtctaggaatctcagagcacactaagcaggatcaatactaaggctctacacctacatatgtcattcttaagttgcagaaagccaaagacaaaatcttgaaaataggcagaggaaaaagtgccttacctgtagaagaacgaagatgagaattacagggaacttcttgtcagaaatcattcaacaaagaggagaatggagtgaaatatttagtgtcgaatgaaaaataacacttacctggatttctctatctagtgaaatcatccttcaaaagtaaaggagaaagaaagactttttcagaccaacagcagctgaggaaattagttgctggaaacatcctatgcaagaaatattaaaagaagttctttaggggaagggaaagcgatagagattagaaactcaaatctgtataaagaagagcatcggagaaggaataaaggtttaaaaagtttatttttcttgttccaaattgatctggtagatagctgtttattcaaagtaataaaagtaacagtatgttgggtaattacaacatggataaatgaaatgaatgtcaatcatgttataaaggatggaagagaggaattgggaatactcagttgtaacatacctggactaacggtgaaatggtatagtgttacttcagatgaacttgtgtttttttgttttttttgttttttttgagacagggtctcactctctcgcccaggctggagtacattggtacaatcttggcccactgcagcctcaacctgccaggatcaggtgatcctcccacctcagcctcccaagtagctgggactacagacgtgtgccactacacctggctaatttttggatttttagtagatgcagggtttcaccatattgcccaggctggtcttggaactccttgggctcaagcgatctgcccgcctcagcttcccaaagtgctgggattacaggcatgagccactgtgcccagccaaaaaaaaatttttttaataagtataattattatgagaagaagagagaatgttagatcatttaaaatgctcaattaaagctaggaatagagagtaggattttaaaaagaaagaacaagtataacaaagaagaaacatttataaatatgatagctattaattcaactatatcagtaatcactttatttatttatttagagatacagtctcactctgtcacccaggctggagtgcagtggtgccaacgagactaactgtagcctgaaactcccaggcttaagtgatcattcccacctcagcctcctgagtagctgagaccacaagtgtgtgccagcatgcctggctaatttttatattttttatagggacaggattttgccatgttgcctgggctagtcttgaactcctgggctcaagtgatctacctgccctggcctcctaaagtgctgggattacaggcatgagccaccatgcccagcctcagtaatcactttaaatgtgaatggtctaaatataccaattaaaatacacagattgttggagtggtagggggagatccaactatatgttgtctacaagaaaccactttaggaccaggcacagttatacacgcccgtaattccagcactttgggaggacgaggtcaacagattgcttgagcctaggagtttgagaccagcctgggcaacatggtgaaactccaactctacagaaaaatacaaaaattagtcaggcgtgctggcacgcacctgtggttcagcctactcaggaggctgaggtgggcagatcacttgaactcgggaggttgaggctgcagtgagccgagatcatgccactgcactctagtctgggcgacagagtgagatcttgtctttaaaacaaacaaataaacattttaaaacaaacaaacaaaaactttaagtataaagacacagatatgttgcaagtaaagggatatacagagatataccatggtagcactagtcaaaagaaagctggagtagctattttaattttagacaaagcaggcttcagaaaaagaaaatgtcagggataaagaggagcattacataatgataatagaaccagttcttcaaggaaacataacaatccttaacaaatatgtacctaacaacaaaggtcagaatgcaggaggcaaaactgatagactgcactattataagtggaaacatcagcaatcctttttctgtaatgaatagatccagcaaacagaaaggcagtaaagatatagttgaactgaattgcaccttcagtcaactttatttaattgacatttatagactacttcatctaacaacatagtcttctcaagcacacatggagcattcaccaagatagactacattccgggccataaaacataccttaagaaacttaaaattgagtataaattatacaaggtatgctcttagaccacagtggaattaaactagaaatcaacaacagaaacatagctaggaaatcccaatatatttagaagttaaacaacacacttttaaataacacatgggtcagtgaagtctgaagagtaacataaaaatactttgagcaaaataaaagtggaaatacaacttataaaaattggtaggatatagcaaaactagtgcttagaaggaaatttatagcattgactgcatgtattagagaagaaggaagatataaagttaattacctaagtttctgccttaggacaccagagaaagaacaatttaagcctaaagcaaagagaagaaaagatgataaaaatgggaacacaaatcaatgaagttgaaaacaagaaattattagaaaaaaaatcaacaaaccaaaagctagttatttaaaagactaataaaattaataagcctgtagccaggctaaccaaggggggagaaagagaagacgcaaattacaagtattcagaaagaaaagaagattcattgctgctgatctcttagataataaaaggacaataaacttaacttagataaaagggaccaatttattgaaagatacaagctcccaaaactcacacaaggaaaaatagatgatcagaatagactgtatctgttaaagaaattaaaccaccaaagctgaataaggacaaaacaagaaaagtataggtcaatatccttgagggacatacatgcaaaaattctcaatagaataccagcaaactgaattcaacatcacattaaaaggatatggtcatgatcaagtgagctatcttaagtcatactatagacagaagcgaacatttgaagagaacatgaatggcaactttgaaagttgaaaacagactcagaggatcacccttgatcaggtgttctcaaactttggcatgcatcaaaatcacctggagggtttattaaaacacaggtggctacctctgagttgttgatttagtagatctggggtgggacctgagaatttgcatttctaacaagttcccaggtaatattggtgctgctggtcctgggaccacattttcgggaccacattttcagaaccactgccctagatgttcacaataaacactgatacggaaaaccagtagaaaatatctgtcatgtgtctgaatttttaggaaacagctttaattcttattgtaaattgacatcttattatttataactttactttgaatatgtttatctctagttggcctgcttgtgtactattgagttaataacttagtaattagtctgggttctttgctacctaatgagaatagtgccatctagaggcattagcccaaagggccaccatagcgccaaaggaagctgtggtttctggagagggtgagagggcaactcattatcatcaaggacttattgacaacctactaggttattaactgtcatgctacaagggtatacaaagagttagaattgcttgccagtctccaccttttaggtttgtgactttctgtatctgagtagctcaaaagttctgtgaaggctaagtagggctctgggccttggaccagccccccattcagctagaacagttctgctctcatctgttgtacacattggaggttatgtttgcaaatgtatgctatagtggctttggataggcaacacagatatattatttgctgtccaagattgtcctaaggtactgattttctggcatgcaaaataatggcgtgaaaaatatgtaatcattgagaaaaagggcataagctattaccacacatcaaatgttgaaagtatgttttccttcatattagcacatgttaaaattatgaacagttggaaataatattctagtagaccacattatcacaatcataagttgaatataattggaagaacagatgttcaccaatgtcagaaggggatgattcgaggggaaaaaaagtgtgaaaagaaaatttgaggagttaggagtataaactgttttctggatttgatttgctatagagtcagcacacatgatgggaaattcattatcaactatttcaagtcattgtttagaaagtatgaaatgaaagctagaaatcatgctggttttgtattagcagataaaaacattacctaaaaaagttatacaatcttgcaactaatgatgaatttgagtcatgcttatccaaagaaacaataaactactctcactgcagtcccccaaataggaagaaagagagaaaacccagtggagctttctcttgccaggactgggagtggcagggcaacaaggaggtaagatggaatgactagatgagcccaaggcaggaacaaccaatcaatcaactctcagggctcacagtccctagaaatgaaagcacgtaaatctgtgggtcagaagagcaaaaaaccaaagtgcagagcaagagaagaagttaggaatcaagcaaattgttaagagtcccagggcagacagaagtagggagagtgagcattgcagttaacgtccataacacagaccagattgtgcgctcctctcttggcaatctataggtatcttctcattgatcacagaaccgagtccagactccttggtgtgaagttcagtttcctacttcatttatacccaactttcctttttaaccttatgcttcacctttccatataaccacacatagccacagaactcatggctttttccaagtaacagccatggaaacatggctgtttccaaaatatcactttacaataaaaagtaacacactttttatgcctttttcttttattgtttgctaagtctataacattatgttctccttgctgaatctctctgctgtttcctgctaaggactgttgaagtccttagcagataattggttttagtcaagtggaaagcataatttgatgactgtggttttcaccgtttggagaataataattaaaaattattttataaaacatatgcttggggtttacaaattttgaaatttgttttctaaataagatagcagtgttaaatagaataattatctcccatctccttcactgtaatgcatactttaagagctaacagagttgtaccagtgtttagatacagggagcttacagaatacttagggagggagctggggtttgatgagagtgtactcccacttcagcctagtaacctcaggacagttgtgaaaggaaggccttatggatcgatgaagtaggtaagcctacagaattagggaccacagttctcattgagccaattcactgatattcagtatcaacccacaacatctttgggggcttctgtattccatgtgagaaagaaatcaatggtgattttccctacaaaataggtgtaagatatctaggaacaaccgcatgtcaatgcattcttttttttaaatttattttgagaaatttttaaaaacgtagcaaaatagagttatataacaatcaaagtttctattactcacaattgacagttaacattgccatatttacataaatattttttgttaacaaaataagtgaaataaaacaatacagaaaaaggtttgttttttgtatcccatctctagttctatcatgaatttagagtaaatatttcatgtctctttttatgtttgtagttatatatatttatatatatgtatagcatggtgaacaacatattatttttttgtgtatttgaaagaaattaaggaggaaactttttattttattttttcttaaaaaaaaaggtatacatgagcagaatgtacacgtttgttacataggtatacgtgtgctatggtggtttgctgcacctattgacctgtcctgtaagttccctcccctcaccgccccacccctcaacagccctagtatgtgttgttcccctctctgtgtccatgtgttctcaatgttcacctcccacttatgggtgagaacatgcttcacaaggaaactgtattttcatcttgatcaaagaattctttaaaatatgaaatattattcttagcctttcaatttttacatgcaagttgtttagttattaagatacagctttggagtaatgactgggggcaggatggaagggtttagtagctgagcaaattctggtgtgagatgtagttactgtctgcagactcagtcctaccaaaggcatgtgtagtgctaatctccagtcttgtctgttccatggtcagagatgaccaataaatactgtttgtatgaaaataaatagttgaacttatacatttatattcagtatatagccatatatatatatatatatatgaatggcagttaaatatgtagttaaatttaaactgttttgcttggattcagatacatagttaaatgtatacatttatagtaatatacatgtaataaagaatatcttctagttatttatcttgggtagagtgggaaaaggtacagtactttttatgaatcaaagggccgttacccttctattgtgatccaataaactgtgttcttttctcacacaaatgcttgagatacttaactttggcatttaatgattgtgtttttatctatgtctgtttcctgttagtagattatgatctcctgaaaggcaaaggtagtatattttatttatgtctgtactttcaataataccaagggccaattagtcactgttttctgtcagagtagtcaattcagttcatgtaaaatgaagaaaataataatcatcagatttatctgtgttctgaggctataagggaatttaaaattgaaagcaattttaatgactgcttaataactttaataactggagcagcaaatttgaacgattagacaaaaagttaatgcgaagtactgatattatttaatttctctactaactatttcagaacaagttgtgtgtaccttttgaaataaactctagaaccgttaggtgagctgtgaagtgatatctaatagagatgggtctaagaaataggctcaggttctaagagaaaattgtcaatatgatattggggctggggttacagattaacagcatctcaaggcagaagaatttttcttagtacagaacaaaatggagtttcttatgtcttcctctttctgcatagatacaataacagtctgatctctctttctttcccccacaatttattggtaacaatatggtggattggattgtcatccaccaattcgggcagttctcaatttagaaatctcaatttagattatgttccaaatgtgcttcattgattataacttggagtacattttccttatagaaagaatggtataaatgatttccatattagcattcttctggttttgatacaattgaatgtaattttttctacattttttggagagtaagttaataatttctagcattttctcagaatatattactattaaaataataggaatgaaaatatataatcaagtatatagtcttttaacatttcattttctgctagtaaaataatatctagaattttatttactagtaaaatgaaaaaagataggctgggaatggtggtttacgcctgtaatcccagcacttcaggaggccgaggtgggtggatcacctgaggtcagaagtttgagaccagcctggccaacatggtgaaacctcatctctacaaaaattcaccaggcctggtggtgcacgcctgtaatcccagctacttgggagtcatgagaattgcttgaacccgggaggcggaggttgcagtgagctgagattgtgctactgcattccagcctgggcgacagagtgagactccatctcaaaaataaataaataaaaataaattttaaaagatagcacatttaaattttcagtcattgtacatttttagaaagtactttccccattaatcttaccactttggcaaacactagcaagtactgtgttcttgaaaatctactgaatagttcccagaggtaaagctagatctacctctgaaatattctgatttataatgtcctttaaagtttatctgaaatacaatgttttaggaccttatttatgatgtcagtgaaattttagaatatttagcccattttctttgctctaaccatgtaaatgttcttggtatatatttggaggaggacttaaataacaggaattgaaatgatgacaatcatagcttttatttatctgcttatgccagacacttaaacaacagccattggaggctagcattattatctctattttgtgtatgaggaaactgaagcctaggttaaaggatttgctcaagtcacacagttagggagatgctgagctgagatttaaacccagatgtatctcatctccagagcccgtttatctttgtactgcacctactgtcccaacagaaggaaaacttggatatttccaaatgctgcatattttgaaaaagaacttgggatgcaaatattaacattattgtggttttttatatcaaagaatgatatgatcacttctgggtagagtgattagagaagcaaggtataaactcttcaaacctaaatataatatttcatgcataaaaaggtggatttggagccattagaagtcctaccaaagtcaggttccagattctctctcttcccaattctgtttcatgctgaacttccttgttaagtggagaatggattgtaagctgacctgggaaaaagagtgagagcataacatgtttaacctgggagattaatagtactatggaaatagggaagtaagcctcattgagtcaagaaaaagcttttcaataactgtatgctggactttggggagcagtgataagcaagacctgaattgtaaagtaggagtgaattaggagtagtatagtgagataaataaacagggatgttgtggaaactgaaaagagagccactttactcctcacatcatgaatcataaaaaggtctctcagaggagataacgcttgtttcaagtttgtaggataaacaggacttagactaaaaggggagatgagcacacacacacacaaaaaaaaccatatacaaacaaaacagaagagtagtttttctgagtttggggtgcctcttgaatgagccataccgactgtaattcccatcaatgccttgcaagtcatgagagcaagaaattcagtgttcagtcactcaaattttaggaaacagttgactgtcttgtgatattttgaaatattacaccctgtcattgggttatatatatgttcatagggaaaacctattcaagttttctacactcgtagaatattagagtggccagcatcctcagagatcatctagtcagttccagttttcattcagccataacatttgctgtgtactagtcacaggacacatgaaaagatggaccttgccttcaaggaactcacagcctaagagaggaaataaacatacaaacagacaatgtgcaagtttgataaagtgctataataaaagaggtactgattaagcacagaagagagctcattaatttttcttgaggattagctaggtaaagttttaattaggtcttgaagaacctagaagagcagttcatttgtgacagggagggaggatatttcaggtcaggactgctgattatttaaaagggacagtttttaacatttctacctaagtttttcgatctggattctttaaataaataaagattatctaaaataattaagtcatgtcatggactttcttagttgtctattagtaatataaattagcctaagcagctggttctcaatgtgtggtactgggacccagtgcatcaacatctcctggaaacttggaaatgcaacttctcaggccccagcctagacctactgaaacagaaaccctggggtgtggagcccagcaatatgttttaacaagcctttaaggggattctgatgtatgctcaagtttgagaaccactggcctaagctaacagtaatacacagaattattgaaagttcatggactttgaggatttggagacctgaatttgaatctcacctctcccacttaataagtttgtgactattaatctgtcacctaatatctatgagcattgggattttcacctatcaagtgaaggttataatgtttccttcccaaaattgttgtgaaaattagttaatataatgaatgcctaatattatcactggcacactgtaggctttcgataaatggtaactgctttttatcatgattgttatctttttcttgatcttttttcagtgattacttttacttaatgaaaacgtgctcatatttttgcttttagattcaaacgctcaagaaattaaggacatttatggactaaatggacaaatagagcacaaactagctttcctgagaactcatgtgccaaaggacatgaaacttgtgctcattggccattcaataggcagctatttcacacttcagatgctgaagcgagtccctgagctcccggtaagtaggtctccagaggtaactgtgggtgctggactgtgtgcctgcacaaatcctcctcacctttcctatgttcttttgtctcttgttcagttgataaatagaacagagagagggatatttgctttctgcctttatccttatctccatattacgatgggcttatgtgaatgtatgttcataatgtttcaaagaataatgctgagggagataagaagtttctgaaagaatgcctttgaatctagggttatcggagttcttatgttacacattacttgctgttttttataaagaaatatttaagagcggtcactaggtaagacctagacaagaatctgtcttttgtgggaaggtattttgtaaatattcttgcctttttcagaaggaagaaatgtatcatcatcatcactgataggcaaacagctgtctttatggaacactacatctttattaattcataagttcagattcttacctattctgtatcttggcagcctttttgagacacatattcacaaatgcttgcaaatatttgttggataccactgtgtgccagatattaagtgaggcgctagagacgcaaagacctatttaaagtgcccaggaaagcaagtgaactataagagatataaaacaaaacaaaaaaattgtactttcactagcatataccattgaaataactcactgaatggatgcaattcacaagataattcatttctttattcaacaaacatatattaagccctttccatgtgtcagatcctgtgctatgttttgaggacatcccagagagtaagacagtctttgaagtaggagagcctggagtctgcttgaggagacagtctaaccaatagatgtgatacctactgtcttgtttcagttcagggggtgtgggagcatggagtgctggtaaacctagtaatctgaagccaagataggacgtgatcgcttcatggctgctttgtgctaggattttgactgtttctcactccgtgggataaaatatcttcagtggggtctcagagctcactaagcactcgctccttttcttgccagcttcacctgcttgcttcttattcgtaattgcccttgggaaatgtacaactatagcctccctcgctgtggtttttgatactaaatggaggttttaaattattattgggtataagaaaatatgtttttcatttctaagtgtgaattcaataaattcaagattgtactctgttctctgtattattgtctactgtgttgggtgttttttccctaaataaggtgtcttaatcagaatgcaggctttatttttccttttagcattttgcacagcttctaatctcttttgtgccttcgaagtctcctctagtactgtgtcatgtggttgccatctttatggtgtccagctctgcctcttagtggttctacttgcacagttgctgtgagttctggcagtagaatcaggacacctaggttccaatatttattgtccttttttttttttagtctgtctgatcttagacaagttattgagtctctactttagttttgagtctcaacctcagtttcctcatttgtaaaatggggataatatgttcttcaaagtatttttgtgaggaattatataaagcatcaagaatggtatctgtaactttaaagttccaaataagtattagctattattattattagggaaataactctagagtcattgtctcagtcattaggttaactattgtattaggtatctattgctgtgtatcaaattgccccaaaacttagcagtgtaaaacaatacacatttcttcactcgtagtttctggtcagaagtctggccacagcttagctggattctctgcttcagggtctctcccaagattttaaccaacatgtcttccagggctacagttttatctgaaggctttagttgagatggatctgcatccaggctcactcttgtggtttttgacaggatcccattccttgagagttgttggacagagagccttcattcagcagtggcatttggggggaggccaccttctttaacgtgtcggcctgtctagctgacttcattagagcacacctggaagaagagtcaaggaggcagacagcctgctagcagatgaaaatcacaggctgtaacccagttacaaagtgacatcccatcacgtttcctgtattcttgttagaatcaagtcactaggtctagcccacactcaaggagagataattacacaagggcatgaatactaggaggtgaaagtcactgggagctgcctcagagctgcataccccatcattctaaaattaggatttcacttgtgtgttgtgcagtcaagaacatggacataggatgtacataaattgttgcatttatttactggtgtaggcaatgacttggacctgtcaaataaaatgtagcaaactgacatgaaatgtagttatttgttgttagttgttccaggtgtcttaaacactttaaaaacattaaaaaggatacttgcatatttgaaataatagcattactgttctataaacataggaaagaaaatattcattttggagcccatcacagactattattaacttaatcacagatctgttttggtttttgtgtttgcttcagatctgttctgcatgtgatgtgtggtttctcttttgtgtgtttgaaaatgattgttcaatacattgtcttgaacctttctctctttttgggcccatattcacaatgtctgttgggaaagaagtagaatgcatctcaaggttaatgtgctttcttatagctttttcagcatcataactttctaattattgtcctgccttcaggtgtccttgcttttgcaggaatagtggtgaaaaggggaaacaaagatgaaacgtgaacttaacctactctatttgtggagacacaactcaaactgattatagagttttcagaaagatatgtgaagctgtgttttatcttcttaaaaagggtgtaagctagaaaataatgtgtgcaataaattgtccaaagggtgtaagctagaaaataatgtgtgcaataaattgtccaaaaggtcacctcttttggggggtaggaggggcagtgaacatctgtatgatttttaaattattattcagaagctttatctggtttcaattaactacattgttgaaattccctaccccatccccagcccccattaaacacctgggtcagtgaatattggtggtgtgatccctgccaaagtgttgaaatttcagtgtctctgggctactctaagacaccgcagtgcctgcatgcctgaagttagcatgacatgctccatttaagatgcatttgacaaatatgtttgtgtaagccagaatgttacaatccttaatcattttgccaaaaataagttagctattatgttttataacatatgaagtgtgataataagaaacttgtgtttccatctcttctgttattttttactggaatatttgactcttgtaagattttgaggacatatgtgtagtttagtagctagctggtttatttagttttattttggttcagctctttgtaatattttcataactaattataggcaacttggtcttaaatcattttaagagacttattgtatatgtcagatatactgtctgacctgtattttaatatactaaaaaaaagttgcccctttaaaaaaatctggcatttaaagttgtttatctaaacaaattccatacatagaattagagatattcttcatatattttgaaattagtgctcagtatagggaatttaaagagaaacttgagcaaataggtaattgaaagactgttaaatagtagctatcatgacttacaataataaacataattgtttttagattcatagaatcttagaactgagataggctttagagacaatctggccccatctttcattttatcagtgggaagtgagagaaaggtcccttgccagtattcagccttggctctgcctgaatctggggtggggcatactggtattagctgtgagtataaaaagaatccaagaaggtattgatggctccttcaacctgtggatgatagcagagcctatagctattacagtgtgccctgcagtgtacacaactgctaagttcgtgtgactcattgtgttggtgctccaagagtaggaaaccccgtgaatgctctagcaatttcaggattgtgtgttggggtggggggagaataatacagaagcaaaaaagtagtaatcttatctccactatctagaatcttctttctcttatcaaccctctatatgttaaaaatgtgtcacctgattttgccagtaaatctttttcataaagttcaagtttgggagttgagttgaaagcccttgattcttcactgagtcttggggtgaactttaattaatataactttaattttcctctaagaatttatataacctttaatgataacatgttctcctcttcgaaggatatcagatccttcacaaacttaattttttatattatttggccttctgtgcataataacacagagtttcctttgtcttctggttagcaaaaatgtcttctctctgaatgaaatttctggattacttaaactcactctcttaagtaccagactattttacccaactggataaaaatttgtctaaaatatattacttacttatctgccttcagcaatgcatattgactatagaggaattttttcttagtgatttaagggcagtggtaataacactattattttgatagtgttatgctagaataaaatgtaatcaaaaggaatgtgcctgtgtcctgaaatttcttaggtgataatgctttttcattttttaaaaaaaatgtttcatgtatgtctattttagtttttctatctcctctctcagtgttaagtacttcttctcttccctacttctaatttattgctactaatttgctgtgggcagagaaaaccagtaactacattataatttttttcagtaggaatgaacaggtcctaaatagataaaggagtaaaattgacagcattaaatgtgtggacattgttatcactcagcctttttttctcttcttttgagatcctcaaaaaggatgttttggggcattttaagtactcaaaattttagagactcaacatacaactatagctgagaagtttgcaaaactttactaaaagaattagaataacatgttagatcatatatgttttgattcaggaatatacctcatccatactaaggaaaaaatagcttcagtgttctccaacaatgagattattgagactgtggtttacttacactattctgctgagccttcatgtctgctgtcaaagtaagacatgcttgtaagaagcattcatattatgtcactcagctatgtttaacagttgagataatctggagggagggagaagaataggaaataactcatttgtcgtagtaaattttgtcagaatcctatccctagattcaagtgacaagtgacaagacacggaaggcaaaatgaggcagtactgtaaggctcagaaagttttgtggagagggttgtcttctacctgggaagctcagaaaaagcttcctggaagagcttcagggccactgaaggatgagttgtatctggaagtagaggattttatatggtggctagggggtactgtgcattctaggcaagggagacagcatgaagagaaatggttttcatcactgggcacggggagagggcagtgggtggtgtgactgggttgcggcagagtgtgcgtggaggggtcgatcgggcatgagattcaaggttgatagagatggacaaaaagctgggctagggagcatgggctcattttctggacagcagaaagccattgaaggatctctgatgatagcagtcatgcatcaggtaaattaatctctcagagaaaaggaaaatgagatggagatagaaaaagtgcagcataaaaagtgaagatccaggtgacaggaaagtttactagtccaaataagaaataatgaagacagtgtaagggataaaattgcccagggaaattgttgagaaaagagagaggccatagatgtgtatcagcggaatgatttcatttgccataaaggagtgttacaggatctttggggtgttgctgttctggccagaaacctgtggttggcggaatctttgcctgagttttgctcgggcccactgggctcgttccaccgactctgcctgacaggctatgctcagctcatgctgccggcctggatcctatgcctccaagggagactagagtcaggcgtggagtgatgaggggtgtgtgtgagcgagtatggggtccagccactgcacagtcagacatgctggctgctgccatggggcaggcagctccaggtgccagcatgggtgtcagctctctgtgaggctgcagctggaccaggcacactgtaagcagcttccccagctggcaccagggaatgcggtggcacccagaagcttagagactccaggaaccacaaggccccaaagagggagtcacagctctggctcagggagctcccaggtctgggctccctgaagtgctgcagattttctctccttctcttcactcgcaacatggcgagcagggggcatgtttcagctttgtttgtgttacagcagctcttttagcctcgccactcatcaggtcctgagttcttgttctgcgaccaggaagaatgaggtttgcagacatgcagagggtgagcaagacagagaggagctttattgagcaataaaacagctcagagaagacccgcagtggacagctcctctgtgtagccagggtgtcccagtgagtgttcagctcctagcagagagggtagctcctctctgcagctggtcatcccatcctgcagctctcagcagagaggaggccctgtaggtggcttctctgtgcaggcaagtcatccctttgtctggatctcttggcagagatagtagctcctttctgcagcaggtcatcccattgtctctctgtcctctgctctgctctggctgagcccagggcttttatgggcctcagagagaaggaagtgcccactgattggtccatgggcagccaggggtaggcccagaaagggcaccacaagtcccctactctggtccctgggactggcagcctggcccctagccttcaaaccctccctggcctgcaggtggggcctcaccggagatcctccctcttctgcccagtggcccatctgcctcctgccagcatctaaggcacccaggttgcttgtgccaaggggcacctgcaggccagtgctgagccgccctcaacacaccccctcaatttcccctcatgcttgtcagcacccgaagtccagaggggactgaggtggcagggagctggcatgtcagtgctcctcaagtgtgtgcacacccagccgggctgtgacagtgaccaggcttggccccaaccctactccaagatcagagcgggcaccaggagcagggagaggtcatggagtggagcaggcctctccaagccttcaagggcaagggaggggggacttcccaggcccccaagggcacagagaggcctgggtccacagccttgtcttgggctgctgcctgtttctggctctagtggctccatggagcatgaagcccagctgcaccccctcacagcctggggcaggggctctaggtacttgctgggcccaggccagtgtcagggtaggggcaacatctccatgagctcccccagtggccctggcattcaggggcagctgggagctccccctcgcccagattgtggccctgcccagtgcgcacctccaggaatggattgcaggccctggtctggccgtcaggagtgtcaggcctggtggtcaccctgatgcagggcagaccctggggacagagccctgggcggccctgcgcagagccccctcctgaggcacagaaaccctccactgctggccggtccccgaagcaggcgtcacagtcagctgcctcaaggacgtggggcacaggggacccaccaccgccattgcagctcctgtagccacttctgctgccaccgtctatgcctccccactgtggatagccccctgctgccatcaggaggggaaagaggtggaagtcacagaaagaggcagaagatataataattttccaaactattggctgcaatccattaatggatcccaaaatcacttcagtgggttgcaaccagtggatcagtcaagacagtagactgtgctataataacacaatgtcagtggcttttaacaacaaaggtttgtttcttactcatgatacaaatcctttgagggtaggctgcccctatgaagatctctctatgcaagctttctccagaatccagattgatggagtagcctctgcctggaatattcaagtcccatggcagaggatataaagtgaatagtgaaccacacctacattttaaaacctctgcctggaagtgaaaattttcactcctcaaattttattggacagagcaaatcatatgaccaagtcagccatcaatgaggctgtgaagtacagtcctccccagagaatggaagcgtctgtttgtgaccaatgaaacagtgtttttaaacaatgtataataaaatcaagtaaaatagaatagaataaaaatatattgcagtaaaggcatgtattatgaaacttttgtttcactttgtgtgtgtgttgataacatagtagattataatgtcgaatgtatatcttactgtgagttaaggtaaaaaaaaaaaaaagtttgaaaaccattcatctggactagagtacaccacagcagctaagaacagagcaagaatgtcaagaaaggggtagatatatggaggattacagatggccacagatttttttgtcattcctctcaagaaatgaaacctgtttcccttcccctttaaatttaggccaagcatgtgacttactttcaccaataagatacagtggaagtaatgtacttctggtagcttcaagtccaggccttaagaggactaggagcttctatttcctccctctcagaagccagctgctgtgtaagaaagccgactgccctgagaccacgaggctgagagaagcccaagctagctacgtaggaggatcatgaggcaccaggcctgagtgaaaccttctcgggtcttccagcccatctcagcccagcccatccgccactgaatgcagcccaatgagtgaccccagcccacaccacatggagcaaaagaaccatccaactgagccctatttgaattcctgacccacagaattgtgagaaagcaaaatcattgtgattttaaaccataagtctagagatgctatgttatatagcagtagataatttaaacaaggtaacagggttgaatgtaacaaatgttgaaggcttcaggcttctagagtaaaaggttcttggtgtcctcgaagacagacttttagtgaaataatgggacaagggggttgcaggaagttaggtgataaatggatagtgattccactggccagtgaaggagaagaacacataataatttaaggaagaagctggtcaagggaactttttttcctgtaagtaggggagaatttaacatatgctgagaggaacagcccaagcgtagagagatgtcgaaaatgaaagacaaataggaacttttgttggaacaggtttccttccatttgtcttttagtctacatacttgaaaacttggaaaatggaatttttcttaatatttatgtctttgcaaaagtggtttaccccttccctggggtgtagggggaacatatattacatatttggttctccttttccatctagaaaaagtctagctcaatttttaaaattgatgttattgtcattactaacagtgattatacctaacattcatttgaaatttataaaacgtgttcacatgtaacaaggtattttaacaatctgatttttcccatcttaaagatgagaccgaagtgccaaggagccatgtgtccaacccatatgtcaactagtagaaagtagcagagctgggactctgtattctgttttctaactttcccactacctgttttctaggtgagttagagaggtgatgattacagatggttagactaagttgctttcacaaatcaccaaactatttggcctaaacttaagatttctatttttgcttttttaatatttgagttcttcaaacacacagtgagtgttttagtaggaagcaggtgaatgcattgggaggagttcagagagaactgagagaaatgacagcatgtgtgagtgttctggagcataggagataaagagactgttgaggcctgggccaagggcagaaattaaactgaaaagatagtaaatcagagtcctagaattgagctgggaacagaaggactatgaaggaaattggaggattctgcaaacatagtgcatagtagtttgacagttacctctatgtgacccattaataaatcctgctgcgtgaaaaacacaggcttagacaatcagcacctaactactctgatttctgaaagattttccatttcagaaaaccgtaagtctcttactctaagtttgtattgtagatgatgaaatgctatttttccaatcacttatgcatttatttaagtatatatgtatctgcatatttgtgcgcacacacacacattatcttttctgagttacccagaataccttgctaaaaactagacacatggacagtttcaacttttcaacttcagccatttttagttatctgtgtatttttttaaatcctgaaattgctttcaaagtggaaaaattgtgtgggcttttttcatcttttcataactcaaaaacgacttaatatgtttttctcaaactttgcaaaaaaaaaaaaatcacctttgggctgaaaccaagcatggaaaatttcaccacaaagggctaattttttggaaagctgcaagaaagtgaaaacgggtttataatagaacattcttcatgcatgttaatacttagtactttatctaatgcatttcatctgagaatttctgaacacttttcagatttaaatattgagccattttaatatttgtgtaccaatgatatattgtcagatatcgaaaagttcccccatcctctcagatgtctaatagcttgggaattagtgagatgtgtttaaaatgacaggtggggcaaatgaagttaagtggctgctagccagagaaagctgtatatttactgcccaacacattttatcactacctcttcttggcccaggagtactgtagttgtaagtaaaatataatagatgacactgggcactaatttgaataagccaacatgtctcaaagtagtatcaacagcacctgtgatcttgttagaaatgcaaattcttccccctcttcaccccaaggggtggggctcaccaaccagcatttaactagcactgcaggtgattctggtacatgcttaagtttgagaaccacctacctaagctttccaaaagcttggaacagaatgcattgaaatgctgtggacagttaaatctgtccttggtctttctgtgatgtcagctctgtcttctcatatcccttggaagcaggaggaatatgaatcaaattctctgaaggaaaggtcttctgtgttaatgtgctctagttctttccacctatgacgttgtccataaacacagagactcccttgagtaaatgtgctgatatcagcttgttcagggtaacagcactaccaagatgtattttctcatttccttgaattattagggtcaaaactgaaatgggactataaatttctttcttatttctttggaatcttttaagttctaagatggtatcagatgtgtcagtggaagttgattgaagctctttggtgtgtaagttctcaatctgacgctttgcagtagacctctgcatttcagcaaactccatggtctgtatttttgtgtcttcaggcacggaaatagttgtttacgtggcattgtaacaagttttgaaaatattaccctggtgatggaagtcactagtctgtagtatgtgggcctttagctaatccttttagcttaggttaatttcttacaataaataatttgtagaaattcataaaaaggacagcaagttctcaaagatgcaaaggatgtgaacagataattcactgaagaactaatatatcaaaaagtgtgtgcctaccacaatgtgtgatagtgtttaatgaattagtatatagtagtatacttaatgatgtctgtttatattgagtatggtagtatttgctaatgttcatttgatgaatgaacctcaacagttatcaaaattaactattactattacatagtctaaaagaaaagttgtgttgtgtatgtgtgtacttcgatatccattttaaataagtttgaacaggtaaataccaggtggcttatagtagttttctctggtggttaggggtaaaggatgtattggagtgaaaactctacattgtttctgcttttctttataatgaccatgtattatcagaaaaaaataatttccattaaaaaagtattcataccctttgaacctactaattcttttttttggaatttatattaagaaaacagacaaagatagaaaaaatcatgtgcaaaactattatctattataacaaaaaattggaaacatcctaatgtccaaccttaaaggcaaggttaggtagagtatggaaagtacagccattaaaattatatttgcaaaagacattataatacataaaagttaattatagaatattaaggatgtcagaatacatagagaatgtgtgaatacaactgtataaaaatcacacatggaaaagcttgataattataaaatgaatttagtggttgtatttaagtggtgagtttgggttttttttttctattttttatttttgaattttctgtaatgacatatatttattcactattatagacatttaatggtcatgcatttttctctctctttttttttcttttaaggtgatttgttcatgttactttagagcagaaagttgttccaggatagatcttttttaaaaatttaattttggattcatagggtacatgtacatgtttattacatgagtatattatgtaatgggggggattgggcttccagtgtaccagttacccaaatagtgaacattgtacccagtaggtataaattatgtttgctttgtatattgtcaagttcagtgcagtccttcttagggctcaagttatcctacagggcccatattaaataccaaccttcttaagtccttctgggtacaagatagtttataaatagacaaaagaacaaataagtcattagccaaatgtcacttcctgcatgaaaactttgctgattgctccgatagaatataacttctgctacttttgggccaatgatattgtctcctgtagcttttctgttgtggcttgtagcttaagtgtaatttttttttatagccacaagaacaagagctggcttgttttctttgtacccttgcaagttctagcatagggtcttacacatcccaaaaggaagacatccattttttttttcatttaattaaattaaactatatgaaagttacatcagcagcttctgctggtaaaattctcacttggttcataagtgccactgacttcttctgttcatacagattaaccactgcattgaccttaaggaaacagttgtcttgttcgacagtgaaagagaatacagatcagcagcaagagttagcagctatatacatccaaaggagcaatactaattcagcttctataagatagaattgaagaatattattatggtctcggaatagttgaagatttcttaaattggatagcacaaatgtttgtacaaaatactgctgtaagtgaaaggaaagagcttaggggtgtggcggacagactttagggtgggtggcaccccatgatcctcacctcctaatgttcattcctacacgtaatcccctccataagtggatatgactgatgacttgcatctaaccaacaaaatatgataaaggtgacagacaggaagcacatgattatgtgtatgtgatttacatacctaagattgtaaggcctgtcttgcagaagtctctctcccatgctggctttaaaagcaaactgccatgttgtgggttgtctatgttgggcggcctatatggcaaggagttgcaaggggccactagaagctgaaagctgccttccgtcaacatccaacaaaaaaactgaaatccttgatgctacactacaaagaactgaatcctctccacaaccttagtgatttgtatccttccccagtcaagcctcagatgagactgcagccctagctgacaccttgattgcagtctggtaagatgctaagcagagaacccagctaagctaggcctggactcctgatgtgcagaaactgtgcaatatcaagttcgtattgttctaagctgcaaagttttagtaatttattacatagcaatagataacaaatcaagaagaaagtaaaagggtaatagcaactccttgttttctttgcaggaaaacccacctctaagaccagtagtggccctaagttagtatcagcattgtagcagtagcagctagcctagccttttcccctgtcacttttccctgcttttacactatcttacccactcttcctactccactcaattacctagacttttggtcttccttgcaatttttttattaacattacttctctccccacctcaaaaaaaagataatttgggttgttgataagcatgtcttttgatagcttgcctggtgattatttgatgtaataacaaaatcacaggttgggattcattagcatcattcatcctactctaggttgaagcagatcttatttgaaagtattgccatattcaaatctcatctgaccaagaggttaatagtggtaggatattgagaggccctgtggtatgagagagtggcccatgctaaggcagaggtgatacatttgtgaattcccttgcatttgtgtggatataggtctgaaaaatgtcgcttgtacctggccacactgaagccttgttcatagaagagcacattcatagagcctcagtggacagactataactatcagagaagacataacagggaggggagtggaaacagatgaacaacattctgtgaaattgcctctttttggcttttgtttagttcagatagaagcttctttctaggtctgtttgtggagatgagaagtatgattgtgatctttaagaaaggaaaaagctctctaatatggttaaccagcatgtatgaggttgttttacgctcacttccagcttgtatggaaaatctgtgaacaatatgcaatgtaggccacaaaaaatttcctgaaatggaaaaagcctagcaggcactaaatgaaagctaggcactaaatgaaagatgcttcacaagaataaaatgtggttgctttgagatctcacattccaggccatttcagactaattgtatttgtttgggaagaagcaagattgtcaggtatcaggaaggtgtattgatacataaaagatggaagccagcgtcatactgcaaacctctccctaggaagccagacagtaaatcattttccagggtcagtcatatagagaccagagggagcatgcatgaatgaagacacagtctagaaactccatttcaacaaatagtttctcccctcaccagtactgttatgggagcttctgcaaaaagccaaattgagtgttagagattcagccttttcccctttcataatctactacccttaggaagatgctgaggagcttcttataacctcttacaaaggagaaagtctctgagagcttcagtaatattatattaatgtcaatagacattttttcagaagagatttcataaaaacttaaggacatattctggttatctgggtaccaggagggttctccttaaggcccttgtttccttccgttcatagttgctgtgtttgccttacagtccctgcacttagggctccatcctgactttataatttctcattgtctagatatatattttcctatctatgtgcctttgttgagctacttcctttctgctttgtcccacaccatctaactgatgcctcctgttcttctggaaaatcatctcaaacatgagctcctgtgtgaactctttcctgattcttcccagtcatttttactctgtccttcctttggtaacactttttctcataattcttctatattctaccctatattataggcattgcatatttctttgatttttcctgttagatgtttcagctttccttttaactagagcataatctgcatacagtaactcttttgtttgtctccctgcctcgttctagatatttcttctgacttaacattctacttcactaatcctcacttgagctatgtataaacacctttaaactcatctgttacatcctcaattttagttattctattttttgcctataaaatttccattttattgttataattactaattcctgcaaatctccatcttgtcatttaatatcttgatcatattatagttattttaaactccctatctgactttattctcctttgtaccatcaacaatttttaaaattatcattacttttataaaagttcagagatcatatatttgacatgaaaataaataaagattgtgtctgataattccaacatctaagtctcatgtggttgcattcctacttcagctttttcctttgctttggttatattatcttgtctatccgtatgcttgtgtattagtccaggtttgccagagaaacaaccaatgggatgtatgcacatggaaagaggtttattataaggaattggctcacatgtttatgggggttgacaaatcccaagatctgtagtcagcaaactgcagacctaggaaagccaatgatgtaattgtagtttcagtccaaaggtctgagagccagaatttctgatggtttaattccagtccaaaggctggcagcctcaggacccaggaagagctgatgtttcattttgagtctgaagacagaaaaaaaaaaaagtcctagcttgaaggtggtcaggcagaaggaattctcttttattaaaccttttggttctagtcagaccttcaactgattggatgaggctcactcacattagggagggcaatatgctttactcagtgtaccattcaaatgttaatctcagccagaaacaccctcacacatccaaattgtttgaccaaatatctgggcaccctgtggcccagtcaagctgacatgtaaaattgaccatcacagcttggcaagtattttttttaactgaatacctgacattatatgtgaaaaattagtaaaacaatattagaatcttatcttcctccagggaggatttacctttgtttttgcaattattcttagggtaggtcactttgatgccattgggaattgggttgaatcaaagctatctttggaggggctggcctatttccagttcatcgttacttctagggtatagtcctttaatagtttccactgaaagcctagagtgccttctcttttatgggcacacaattcccaggtttttccttcaagctcacaagatttttcagaaactctcttcagcttcttggcttcttagctactgcttgcaaatcagcaaataacaaagaaaagctacttcagcactcctctctgaagttcctttttccctagcattttagccttcaaatctcctctgcctctgatgccttcaaggggactttaaaaaactttcccaacttttctaattgttcttggcaaggagattgctctccaacaagatagcctgccatcttcacctcctatcaacaccattagcagctggtgctgagctttaagttcttccagctctgctattgagaagtatgtcatttcaagtttttaattatttttgtgaactgttttcttcctctggaaagttttagaatattcactttattgtcagtattatattttctgatgatattccttggactatttatcctttttaatccagaaactggcatacttacacactgaaaactcttgtatttttttctctacttgttttctcattatttgtgtgttatactttcagaaaagattttcttgatttattttcttttccattatccatttctttcaatttttagttttttgcaatgagaaataggggatattttccctactttatcttccaattcatctaattaaacttttgattttggcatctatgcaaatagtttctaaggaatttcttgttcttttcttcctttttgtaatatcctttttatttttacttcatgggtctctctttctctctctctcaggaaaacattttttagagtttttgggctcctgcattgtctgtattcattctgaattcctttcttcatgcttttaaaaaaagtactgatctgtctcttgtaagtgaagctttcctcaaatgtctagtgcttattcattatccactcatatttaagaatgaggcaccaggctgggcacggtggctctcacctgtaatcccagcactttggaaggccgaggtgggtggatcacctgaggtcaggagttcgagaccagcctgaccaatatggtgaaaccccgtctctactaaaaatacaaaaattagctgggcatggtggcgcacacttgtaatcctggctacttgggaggctgagacaggagaattgcttgaacctgggaggcagaggaggttgcccggagccaagaccgcgccactacactctagcctgggtgacagagtgagactccgtctcaaaaaaaaaagaaaaaaagaatgaggcaccaaaactatcaggaggttttgtatgggagtgggtttggtcagctggtcagctgtactacagggtaatttggacaggtatccaactttttttggtgtggtattctccagtgtacatattttttctggagccattaagtctcttcagaaaaacattttcaaaccacttatctaacacacagcatcctgaagcaaacagctcaaggagctggagtttgcatgggagaatgtcttagcatttagtattttggctttcacttatattgtttttatgatgttccttttcccctgcctttttctgtgccctgtgtctccagatcaggagcctctttcttctatttctacacagaataaacctccaggccatgatggggttatggagaagttgcttgagggtattggatgaggcaagtgtcccaggggactggctgcctctcagccagcctttcattcatcaagtctgctctgtgccctgcactgttactggcacctgttatggtcttggatccatctgtgaacaaaataggaaaagaaacaaaaaacaaactgcttatgcagaatttacagtttactaaggagagatggtaataagcataaaaatgagtaaattaatatgttcaaaggtgatactgccttgatataaagagtggagcaagataaaggggattggaagcaccatggctgggggatagagggcagtggtggactgcaagtgatttttaaaactttttatttggaaataatttcaaacttagagaagagttgtaagactaagaatagtgcaacaacatgagatacacttttaccagatttacctgttgttaatattttacctcatttgctttatttgctcccctacacacacacacacacacacacacacacacacacacaaacacagacacacaatatttcttcttgaaccgtttgaggataaattgaatatattattgccccttatccctaaagacctccttaagatgttcttaagaataagaatattctcttaatcaaccacagtacagttatcaatgtcagtaaatgtaatattgatgtaatactttaatctaccttgcatattcccattttgtcatttggcccactaatgtccttgatagcattttccctcttccactatggtctggagaatcaggtattgccttgaattttcatgttcctttattctcctttagtatgaaacatctcaagcatattcctttgttttttcataaaactgacattttgaagaatataattcctttttaaaaagagattatcctgattttgtatttgtctcatgtttccttttgactagattaaggttttgcattcttagctgtaaaataatacctcataggtgatgctatgtccttctcagagtaggtcacctgcaggcacatgacatccagctgctcatcattggtgatattaatttcaatcacctaatcgagatgttatgcagaatttctccactgcatgctttactttttcttttcttttcctttttttttttttttttttttgtggcgagggtagttggagtcttgctctgtcacccagactggagtgcagtagcatgatctcagctcactgcaaactccacctcctgggttcaagcagttctcctccctcagcctcccgagtagctgggattacaggcacttgctgccaggcctggctaatttttttttatttttttagtagagacgggtttcaccgtgttgcccaggctggtttcaaactcctgagctcagacaatctgcctgcctcagcttctcagagtgctaggattataggcatgagccaccgcgcccagcctgcgtactttactttttcttagcaatgaataaagagtctatggggaggcacttttttttcatgtcaatatcctcctcttcaacgaaattttctcctagattcaacatccattatttatccttgcctgatccaatctttaccaagattttctaactgtagtactttcttcacataaacccattagaactcaatattcttttataagcaagaaccttccttcttatgtatgtttaatttgtatatatgtatttatcagcatggacttatgaatttcggatttattaaaggtatatgattcattaccatattgattttggtgataaaattattccatatttggccactgggagccacttaagtcgggctcctgttgtaactgcaattttaagcaagatgtttattaggcatcatagaagtgacctgctggaggtagagttagccacatggctatctagggtacaagggttctaaacagcagaatagttattacaaaggctttaaggccgtgagtatgcctgtttgagaaacagcaaggccagtgtgactggagcaaagtgactaaggtgtgaagtaataagacagggaaactttcattgcatttgccctccccacactcttctatatcctgtggtccagaagaaacattaaatacacccttatacccaccaacaaacgaagaagtaaaaactgccattaagccaacttcttgaatttattttgtatgttgtaaaatccagatagctacatatagatgtgtactttttgaaaatgtatcccatcagccagtgatagttgtatttccatggagattattccagtcgcctgtatttgaacaattatacaggatctgactgtaattagaaaaaggagatgggcccaagtcaacctagtacaagtttggatttcacattttaaatcattggttaaataaaaacaaagtgaagatgaaaatgtttcttttgttaaaaaagataagaaaatataaaattggagcttttattaatttatacatgtctcagagaaataatagtcacagagaagtagcagacagtggcatgcacttattagcttctcacattattatattacactggaaacatgggctgttactgtacagtgaaactagagtttaaggtggagaaccagattgacctgatgcatgtgtttatgagtttcacattgaaggtgcctggtttttgttgttgctgttgttgttgttgttgttgttgtcgttgttttctctccaaagaatacagcttagaatgagtgaggcaagctcaaatcatgtagctgtaactgtcaacttggtgaatttctgagttatcagaaagtgagactctgggcatgatgaggccataagtcagggaatatcagcaaccatcagaagctggaagaagcaaggaatggattctcccctagagcttcttgacacagtgcagccagggcatctttatttcagcccagtgatactgatttggcctccaaaactgccagagagtaaatttttgttatttgaagccacccatttgtagcaatttgttacagcagctgctggaaactactacattgccattgacacttgatcgctatttcagtacgaagacctgtgtatctgtcttgttcagtgatactgatttggcctccaaaactgccagagtgtaaatttttgttatttgaaaccacccatttgtagcaatttgttacagcagctgctggaaactaatacattgccattgacacttgatggctatttcagtaggaagacctgtgtatccgtcttgttcagtttgggggaaactttcatgcattatttctgtcatgttcccttccctccctccctgtcttttctttctagaactcacttgataggacattagttttcctgggttgggtgtctgattttctttccacctgtttatctctatgctttcagtggaatttttttccactcagtctttttcactgatatttttaaattgaagtataaatttttttttttaaatactactgtcttgaccaggcacagtggctcatccccgtaatcctagcactttgggaagccaaagtggaagaatttcttgaagtcaggagttcaagaccagcctgggcaacatagtgagaccctgtctctacaaaaaatacaaaaattagcctggtgtggtggcgcacacctgtagttccagctacttaggaggctgagacaggaggatcacttgagcccaggaggttgaagctgctgtgagctgttatcattgccactgcactctagcttgggcaacagagcaagaacttgtctctataaaactaaataaatttaaaaataaaaaaagaataccactttgtttactgcgtgtttcttttatatcccactcatcattgatacagtattttctcttagctctaagcaaattacaatttcgtctgattcttcattgtcttttcctctgagttttatatttgttgtgctgtctttcatgttagaggctttacctaatatctgtcaatctgttgtttctttatagtaaggaagtttttccccctgaaatcaatggatgaatgggaattatatttttaagttattagaataagttaaaaatgtgtaaatagaataaatgcatttgcagggcatttactctcataagactgagggagagcatatgtgtgtattgtggcttattgttacaactatctcctagattcattgaagatagaagttacgtttgtttcatagtctcctcattggcttgtagcaatttttcaaaagaaggaaggaaacatttttaccttacaataaaagtctgaaaccacatattttatggtgatctataggaggactaactggaaccagtcacagggtactgtccctaacagaatgtgcatctttcatgcagtaattatattttactagtggaaactacattccaggaaacctttacataaaggttttacaatgttgaaaataaaagatatgctttttacctttaaaaagaaaggtggaacttaattgagaatattatagaattatttcaaaatcagactgcttttaaaaaaacttcaacttttattttagataccgggggtacatgtgcaggtttgtcaaacgggaatattgcatgatgttgaggtttgcgatacagatcctgtgacccaggtagtgagcatagtacccaataggtagtttttcaatccccccatcctcaagtggtccatagtgtttattgttcccatatttatgtccatatgtgctcaatgtttaacttccttttgcaggtgagaacatgcagcatttggttttctgttcctgcattaatttggttaggataatggcctccagctccatccatgttgctgcaaaggacatgatttcattcttttttatggctgcatagtagtccatggagtatatgtaccatattttctttatccagtctaccactgatgggcatgtgggttgtttccatgcctttgttattgtgaatagcacaacaatgaacataagtgcatgtgtctttttggtagaatgacaaagttagtctttgatttaatggtgacaaatgtgcttaattacttaatgcaaactttgctgtatgcatttgaaaagcgtcagttagttctatcaattggaaatattagctgtacttactgaacaactgtctagagccattgagttaggtgaatttcttggttactgactaacacagagtatatgatcctcagtttcatcatagagcatattcagataccgtggaggcacttttgatggacaaaggctatcagcaatgctatccagtcccattagggaagttaagagtctccccagagtctgttgtcctttctctgagctctgcagaagctgagacctcagaagtttagtaaggcagcccgggcacagtggctcacgcctgtaatcccaacactttgggaggctgaggcaggtggatcacctgaggtcaggagttcgaaaccagcctagcctatgtggtgaaaccccgtctctactaaaagtacaaaaatcagctgggtgtgatggcatgtgcctgcaatcccagctactacggaggatgaggtggaagaattgcctgaacccaggaggtggtggttgcagtgagctgagattgcaccatggcactccagtctgggcgacagaatgagactttgtttcaaaaaaaaaaaaaaaaaaaagtttagtaaggcagacgtaaaaatcaggaactaaatttcggttattgctgagtctgggagataccatggtaccaccaggagggatgctacccttatgaacctgttctgtctgggagtaaatgggaggaggaaacccccttcagagacctgtgaggaagaaataaacatcagatatgtcttctttcctgaactaagcaggacagatcctaacctgttctgttatcaaagctgatatggggacttatacacttcagccatttgggcctaaccttttctctgtgagttaactgcttatattcccaaggtttagtctctatctcatggggtcttagctgccctaactgatggatttgcttcttaccacataaaattgaacaagaaagctgtactctttgccttccagttgacttcctagacgctgagagtgtcctggggcagcttctgtggcagaaatcccttgtggctggggctgtgctgtgtgccctatacatgcctctggctatgggcctttgcattatattattcatccttggcctgaaaccctgtcacggatacctttgcctcatcttagtactggtataaaatggcattttagtatatggaactgaagtatacatgtttcacaatatcttttagtaaagttaaatagggaataatttttttactggtttcactgaataaccctgtattctatcatcagcactttgcttgtgtactcagtgtttgtcaagaaaatttctttctgagctgcttttcaaaggttccttgacccttatagagaagaaattttgagtgcctatttagtatgtttctattttactcttcatttcccatgtcctgatacctctctaaatatctctcccactagactttatgatctctgaaggcagggactttgtcttgtcacccctgtgtctccagcactcagcacagcacctggcatactgtaggtactcagtatatcttcatgaatgaacaaatgaacaaatgaatgaacaaccagtagatctaaggaatggctccccctcccagtcatgctaggcctgcgcttttaaatattggggtttttaacttagaacagtcccagtgccattgccaaagatagtggtggggtgtgtgtgtgcttcctgacccatacatagcactccagctccaactttatgccaagtagcagtttcttgatcagcagagccatcctatcacattctgtgtagctttacctctaggaaccatgagaaaggcctgttattgccaaaggccatagtagtcatgtgagaattttgtagctatagaccttaaggtttgctattcactattcactgaattctgaggctacctggagaacactgtttaattcaaaataacaggtgcttcctaagagatagttgtactgcagagcagcaggtaaagaataatttgcagtgagcctgtgagcatcattgttttctgaatgagctgtcagtgattctaaatcagaagagcccaaaacgaagtggtttccacaagatttcaagctgaggagaacagcattttgcatccaaaataaaataagtgcagagaatataaaatgataaaagcttgagaagaatgggctataggaagatattgaagctaagtttcaggtgtttgtgcagttataagttatgtaaagacctctgcaaatatgcaaacattccttattattaacaaccgtgacatgaagattaaaagtattaaatggctttttttttcacattcaggtaattaaagtgtagaaaaatctctgccccagaggtctgaatataattcacatgaatggaaaatggcaaaagtggttagtttcttgagtaccatcttaactgaaacatactaaaatggcataattttgtttcagtaatcagtagttgaaagatctcatgctttacttcttaggatatggatttaattatttctggagctaaatgatttgagacacttgtaaagattagcccatatctaacaataatagtagtaattggttcaaccataagaaaattgcctccaaacaataacaattacaaataacttattttgtacgtaaatatatagtatatataaaggttaatggcatggattcagaaatcatcctgctttaattcatatctctgtcactttgtggctgaacctcagttttctcttcagtggaatgagggaacttcataaggtttttatgtgtattaaatgaaacaatatatataaagtgcataagtgtagtacctagaaaatagtaagctatcactactactgttaatccaagtacttccctgcgaggcatattcttatctttctgacatatgaagtttttaagacagagtagaaaatctcaaaaagcaaactcttgattaaaatataatggcatttgcagtttataaactgcatacttagtaaataagcttactaagcttgtgtttccagtgtgatcctaaggagaagaacacatggccttatgggaagaggagataaactaaactaggattacttctagacctatgttttgacagctagcaagtttatctttgaaggctgtctggttgacattgcatgttggctaagacatgccttacaaatattgcagtcacataaaaagagaaactgtgtgctatttttttgtttgttttctgcttgtacggtggagaagcaccctgccataaatacattgggtgggttaaactaataaacaaataggcagggtggcagtgataatgtttttttgaagatgttgaagtactatttgtcgcagcttcacttagtcataacacataggcaccattgctgctctcccagaaaaatggatgcatctgtaataagctatataaacaggtgaagtctttcaaggattttgaagatttactgtttttttaaagcctatttaatgaaacaggttgtgcacaatccacacctaagcaccatacttcttaccttgtggccatacctcaaattgtttcttagctccttttctaaaaaatgattacaacaataataataaattcaagaaaaataagcatcaaaatactttcctctaacccctgcaaatgtatccagtataaaaattcccagtgtgcatatttaccttcctgtactgttcaagaaaacacggttgtgcttcattatcaaaagttcattctggtagataacagaagagaatgtgaaatatgcgaaaatgttttcttaggatagaatgaattggctaacatgggagttctttttttaatgagatagtaacataagaaaatgtttggtcgtgtacacagatttggaaaccttcaccacacagctgtgttatcaaattaggcatacttccttgacttaggtgatttttttttttaccaatatgaagaatgaaaaatttttattactgtgatttatcaaatttggactgcaaatttcattgaaattatcattacaatatctaggaaaagtgtcacccagcaggtaataattgttgttctccaaaggcaagagaggaaaaccagtctcatcaactaagtattagttgtgataaggtctttggtcttcttatatttttacaaggcagtgacgcattcaatgtacatattagaacttccttattgttttggtccattcccattatttcagactgcattttaattctcaatttgttattgatatagatcaatcaaatataaccctgtggttgcttatatatttttagagtttcccttacatgcagttttgcttaacatgggtcacagtaaaggatcgtttataaaagtaatggattgtttcctgtttctgccagctgatttgatcaatctgaagttccttatgtactatgggttacataaccagtctggaatctgtgtggtacattcttctagtttggtattaactgaattaatcatttatattctttaaatcattgaggacattttagtaaacacttgaactgctctcttcttcaagtactctgctccagcaatactgttcacctggctcttactcaaacacaccactttagctttctatggcctctgcacatgctcttccctctccccacaaaatttatttttccaagcatctcttagctcaccccctaactgcctttgcacaaatgtcacctttcatcaaagcctttcctgaacaccctatttaaaactatcccaccacccctagcaatttctagtcctcttttattattttatctgccccgtcataggacttgtgacttactaccatcatacatatttgattcaattattatttattgcttaaattgttatgatcatttattataaatcatgtattacagctaattaacatacatatgctcagtcatttacttgattagttattagcctcaattatatcttattttttaatatatatttttatttgacaaatagaaagtatatagattggtacaatatgatgtttggaaataagcatatattgtggaatgactaaatcaagctaagtaacttatgcagtaccttacatgcttatcttttgttgtgataagaacacttgaaatctattctactgtcttagaaatttaaaaatgggcaaaggacttgaatagacatttcttcaaaaaaaatgcaaatgaccaacaggtatatgaaaaggtgctcaacatcactaattatcagagaaatgcaaatcaaaaccacaatgatatatcacctaacacctgttaagatgtctattagaaaaacaaaatgtaacaagtgttgataaggatatggagaaatagaaatctttgtgtgccttgtacactgttgcaagagcattagtagaactactttggaaaactctttgtaattatctactaaagatgaatatatgcctactatatgacccagtgtttctactttgaagtgatacagccaacagaagtacatgcatacatgcaccaaaagacatatacagaaatattattaggacttctggtttccagttccacatgtagggagcttagaagttgccactccaaccctaacaagtaaaaagctaagcaaactgagaaatcaattcttatcggacccaggataggggaggacacagggaaaaccactgtccccaaaagactagagagacagactggcaaataccgagagccacaagttactagagcatgcagtcacaaacagaaacccccacaggaagcagtgccatggtagaaaaacctgagctgtaattgatgaattataggaggttcagtatgaacaactctgaaagttttaaactccaggaggacccactcatggggaaacaccacaattttgttagacttacctacatgagctcaattagattctccaagtaaatattgcagaaaaatccctatgtgcttctggcagggggaaggtgaaatgaaccattttgaaatatgccagagcactgtgctcttcttaacaaggtctgcccccaggagaaattagttagctaaatcctaacctgctggggtattattagagcctgacccaagggaagggaaatacctaactcttgtcagctctaaccttctgcatcagagaagggaaatactaaactccagacaactctagccatcctgtcctaccaaagaggggagaagaatactgaggaaacacttagaagtttgtacaccagaggcatatgcttactaaaagactgagacttaatcataggatgatagaatgtctcccctcccctttcccccacctaactgctacattgctaaaagctgatttataaaagttccttttacctggtacatcatgtccagctaccaagaaaaaattaccaggcataccaaaaggcaaaaaaaaaaaaaaaaaaatctgaggagaatagagcaagcttcagacccagacagatagggattctggaattatcagatgaggaatttaaatccactatgattaatatactaatggctataacagataaagaaggcatcattcaagaataggtagacaatgtaagaagagagatggaaatcctaaggaaaaagcaaagagaaatgctagagagtaaaaacaccgtaaaataaaaatggctttgatgggcttatcagtagattgaacatggctgaagaaagagtctctgagcctgagaatgtctcaacataaacctccaaaattggaaagcaaagaaaaagactgggaaaagaaaaaaaaagaataaggactgcaggacaactacaaaaggtgaaacatatgcataaggggaatactagatggaaaagaacgagagaaagaaacaagaaatatttcaaacaataatgacagagacatttcttaaattaatgtcagacatcaaacttcagatccaggaaactcagaaagaaaataataggggtttgaaactcagatctccataaagaaaagaagagcatcagagagggaataaacaaagactaaaatgttcatttttcttattcttaattgatctaactgataagtttgttcaaaataataatagcaacagtgctttcgattttgtatgtttatatgttatatgtatgcttacatataagtgaaatgaatgacaacaacacaaggagcaggagggaagacttaggattattttgtttttgtatgatacactacttataaagtggtatagtgttatttaaaagtggacttgggggtgcagcgcaccagcatggcacatgtatacatatgtaactaacctgcacaatgtgcacatgtaccctaaaacttaaagtataataaaaaaaaaaaaaaaagtggacttggactagttgtaaatggatattgcaaaatctagggcaaccactagaagaattttttttttttaagtataactgacatgctaagaaaggagagaaaatggaatcacataaaatgctcaattaaaaccacaaaaggcagaaaatatgtggaagatgaaaatagaaaataatgacaaatgtggtctatattaatttaactaccagtaatcactttgaacatcagtggtctaagtgcaccaaataggcctggtgtggtggctcacacctgtaatcccagcactttggcaggctgaggcaggaagatcacttgggcccaggagtttgagaccagcctgcacaacatagggagacagaccatctctacaaaaaatttgaaaaattagccaggcgtggtggtgtgtgcctgtagccccagctactcagaaggctgaagtgggaggatctccttgagcctgggaggtcaaggctgctgtgacagagtgagaccctgtctcaaaaaaaaaaaaaaaaaaggaaaaagaaaagaaaaagaaaagcactaattaaaagattgttagagtggatcaaaaaacaagactcaactgtatgttgtttacaagaaccccactttaaatataaagacacatgtaaatgaaaagtaaatggatggagaaaaatataccaagctaacactaatcaaaagaaaacaggagtagctatatttcagacaaggccgacttttcaaagcaaagaaagttatccagaataaaaaaggtaattacgtaatgataaagaggtcagtcctccaagaagacataacagtcctttacatgcatgtgcctagcagcaaagcatcaaactatgtgaggcaaaaactgatagaactacaagcataaatatatgcatccactatcatagttggagatttcaacacccctttatcagaaatggacagatccagcaggcagtaaatgggtaaagacctagttgaattcaacaacaccatcaatcaacttgatataattgacgtctatagactacttcatccaacaagagcagaatacacattcttctcaagatcacgtggaacattcaccaagatagaccacattatggtccataaagcacaccttaacaaatttagaatagaaattatataatgcctgctctcagaccacagtggaattttactagaaaccaataaaggaaagataactggaaagtcccaaaatacatggagattaaacatggattagaaaagaaattccaagataaattgagaaataattttgaactaaatgaaaatgaaaacacaacttatcaaaatttataggatgctgcaatgagccaggatcgtgccataaaataaaattaatatatcagagatgtatgtactccatgtccattgaaacacccttcacaatagcaaagttaacagaatcaacctaagtgtccatcagcagatgaatggataaagaaaatgtgtatgcactcaatggaatactgctcagtcttaaaaaagaagttttgtcatttgcaacaatgtagatgggcctggagaatattatggtaagtgaaataaaccagacacaggaagacaaatactgcatgtcctcacttatatgtggaatctgaaacaacagaacttataaagtggggagtagaatggtggttactagagtctggggtggtgggcagtgggagaatgaggagaggaatgttagagggtacaaagcctcaaatagacagaagtaataacgttttttcctttgggatatattgcacagtgcagtgagtatagcaaaaacagcctttataacaaatgatgctggaacaactgaacgtccatgtgcaagaaaatgaatctagacacagaccttatacttaccacaaaaaccaactcaaaatggattatagctctaaatatgaaacacaactataaaatgactagaagataacataggagaaaacctagatgaccttggatatgatgatgactttttagatacaaaccaaaggtacagtccctgaaagaaataacagataagctgaacttcattaaaattaaaaacttctacagaaagcagggtcaagagaataaaaagataagtcatagactgagagaaaatctttgaaaagacacatctgataaaagactaatccaaaatatacaaggaactcagaaaactcaaaataagaaaaatataaaacctattttaaaatgggccaaaaaccttaacagatacctcaccaaagaagatatacagatgacaaataaacatatgagaagatgctccacatcatatggcatcaaagaaatgtaaattaaaatgacagtgagataacgccacacctgttagaatggccaaaattcagaacactgacaataaatgctgaaaaggatatagaaacagcaggatatggagcacctctcattcattactggtgggaatcaaaatagtacaaccaccttggaagacagtttggtgatttcatacaaagctaaacatattcttaccatgtgatccagcaattgtgctcgtaggtatctacccaaagaagttgaaaacttagtgcacatgggcatttatagcagctttattcataattgccaaaacttacaagcaaccagtatttccttcagtaggtgaatgaataaatacactacggtacattcagatgataggatattttttagcattaaaaagaaatgagggggcctggacatggtgggtcacgtgtgtaatcccagcactttgggaggccaaggcaggagaatcatttgatcccaggagatcaagaccagcctgggcaacacagggagaccctctctctacaaaaatataaaaaatgagccaggcatggtggtgcacacctgtagtcccagttacttgggaggccgaggtgggaggatcacttgcactcaggatgaggctgcagtgagctgtgattttgcctagttataggctgagagggtggtgagtggtggttcttctcactctgaagagatctctagtcattctaaaacccattcatttgtcattactatatagaagagacaataagtaatggacctatcctttaagaaaacctctcatcaaagtatgcttctttattgcaggtaattcgtgcctttctgctctttccaacaattgaacgaatgtctgagtcacccaatggcagaattgccactccacttttgtgctggtttcgatatgttctctatgttactggctacttattattgaaaccgtgtcctgagacaatcaagtccttgctaatcagaaggggccttcaagtaatgaacctagagaatgaattttcaccattgaatatattagaaccattctgccttggtaagcacagattttaaaatgtgtatgtttattcttgtatcacaaaatgtttacacaatactctctgacagtggacaaatatcaagcaagcaattatttactagtttttttttcctcttccaaaagtttaaaactagaaataaataaaattagaaatagaatgaattttttcataagaaattagaaaagcctcatcaagctttaattttaccttatgtttctgattcttcactctagctgcagcacagtgagaaacacttcttccgcatatagtacatagtatatatggagtccctacaggaatccttggtgtgcctgttagcttagtgggagtactttacgaaaaacagcacaaggacacaaagcctaatattcttgtagagttaacaggttgtttttattttcctcctttaaatgttttgggagaatttaaatcatagaagtaataaatatttgtcatggtaatgtattttaatactgggtgctttgctgatttttatgaatatgctaggaaatgtttttgtgactttactttttggcttcaaaagttgttttaaaatgtagtctatctttttagatcatactattttatactacatttataaatgactttcataataaagtaatcctagtttcttaatctataatgtggggataacaatactccgtacttcaaaaggttattctagtgttaaatgtgataaaatatccaaagcttctatctagtattttatttataaccgacctccaatgaacgatgtaacaattagttgcagcagtagctgatggcactttctaagcttttacctgtgttcctcaaaagaactaataaggtttagtattgctattgtccccattttagatgaagcaactgaggtacaaagaggttacatgattgcccaaagttatacaactagtatgtagtgttgaaacccaggcattctgccactgtattgcatttcctttcaccatagctggtgctgttgcccttgttaatgataacagcaggactcctgaataaagttttccatgctcagctgtattaagaatgccataaggtcacatgcctaatgaactagaaacaagttaacagccctgcctgttcaattgtgcagctgcagttcatatgggaggtgtttttctaaatatgtaacaagaagcagtcctcaaaaatacaaggttcagtatatttgtcctattgatagattttttcccccttccattttccctccaatttccattctttaatatacccttagcatagtggtttaaaaagatgagataggaagagggaaagcaagggctaaggacagtcatagaaattgccagaggttgatgttggaaatatcccttaaagaccatttggtccaactcctcatctctccaccatattattaaggaaaggggtcccgatccagaccctaagagagggttcttggatctcgcgcaagaaagaattcagggtgagtctgcagtgcaaagcaaaagcaagtttattaagtaagtaaagtggtgaaagaacagctcctccatagacaaagtaggatattcctgaaaataagaggagggatgcacccaccctaggtacaatgcttatatatatagggagatgtgttctgctacaagggtttgtgataaaggattaattttcttaattactgtattttgcaagaatctatatattattattattattattattattattattattattttgagatggaatctcactctgttgcccaggctggagtgcagtggcgcgatctcggctcactgcaacctccgcttcccaggttcaagtgattctcctgcctcagcctcctgagtagctaggactacaggcaagcaccactgtgaccagctaatttttttattttttttagagacagagtttcaccatgtaggccaggctggtctcaaactcctgacctcgtgatccgcccgcctcagcctcccaaagttctgggattacaggcatgcgccaccatgtccggcccaagaatcgatatttttatcttaaaagcaaaattaggaatgcctttgttctccagatatcaggatatctggacactcccaagtctgagtctgttttagtaaacattattaatttgttcccttaactttaaacatctagaggctcggaatgccttactttctgagaatacagtccagcaagtttcagcctcattttcctagcccacactcaaaatgaagtctctctggttcacacgcctctgaaaatattatggaacagatgcctactggtgaaaatagtactgacaggaagtcacaaaccctcaactctcattttggttctgccctagagtcactctgtggcttttgtttagttacttcccctcgttggttttcagttgttgactaaatcaagagttagggccagtctacctttggaaattacttgagacccaatggaatcaacatttgaaattctggcaaatatatgtaaaactctccacatatactttgataagatcattttacgtctctttacaggtttgtttgtctctcccagccccttgttgctttttgtcattttctttttgccttgtagaatgtattttataaagcattcttcagttatggattccattttcctcctgggacttctgcttccaggaagatagagtaaatggactttccactatttctcctgctaagtactaaaaaccatggatattatctataaaacaacatcaagaagactatacaaggtagagaatagaaagcaggctatgtagggactttgggacccaaggaacaaacacagtggtgagttctctgggttttctttttaccacatatatcctagatttggagccagcaacccagaaacaccaaagagtagagacttttaaaggtcctaacaaaagcctactctctctagcccaaagaccaggaaaggagcaatgttttatagagtaggaaaaaatagtcttctccctactttgtatagttcttacttggggcagatctttgttacaaaagacagattaacaagaaaaatgtataaatttattaacatttatatttcatatgtacatgggagatacccagagaaatgagtaaatctcaaagaggtggcttctgagttcagacttaaataccatcttgaactaaaacaaagaaaagaggtcagtaatgggaggtgaccaagaaaagcactgcacacaagacaagtttgttgtgcagatttaagttagtgccctttgcgttgataatagagtccatggtgatttagaatcatccttcatggtacagagaggaaaacacccatacaaatggaaatgtcctttatagatgtcaatttccctttaaaaagggaacttctccatttttagagcttctcctgtgtcttcagtttctcaaaatactcagtttaaaataatccttttgcccaagacacatctttagggatggtatattttggtcccctacagtcattttgcagcagtgtattctggttttcaatactttctttctttattattattattatatattttttgagacagagtctcactctgccacccaggctagggtgcagtggctcaatctcagctcactgcaacctccgcctcctgggttcaagcaattctcctgcctcagtctcccaagtagttggaactacaggtgcctgccacgactcccagctaatttttgtatttttagtagagatggggtttcaccatattggccaggctggtctcaacctcctaacctcaggtgatccacctgccttggcctcccaaaatgctgggattacaggcgtgagccaccgcacctggcctctggtctttaatactttctaaaagaaacatttagacagtaactgctctactctactccagccatttccagtcatgcctgcaaagattgagtggactttaccctctccccagcagtaatgaagcaccccctctctttccctgctctacggtactgtcccagaagaggctgagtagagagcgaagactttcatcactgccctgcagtaatggggccaccatcaccactacccccatattatcagtaaaggtcatgtggggagaagtagcaagggactcaccacttgtcccagccaagatggtaacagtggaagcctagtacagagtcagaattccttcccctacccagcagctatgaggagccccttcatcccttgggtgtcaacagaagtcaaatgggtaacttagactctaccctacgtggccatagtgaaaaaaacatctaaaacataaagtttaagtaagatccagaatctcataacataatactcaaactgtccatgttttagttgcaaatcacttgtctaacaaaatctcaacttgactggaaaaaaaaaatcaatgccaacaccaaaatgacagagatattagaattatctgacaataactttaaagcagccactataaaaattatttaatgatcaattaataaacatgtttgaaactaatgagaagatagaaaatcttaggaaagagaagattaaaaaaaaactgagtggaaattttagaacaaatttaaaatctcaatggatggaaccaacaataaaatgaggagacaaagaggaaagaatcagtgaatatgagattagattaatagaaattatccaatagagagaaaatagactaaaaaggggaaaaaaaggaacagaacctcagggacctgttggactacaacgaaagatctaacatttgtgataacactagtcctagaaatagagagtaggtctggaaaagtgttcaaagaaataatggtcaaaaactcccaaattttgcaaaagatatgaatttacagattcaagaagctgagtgaatttaaaacagaataaacccaaagaaatctatactaaaacaccataaccaagcttttgaaaactaaaacaaagaaaatgtcttgaaagcagccagaagagcaaagcggtacattattcatggaagaaagtctgtttgaaggacagctagtttttcatcagaatccatggagacccaaaggaaaatgacaaaatgcaaaatgaaaataactattaatccaaaattctgtatctagcaaaagtgtctttcaggaaagaaggggaaatttaacattctcaaatgttgaaaaactaaaagaacttgtcaacattagatctatcctaaaagaataactgcaggaagttctctcaacagagaggaaatgataaaagaaggaatctgggaatgtcaaaaagaaagaacagtgaacaagttaaaatgtggacaaatgcaactttcttcttctcttgagatttctaaattatgtttaacagttaaagcaaaaattatagcactgtctcttatggttctaaacatacacagaggaaatatttagggaacgattttataaatgggggagggtacagggacataatggcaagtaaggtttctacactttacttgaactgtaagatgtaaccatatgtacatagtaataagtcatgtatatatgtaatgtagtacctagaacagccatttcaaatgctattcaaaagagatactcaaaatcaccatggatagatgaagatggaattctatatttagaaacacattgattggaagaccagaaaaagaactcagagacatgacagagaacaaacagaaaacaaataataaaatgatcatccatgattatattgaatgtaaatctaaatatacaattaaaagaaattggcagggtagattagaaaacatgactcaattgtatgctgtcctcaagtcttagtttaaatataacaatataagtaggttgaaagcaaaaggatgagaaaagatacattatgcaaacatttataagcaaaggaaaccaggaatagctttattaatatcagataaagtagatttcagtgcaaagaaaattacctaatagacatttgtagaacacttcacccaaaacagaattgatatcaacatgttgatatcattgaaaccatacagagtatgttcagtgaccacagtggaatcaaactagaaatcagcaacagaataacaaaagttagatctttaaatacttggaaagtaaaccgcacacttctaaacaactcatgagtcaaaaatggaaattacaaagaaattcaaataatactacatgtaattaataaaactatagctcacaactgtaatcctagcactttgggagtctgagatggaaggatcgcttgagcccaggagttctagaccagccagggcaacacagtgaggccctgtctctataaaaaatttaaaaattggccaggcactgtggctcatgcatgtaatcccagcactttgagaggctaaggtaggcagatcacttgagtccaggagttcaagaccagcctgggcaacatgatgaaaccccatctctactaaaaatacaaaaattagctgggcatggtgtcgcacacctgtaacaggtcctagctagttgggggactgaggcaggaggatcccttgagcctgggaagtcaaggctgcagtgagccgagatcgtgacactgcactccagcctgggagacgaagtaagatcctgtctcaaaaaaaaaaaaaaaaaaaatagccaggcatggaggtatagcctgtagtctcagcttctttgggcaggctaagatggaaggatcacttgagcccaggaggccaaggctgcggtaagccatgatcatgccactgaactccagcctgggtgacagagtgaaagcatctcaaaaaaaaataaaattattaataattaataataaaactgaatcaaaatgaaaatacagcatattaaaatttgtgggacacagctaaaacagtgatgagacaaaaatgtatgctggtgtcagaaatgattacattagaaaagaagaaaagtcctagtaacctaagcttcaacctgaagaacctagaaaaagaagagcaaaataaacccaaaaggaggaaaaggaaagaaataacaagaatagaaattagggttaggagcagtggctcacatcttgaatgccagcactttggaaggctgaggcagaaggtttgcttaaggccaggagtttgagaccagcctaggcgacatagtgagaccctgtctctacaaaaaaaattgaaaacaaaaacaatagagaaaatcaatggaagaagaaagtggctactttgaaagagtaataaaattgacaaacccctagcaagactgacaaagaaaaaacagctgaagacacaaattaccaatatcagaaatgaaatagaaaatatcaccatagagcctgcacccatcaaaaggataataaaggctactgtgaacaactctacacatataaatttgacaactggaatgaaataaaccaattcttcaaatgtggacacactaccacaattcatccaagatgaaatagaccatttgaagagccttataactttgaaggaaactcaatttgtaattttaaaacttccaaaaaaagacatttagaggctcagatgatttcactgaagaactatacctaatgtttaaagaaatactaacacaattctacctattttttaaatagaaaataggagggaacacatcccaattcactttttgaagctagtattatctaatatcaaaaccagagaaaaataatacaaaaaaagaagaaactacaggccagtatcccctatgagtatagagacaaacatctctaataaaatattagcaaacagaattcagcaatatataaaaagaattatatactattctattaccaaatgtgatttattccagggatgcaaggctagtatgatattcaaaaatccattaatataatctaacatattaacaggctaaagaagataaaccacatgattctatcaaccgatgcagggaaaaaaaaatattttgaatgcttttcttctaagactagaaacaagacaaagatgtctgctctcagcactcttattcaacatagtgctggacgttctagtcagtccagtaaggtaaggcaaggaaataaaagatatacagatcagaagagaagaaattaatctcgtttgtagatggcatgattgtctgtagagaaaatcccaaggatggttctgcggctctgccagggaataaaaatatatcaaatgattaaaaaaaaaaaaactaaaagaaaaaaatgacaatcccaaggaatctaccaaaaacaaactttgagaattaatacaagttcaacaatgtcacaggatacaggataagcacaaaagtcaatattatttgcatacactagcaatagaaaccaaaatttaaaatataatgtacatttttagccagtcggaaaaattaaattgttaggcataaatttagaaaaacatatacataattatatgctgaaaatgatgactattaataaagaaatgaaagaagacctaagtaaatggagagacatactgtgttcatggattggaagactcaacatagtaaacatgtattaatgcactctcacactgggtaatttataaagaaaagaggtttaattggctcacagttccataggctgtacaggaagaggcatccacttctgcggacgcctcaagtagcttttacttatggcagaaggcaaagtgggagcaggcgtctaacatgggaggagcgggactgagaaagacaagtgggagaggtgccacacactttaaacaaccagatcttgagataactccatcattatttctataacagcaccaagggggatggtgttaagtcatgagaaaccatccccatgattcagttacctctcaccaggtcccacctccaacattggggattacattgaggacatgagatttgggtgaggacacaaatccaaaccatatcagatgtcaattcttcctaaattgatatgcatattaaacatagttgctatcaaaatccgagcaagatttttttgtagctatcgacatgattattctaaaatgtatttggaaaggcaaaggaataagaattactaagacagttttgtaaaagaagaataaagtggaaggagtgagtctgtctggttgcaagatttattatgtagctacagtaatcaaaactttgtgatattgataaagggattaatacataaatcaatggaacagagaagagaacctagaaatagacccacacaagtgtgcccaactgatttttgacaagagggcaaaagcaatttgataaaagaggaattgccatttcaacaatgttgctggagcacttggctcttcttaggccaaaagaaaaaaagaagaaggagaaggagaaggagagaagaagaaaggaaggaaggaaatgaacctcaacctaaactgtaaaccttacaccttataaaaaggttaactctaaatgagccatgaattttaatataaatcttaaaactacaatccttttagaaaaaaagaataaaatattcaggatcaggatctaggactaggcaaagactagctgggtgtgatcacagtgagatatcattacacacctatcagaatggctaaaataaaaaaaatcagcaaccataaatgctggtaaggatgcagagaaactggatcactcatacattgctgctgataatgtaaaatggtgcacccactctggaaagcagtttgacagttaaaaacctaaacacgcagctaccctatgacccagcagttaacactcctaggcattcatccctgatatgtgaaaactggtgttcagagaaaaacctgtatatgaatgtttattgtagttttattcataatagccaaaaactggaaacaacccagaggtattttcaatgggtaaattattaaacaaactgtggtaaagccataccatggaattctacttgataataaaaaggaacagacttttaatacacacagcaacctgtgtccatctccagagaattatgctcagtgaaaaaaagcaacccttaaggtttacatactgcgtgattccatttatatagcattcttgaagtgataacattatagaaatgaagaacagattagtggttgccaggggttaaaaattaaagatgaaaatttagctaggcatggtggcacacacctgtagtcctggctacttgggaggttgaggcaggaggatcgcttgagcctaggagttcaaggttacagcgagctgtgattgcaccactgcacttcggcctgggcaacagaggaagaccctgtctctttaaaaaatacatacatacatatcctggctgtaacattatactgtggttttgcaagatattaccatgggagaaactgggtaaaaggtacatggatttctctatattatttgttacacctgcatgtaaatctacaactatcttaaaataaaagttgaattaaaaacaaaaagcattctccagctagggataccactttcctccctgggataggtgttcccctcatcctgacggcctgaattaggagctccttgtccttgagacattgagaaggttgaggacccagagtcccagggctgaggacaccattagatatgcagctgtacttatgcctctttagaaatattttctaaactcaaatcaggacatgggatataaattttatacattttttaaatttatatatgaaaagtctagctatgacaaattattcttaacggtatatttactaaatacataatatgtcacatataacatataatcaagtgcttaatgtttttaattaaaacaggaaattatgtaaaggtattttccactttttctgcatcagagttatatacacttcaggagaagtaggctccaaaagctgcacttgaaagaaaggactcttccttttaattgcaataattgacctcctactgcatcttccaggagactgaagtttaggcagcagggagcaagacagtttaggcataagacatatttccctccccaatccaaggcaaccagagttttatactacattgttgcttgaagaaccctgggcttcctttctcacacaaccctgatatatgaaatacattttgtaaatcagactgaacattcagctacatgtcttcatctctgttctaaataacaaactagcaaacaaatttttggagcacagtcctcctatttcttacatcctttccttttctgatcttttaatcccttggctctaatctggccttctgatagccaaataactactacttcagtggtctctgatttttttttttccccataacctacccagtgtgtgtaaccttgggtaaaggaaaatgaggcagtagttagttacctgtcttctttcttctttgggttattggttcattccctgcttgggttcatagttcacttcctagtagccagcctcttccctctagatccccagtgccacccctgcctcctcttgcaataaccctcacagaagctgccttcgcccaggcttgcccttaccatcactatggtgattcctagtaccttgcttcccacaaagagaaagtcccaactgagagagcaacactcaacagaagactttgggagatgatcagtgggctctgctagagtttatactccatgaatagtggacataactaatgttcataccagctacttgcatcggcataattttcatggttacacaaagagaggggttatcaagggaaaagaagatcaggtcagagatcattcccagctgggaatctggtccagctggatatttccccctggcccccacagacctgtttctctgtggcttgactatcatccagacaacgaccttttaacctgccagcatgccttttaggaggctttgcagtgtttgcagattatgtaatgtctgtgcttcagtagaaatcttacggaaacaaatggaggaagtttgctagtccaagcagtggataataaatcctgccctatctagatagaaactggttttctgtatcctttagtttatacacacatttttgttgttgttgttgtaagctctgaaaaattctaggaaccaaaatattcaaatatttcaaatcctgctgcccttttggcaaagatggcacatcctttcctgtaggcttgagttctggggcattagcgttcttctctagtatgagtgagtgaaatgtcatttcctatccagcattcagagaagagtagccctacatcagttagtgtacattataaactttaccacagtgttcatcaatgtcattttgttaactaggttattttaaatgttatttttaaagaacatatatggattttttcttcagttttaattctggaatgtttgctactctgtattttctttagatgttcttccacttcatgaaaaataggcttttcactgagacagctaagttgattttctgatcaaagctaaaagaaaatacgtcttagttcagcagtatagcaagtcaaaataattaactttaaaaaatattctagggtcttttcgttagttaggccaaattgatattttatttcctttcagttacctaactagaaaaacatagcacagagacatagggaatttctggtagattacattactttgttgaatatattcttgtaaaataaattttcataattttttcttcccttaatatggaattagctttttaagatataaaatgaactattaaatgagatgacaacataagcatttgcatcactaaagaatcataaatttcttctagaatatttttaactcaatcccagaataatttttgagtaagacgaaaccagactctcatgttaccttacctattctctcatttatctgagcagcttatgaaaatatgtttataaaacccaactgtggcttttatttatttatttatattagagacagggtcttgctatgttggccaagctagtctcaaactccaggcctcaagcagtcctcgaccttggcctcccacagtgctgagattacaggtgtgagccgtcatgcccggccccagctgcagcttttaatgattcatgcaagtataacctaaaattcaggaatgaaggaaaaggtttttttgtttgtttttgtttttgtttttcggtcagtgttaggatttaggacaagaggtgattagtgtggtactaggatataatctctggtttagaagttaatagcgcaatgaatatcttattttttctaaagaaatttttatatttcaaaattaacgccagtctaaaaagttgcattattttttaaaatcatacaacacctccagttgtttttcactttggtgaactcagtgtcgcttaggtaagattatctgtttgcagactaaattgattatcgtaatgaccacagtcctggcttatagagaaatacataataaactatgttgactacgaaacatttctccaaattatgcagaaagtttagaatgggagaattatttttttaggtctagttttcactttgttgcaacttggcaccattggaaaggtggaaaacaacctggaaataaataaataaccgctgaagaattttcccttggaagaaggtttcatctgggtttctaagactatctggtcctacttaaccttttgacaaaccctgctggtatagcctttctgagtacccagccttactctgcctacagctgtgttggcatgtggggctgctcatgtctccagaatcttctagtcttgcagctcgtcctcaaccctaaattttgttcccacacagccctgcttgacttgaaccttcctaacttccctacactcagcacatcttgccagcctcaggaatagtcagaatatgtgctaggaggagctttcctgtgaaaggctctttttcagtcagctcctaccctgcctcctctcaggcaagccctggatatgtgcagatgccactttctcccccactcaagtaccagagcctgataggcagttaagcacatcagcccttgtgctgtgaccaaaaacacccagaatattcaaaggccctatttctattcacttttatcatctgggattgagtttgactatagataacagaaaaccaaattacagtggcctaaacagatagggatctatttttctcatgtgccaagaaatccaggcataggcagtccagaggtaaataacatctcaacagtgccatctgggacatgggtcgtatgtttctactctgttgtcctttgcacatcacataaacctttatccttgtggtcatcatctcatggtcacgtcatggctcctgcaactctagacctcatgtctaacattcagccagaaagaaagggaaaggggagaaaggcaaaaggcctactcctgattaggctttggcttatttaaaaagagaatgtcctccctaggaacttttagattagtagccaaaatatcccttactctgaggaatagagaaaagccatatgttttgatttccccatgactcagtagagtcaatcaagggaaatgaaaatttttgttggcttttaggtagttacattgcgtctactacatccacactgcaagatggtcttgagattcaacatccatggacttaatctcagaatagcccacctaccaaacactgaggtaagacagtcagtccaccagaactaaaatccatcgttgccatgttcctgcagaatgccttcaggcgttgtaacccttggcaagataagctcacagtgaggtctaccgtttatttcttaattgtgacaggtcttcttcaaatcttgtctaaataagtacccatccacagtagagctcatctcagctcccaagattattgtattttttattttaaagggagttttaaaatgtttggcatttcatcggtattaatgggcttactaatgattattctcctcagccaccccccatcatggtgctgaatctaccaaagccttttcctaacctgtcaaaccttttcatgagtactttaagaaagtgatttttccttgtaaacgtggtggtatattttggacatgtagaatctgtcagaccttttaaataagatcaaagtgactagaagtagtatctcagtcaccatagaccaagagtaaaactcacatatatattgcggtatatacacccacaatggttgatttcctacctcccaaattcacctgtcataatgaaaccatgcccatctcctgtaattccccttgcttcagtaccaacaagtccctctcctcaataatggcaaagccaaacaaactggggcattctaatatgaatcatactagtggtactaggctacgtaccaccaaaacagcagcacaacttggcttgccaccttgcagttctactttagaaaactatttatgcatcaccttccattttatgattagttgtggtttaaattgcctctacattgtctctggctcttataactagtgtgtatgtggcctagtttctgactagtcccaacaggggctgttagacttgtactctggccttcagttattcatctcacttttataccagtacctgccagcttggcttaccagtgtcagtgtgcttcagcctctagttctggcctccatcatgatgtcagctcttggaccacttcctccccaccccgctttccaaagcactagctgagtaaccttctctgtcagtctcttcccatttatttcacttaacaacccttccttactgatacctgctgtgagctaactgttcagataagcactggagagaataatgaatgaaatatagttcctgcccttaagttacttacagtgggatagaagagaaaaaatatgaagaattttaatatatcatagggctatcataaatcagatacaaggtatgaatggtaatgagaaaggagagatcagttctattaatacctaggtaagtaacagaggagaagatgaatgaatttggacttgaaggtgagttgggatttttccagacagacaaaatggcaccaggataggcaattagaaggcagccttctgttatggattatgtgtacttggagaattgggtgataacatttgacctgtgagatgaatgccctattggtcttccagctttagccctcactcggctatttcaaaccttttagccagcataagttaaagttgtatagtaatttttggacattaagcaaatcttagaaaataatgttagtaaataacattagactcttcaattagtcttttttatacctgtgtttaatggagcaaaagtaaagaattaacattcttccaaatcattctctttccttcatgtttttgtttccattactactgctactagacatttccttcactgtagtgcttgaaattctgagttctgctggatttccaggaatgctgttgacagtcattgccaagagaaatgtgttttccacttaggaaattacacttctatttggtattattatttctgaccactatgttgtattatgagcatttctgaggaatgacaaagatggcttccttggagcaattactggaaaagaagctggtgttctattaaaaaaaatatatgcttagataggaaattaccaagaaataaataagggtaggaataaaggtgggatggagtacattccctgatgaaaaaatttactttcagaaaataggactccttacaaattatttgaatttttaagtttttttttaatttaagaatgacaaaaaagtacttaaaacataaatgtgtcccttcatgaattatcacaaaacaaacttctattaactgccacccactcaagaatcaccattgcccgagtctcagaagacccccttatgcttctgcccatctcacttactccattttcccaaatgtaactactactaacatctagatgtacctggttttggactttaaataactggaattgtataatgtatacttgtttgtgtctgacttctctcagtcaacattgtatgttgcaactttaattatttcatttttattactaaatacttttccactggatgaatgcactacagtgtatttatttattctatgattgatgaatacttgggttgtttccaatgtggtactactaaaaataatactgtcaagagcatttttatgcttgcctttcagtgaacttatgcacatatttctcttgggtccatccagagaggaaatgcagaggtcatatggtatgcatatgtttagcttcagaagacaatactaaatggtttccaaagtggttgtaccaatgtgtactcccaccagcaatatatgagtttatgttgcttcatttgctcaccaacacttggtattgtctgtattttttgtttttgctatgttttgtaatttgggtcaatctagtaggtatatagtgccatctgatggtgttaaggttttctaaaaaatattttgagattgttctttttctttgattacataatagttgtacatattttagggtacatgtgacattcgaatacctgtatacactgtgttatgatcagattagggtaaatggggtatccatctcttcaaatatttatctttgttttaagaacattacaattcttctcttctagctattttgaaatatacaattactataattttcccactgcattatcaaatacaggaacttatttcttatatctgattctgtttttgtaccccttaaccaatttctctcatctgttccaccccgcttcctttctaagcctctggtagtgaccattctactgtctacccctgtgagattcactttttttttttttttttttttttgagacagtttcattctgtcgcccaggctggagtacagtggcgcaatctcggctcactgcaaactctgcctcccgggtttaagcaattctcctctctcccaccttcccccgccagtagccaggattgcaggcgcacaccaccacgctcggctaatttttgcatttttagtagagacggtttcaccatgttggccaggctggtctcgaactcctgacctcaggtgatccgcccgcctaggcctcccaaagtgctgggattacaggcgtgagccactgtgcccagccgtaagattcactttttagctcccacataggaatgagaacatgcaatatttgtctttctgtgcctggttttcacttaacataataacctccaatcccatccatttttctgcaaatgacaggatttcattctttttatggctgaataatattccattatgtgtatataccacattttctttatccattcaccaactgatggacacttagattcattagtatcttgggtactgtgaacagtgctgcaataaacatgggaatgcagatacctctttgatacactgatttcctttcttttggatatagacctatcagtgggattgctgaactgaactatgtggtagttctagttttagttttttgggaaaactctaaactgttttccataatggctatactactttacattcccaacagtttacaggtattcccctttctctgcatcctcaccagcatttgttattttttgtctttttcttgatagccactctaactggagtgagatgacacctaattgtggggttttttttttgtttgttggtttgtttttaatgttttatttccatagattttggggaacaggtggtatttggttacacgagtaagttctttagtggtgatttgtgagattttggtccacccatcacccaagcagtatatagtgaacttaatttgtagtcttggttttgatttgcattttcctgatagtgatgctgagcattttttatgtacttgttggccatttgtatgtcttcctttgagaaatttctattcaggtctttggtccatgttttattcagattatttgtcatcatgctattgagttgtttgagttccctaaatatcctggttattaatcccttgttagatggatagtttgcaaatattttctcccatgctgtagactgtttcttcactttgttgattgtttacttttctatgtgtagctttttagcttggtgtaatcccatttgtctatttttcgcttttgttgcctgtgtttttgaggtcttacccgaaaaaaatctttccccagaccaatgtcctgtagcattccccctaatgttttcttttagtagtttcatgtcctattaaagtctttaatccatttgagttgatttttgtatatggtaaaagataggatcgatctagcttcattcttctgcatatggatatctagtttcaataatgtttattagagagactatcctttccccaatgtgtgttcttagtgcctttgttgaaaacaagttggctgtaagtatactgatttatttctgagttctctattacattccattggtctgtgtctgcttttatgccagtatcatgttgatttaattactatagctttgtagcatgatttaaagtcaggtagtatgatgcttccagctttgtttttttgtttttgttttttcctttccttaggattccttagcaattcggcgtcttttgggattccatacaaattttaggattgttttctccatttctgtgaagcatgtcattagtattttgagagagattgcattgaatctgtagattgctttgggtcatataacatttcaatgatattaacccttccaatccatgagcatgggatatcttttcctttgtgtgtgtgtcctttccatttctttcatcagtgttttatagttttccttataaagaaaaacttgttttgttaaattcacttcttttgttaaatttattcctaggtattttttagtagctattgtaaataggattgctttcttgattactttttcagattgatcactgtaaacgtatataaacactgctgatttttgtatgttgattttgtatcctgcaactttactatctttatttatcagttctgagagttttttgatggagtctttaggttttactaaataaaagatcatgtcatctgcaaacaaggttaatttgacttcttcctttccaatttggatactctttgtttctttctcttgcctaattgctctatctaggacttctaatactatgttgagttgaagtggtgaaaatgggcatcttgtcttgttagatgttagtggaaatactttgttcactgttcagtgtgatattagctgtgagtctgtcatatattgcccttatggtattgaggtatgttttttctataccccgtttgttgagagtttttattatggagggatgttgaattttatcaaacacttttccagcatgtattgaaacaatcatatggtttctgttcttgattctattgatgtgatgtatcatgtttattgatttgtgtatgctgaaccatccttgcctccctgggctgaattccacatgatcatggtgatcttttcaatgtgttactgaattcagtttgctagtattttgttgaggatttttgcatttatgctcatcagttatattggcctgtggttttctgttatattcttgtctggtcttggtatcatggtaatgctggcctcatagaatgagtttggaaatattccctcctcttcaattttttaaagtagtttgagtagaattggtattagttcttcttcagatgtttggtagaattcagcagtgtttctatcaggtcctggactttcctttcatgggagacttattattattatttagatcttactcattatttgtctgtttttctatttctttgtttcaattttagtagattgtatttttccaggaatttatccattacttgtaggttttccagttcattggcatgtagctgttgatagtagtctctagtgatcctttctatttttctggtaccagttgtaatgtttccttttttgtctctgattttacctatttgggttttccagcatgttggtattgtctatctttaaaaaaaaaaaaaaaactttttcattttattgatcttttgtggttttttagtctccattttatttatttctgttctgatctttattattttttttattctacaaattttaggtttgatttgttcttgcttttctggttccttgaagtgtatcattaggttatttatttgaagcctgtatttttttgacataggcatttattgctataaacttccctcttagtcctacttttgctgtatcccataggttctggtatattgtgtttccattttcatttgttttaagagtttttaaaaaatttctctcataatttcttcattgacccattggtcatttgggagcatgttgtttaatttccatgtatttgtacagttttcaaagttcctctttgcaaagattctagttttattccattgtggtcagaaaatatacttaatatgatttctattcttttaaatttgttgagactttttggtgacctaacatatgccctatgctggagaatgttccatgcactgatgagaaaaatgtgtgttctgcagtagttggatgaaatgctcataaatgtctgttaggtccatttggtctagagtatagtttaactgcaatgtttctttgttaattttctgcctggataatctatctattgccaaaagcaaggtgctgaagtcccttactattactgtattgcagtctacctctccctttatttctgttaacatttgttttgtatatttgggtgttctggtgttaggtacatatatatttattaatgtaatatcgtcttgctgaattgatatctttataattatataatggccttttttgtctctttttatagtttttgacttaaagtctattttatgtgctataaatatagctattcctgctctttttaaagttccatttgcatggagtatctttttccatctcttcacttttactctatgggtatctttataggtgagataagtttcttgtaggcagcatatatttgggtcttgttttttaatccattcagccattctatgtcttaattggagaatttagttgatttacattcaatgttattattgataggtaaggacttaatactgtcgttttacttgtttgcttgttgttttgtaaccctgtcttcctttcttactctctttatttgtggttgtgattttctctggtagtgtgttttaactcattgcttttgatttttattatattttaggtttttgctttgggttactatagtgcttacaaaaacattttatagttataagaagttacctataactaagctaatgtttttgtaagcactcctgtagtcccagctaattgaaggctaacgtgggaagatctctagagcccagcaggtcaaggctgcagtgatctgtgattgcaccactgcactccagcttaggtgacagagtgagaccttgtctcaaacacacacagacacacacacacactgatagcaacctaactttgatcacaaaaacaagagaaaagaaacaaatacaaaacatgtacacattaactccattctccccctacattttgaatttctgatgttacaaaaaataataaaagaatttacttttaaatttgataatgttttctttcatagaggcagaaaagcatgtaaatcaaagattgacctgttcttgtggtagtcagtttgtctgtgagtccatttggcactccagcatatatcatattggaagagtttcagatttttgaatttacatttccatgatagctaatgagggtgagtactttttcataatttgagtaacttctgaaatttctgctcttgtctattgcccatcttgatgtttggtttccagcctttttcttactggtttgtagaagttttaagataaattccagataccagtacctttgacatatggcacatatcttcttccactctgtggattgtctcattagtctcttaatatggtctttttgctggaaaaaaattctaattttaatgtaatttaacaatcttttgtggttagtgttgtagtgtcctactaaaggaatcttttcctaccccaaagttatgaaatattctcctatgttatcttctagaaatttaattcttttgccttttaccttttgatctacagcccacctacaattgatttttatgtaaagttgaaggtagaaatcaagtttgtcttttcttctccataggactatccagttgacccatcatcatttagtgaaaagaccatttattaattttttcttgctgtgtaacaaatgaacacaagcttagtatcttaaaacaacacccttttattaactcacagtatgtaggtaaggagttcatgctcaaatcaagttgtcagccaggctcttcttgtctggaggctctgggaaaaaaaaatccaattccgaaattgctcagattgttggcaagacatccattttgtgtggctttagactgaggtccatgttttcttgctggctgtcagccagggtgcttctctactcatatatatatatatatgtatatatacttaaagttctagggtacatctacacaacgtgcaggtttgttacataggtatacatgtgccatgttggtttactgcactgattaactcatcatttacattgggaatttctccaaatgctatccctcccccaaccccccaccccacgacaggccccactgtgtgatgttcccctccctgtgtccaagtgttctcattgttcaattcccacctatgagtgagaacatgtggtgtttggttttctgtccttgtgatagtttgctcggaatgatggtttccagcttcatccatgtccctgcaaaggacattaactcatccttctttatggctgcatagtattccatggtgtagatgtgccacattttcttaatctagtctatcattgatggacatttgggttggttccaagtctttgctattgtgaacagtgctgcaataaatatacgtgtgcatgtgtctttatagtagcatgatttataatcctttgggtatctacccagtaatgggatcgctggatcaaatggtatttctagttctagatccttgaggaattgccacactgtcttccgcaatggttgaactaatttacactccaacaaacagtgtaaaagcattccaatttctccatatcctctccagcatctgttgtttcctgattttttaatgatcgccattctaactagtgtgagatggtatctcattgtggttttgatttgcatttctctgatgaccagtgatgatgagcattttttcatgtgtctgttggctgcataaatgtcttcttttgagaagtgtctgttcatatccttcacccacttgttgatggggttgtttgtttgtcctctctcacttccttgagcagtggttcgtagttctcctttaagaggtccctcacatcccttgtaagttgtattcctaggtattttattctctttgtagcaattgtgaatgggagttcactcatgatttggctctctgtttgcctgttattgaggataggaatgcttgggatttttgcacattgattttgtatcctgagaccttgctgaagctgcttgtcagcttaaggaaattttgggctgagacaatggggttttctaaatatacaatcatgtcatctgcaaacagggacaatttgacttcctcttttcctaattgaataccctttatttctttctcctgcctgattgccctggccagaacttccaacactatgttaaataggtgtggtgagatagggcatccctgtcttgtgccggtttgcaaaggcattgcttccaatttttgcccattcagtgtgatactggctgtgggtttgtcataagtagttcttattattttcagatacgttccatcaatacctagtttattgagagtttttagcatgaagggctgttgaattttgtcaaaggccttttccgcatctattgagataatcatgtggtttttgtcgttggttctgtttatgcgatggattacatttattgatttgcatatgttgaaacagccttgcgtcccagggatgaagccaacttgatcgtggaggataagctttttgatgtgctgctggattcggtttgccagtattttattgaggatttttgcactgatgttcatcagcgatattggtctaaaattctttttttgttgtgtctctgccaggctttggtatcaggatgatgttgacctcataaaatgagttagggaggattccctctttttctattgattggaatagtttcagaaggaatggtaccagctcctctttgtacctctggtagaattcggctatgaatctgtctggtcctggactttttttggttggtaggccattgattattgcctcaatttcagatcctgttattggtctattcagagattccacttcttcctggcttagtcttgggagggtgtatgtgtccaggaatttatccatttcttctagattttctagtttatttgcgtagaagtgtttatagtattctctgatggtagtttgtatttctgtgagattggtggtgatatcccctttatcattttgtattgcatctatttgattcttctctcttttcttctttattagtcttgctagcagtctatcaattttgctgatcttttcaaaaaaccagctcctggattcattgattttttgaagggttttttgtgtctctacctctttcagttctgctctgatcttagttatttcttgccttctgctagctgtcgaatttgcttgctcttgcttctctagttcttttaattgtgacattagggtgttgattttagatctttcctgctttcctgtgtgggtatttagtgctacaaatttccctctacacactgctttaaatgtgtcccagagatcctggtacgttgtgtctttgttctcattggtttcaaagaacatctttatttctgccttcatttcattatttacccagtagtcattcaggagcaggttgttcagtttccatgtagttgtgtgattttgaccaagtttcttaatcctgagttctaatttgattgcactgtggtctgagagacagtttgttgtgatttccattcttttacatttgctgaggagtgctttacttccaactatggggtcaattttggaataagtgccatgtggtgctgagaagaaggtatattctgttgatttggggtggagtgttctgtagatgtctattaggtctgcttggtgcagagctgagttcaagtcctggatatgcttgttaaccttctggctcattgatttgtctaatattgacagtggggtgttaaagtctcccattattattgtgtgggagtctaagtctctttgtaggtctctaaggacttcctttatgaatctaggtgctcctgtattggttgcatatatatttaggatagttagctcttcttgttgaattgatccatttaccgttacgtaatggccttgtctcttttgatctttgttggtttaaagtctgtttcatctgagatgaggattgcaatccctgcttttttttgctttccatttgcttggtagatcttcctccatccctttattttgagcctatgtgtgtctctgcacgtgagatgggtctcctgaatacagcacactgatgggtcttgactctatccaatttgccagtctgtgtcttttaattggggcatttagtccatttacatttaaggttaatattgttaggtgtgaatttgatcctgtcattatgatgttagctggttattttgcccattacttgatgcagtttcttcataggattgatggtctttacaatttggcatatttttgcagtggctggtaccggttgtttctttccatgtttagtgcttccttcaggagctcttgtaaggcaggcctggtgacaaaatctctcagcatttgcttgtctgtaaaggattttatttctccttcatttacgaagcttagtttggctgtatatgaaattctgggttgaaaattcttttctttaagaatgttgaatattggcccccactctcttctggcttgtagagtttctgctgagagatccgctgttagtctgatgggcttccctttgtgggtaagctgacctttctctctggctgcccttaacattttttccttcatttcaaccttggtgaatctgacaattatgtgtcttggggttgctcttctcgaggagtatctttgtggtgttctctgtatttccggaatttgaatgttggcctgccttgctaggttgggaaagttctcctggataatatcctgaagactgttttccaacttggtttcattctccccatcactttcaggtacactaatcaaacatagatttggtcttttcacatagtcccatatttcttggaggctttgttcatttctttttactctttttttctctaaacttctcttctcactttatttcattaatttgatcttcaatcactgataccctttcttccacttgaccaaatcggctattgaagcttgtgcaggcatcacgtagttcttgtgccatggttttcagctccatcaggtcatttaaggtcttctctacactgtttattctagttagccattcacctaatcttttttcaaggtttttagcttccttgtgatgggtttgaacatcctcctttagcttggagaagtttgttattaccgaccttcagaagcctacttctgtcaactcataatgtcattctctgtccagctttgttccattgctggcgaggagctgcaatcctttggagtagaagagccactctggtttttagaattttcagcttttctgctctggtttctccccatctttgtgattttgtctacctttcatctttgatgttggtgacctacagatggggttttggtgtggatgtccttttggttgatgttgatgctattcctttctgtttgttagttttccttctaacagtcaggtctctcagccgcaggtctgttggagtttgctggaggtccactccagaccctgcttgcctgggtatcaccagcggaggctgcagaacagcaaatattgctgcctgatccttcctctggaagctttgtcccagaggggcacccacctgtatgaggtgtctgctggcctctactgggaggtgtctcccagtacatgggggtcagggacccacttgaggaggcagtctgtccgttctcagagctcaaatgctgtgctgggagaaccactgctgtcttcagagctgtcagacaggaacatttaagtctgcagaagtttctgctgccttttgttcagctatgccctgccctcagaggtggagtctatagaggcagcaagccttggtgctgcagtgggctctgccctgtttgagctttctggccgctttgtttgcctactcaagactcagcaatggtggacgcccctccccctgccgggctgctgccttgcaggtcaatctcagactgctgcgctagcagtgagcaaggctctgtgggcgtgggacccgctgagccaggcgcaggatgtaatcttctggtgggccattagctaagaccattggaaaagtgcagtatttgagcaagagtgtcccatttttccaggtacagtctgtcatggcttctcttggctaggaaagggaaatcccctgacccttgtgtttctggggtgaggcgatgccccgccctgctttggctcaccctccctgggctgcacccactgtccaaccagtcccaatgagatgaaccaggtacctcagttggaaatgcagaaatcacccgtcttctctgtcaatcatgctggaagctgcagaccggagctgttcctattcggccatcttggaacggaccacttctctactctttttttttttttttgatacggactctcgctctgtcgccgaggctagagtgcagtggcgcaatctcggcccacttcaagctccacctcccgggttcacaccattctgcctcagcctcccgagtagctgggactacaggcgcccaccaccacgcctggctaattttttgtatttttagtagagacagggtttcaccatgttagccaggatggtctcgatctcctgaccttgtgatccgcccgtctcagcctcccaaagtgctgggattacaggcgtgacacttctctactctttaaaggccactctcaggtcctttccatgtgagttccatcttcatacctactatggtgcatttaatccttctagtgctccaaatctctgacttcctttctgcaaccaaccagagaaaactcagattttaaagggcacatgtgaataggttaggctgggcccactagcataatcctcccttcttaaagtcaactctgccagataacatgacctatcataggagtaatatgtcatattcacagggtcaaatatttgaaagacgtcttagaattctgcttaccacaaactgtctttttcccactgttttgaagtgctacctatgccaaaaacaaaatagtcatatatatgtgtatatatatgtatatgtgtataatatatatgtatatatatgtataatatatgtgtatatatgtataatatatatgtgtatatatatgtataatatatatgtgtatatatatgtatactatatatctatatatatatatctatatatatatatacacacacacacacacacacacccctatatatatatagtccggggtgagtcatatatatagtcatttctgggaagagtttatgtagaatcaatatttcttccttaattgttcattgaattgactaatgaaatcatcttggcctggggttttctttgtgaagagattttaaattacaaattccatttctttaatatatgtaagactattcagggtatctgtttctttttgagtaagcttaacatttttgtctttgtgcagactttgtccattttgtccaaggtgtctacattcatgacataaagtttttcacaaaattatgtgattatccttttgatatctggaatctgcagagatgtcacctctctctttcctgatatttgtaatatcttaatatcttttgtcttctcacatttttttccctgatcaatctggctaaacacttatcaatttgattgttttattgaagaaccagcttttagttccatttattttcttgattattttattggcttcaatttcattaattaattgcattaatttctggtgtgaactttatttcctgcctacttcagagttaactgctcttctctttctagtttcttgcaatggaaactgaaataattgattttgtaatgtaagtttttagcgttataaatttctctctaactactgctttggccctgtcccacaaagtctgatatcttggagtgtgacttgcttctttcacttagcataatgttttcagggttttttcatggtttagcatgtgccagtgcttcattactttttattgatgaataatatttcgttgcatgactttaccatgttttgtctttccattcatcaattggtggacattcagattgtttgcactctttgactattatgaataatattgctgtaaacactcatgtacaagttttttgtggacttatgtttctaattctcttgtctataggtggaattgctgggtaatatggtaactctgtatttaatattttagggaactgccaaacagttttccaaagttcctgtaccagtttataattctaacaacaagacatgagggttacagtttctccacatcttgtcaacactggttattgtttgtctttttttattatagccatcctagtgaagtagtatctcattgtggttttgattatatttccttgatgactaatgatgttgaacatcttttcacatgcttattggccatttgtacagattgaatatcccttatctgaaatgcttgagatgagaagtgtttaggatatgggattttttttggatttggaaatatttgcatatacataatgagatattttgggaatgggacccaagtctaaacacaaaatttacttatattttatatacacctcatacacatagcctgaaggtaactgcacaatatttttaattttgtgcatgaagaaagttttgactgcaacccattacatatagtcatgtgtgaaattttccacttgtagcatcatgttggcactcaaaaagctgaattttggaagatttcagattttatgtttttacattagggatactcaacctgtacatcttcttaagaagatatttagaaatgtctgttgcaatcctttgcccattttcaatcagattgtctttattattgatttgtaagagttctttatatattatggctagagatctttatcagacatatgatcttttcccattctttagattgtctttttactttcttgatggtgtcctttaaagcataaaagtgttagttttgatgaagtccaatttatttatttatttttgtcacttgtgcttttgatgtcatagttacaaaccattctgtaatctaaggtcacaaagatgtatttctctttcctactgagagttttatagttttagttgttacatttagggctatgatccattctgaatttatttcctatgtcatgtgaggtagtgatccagcttccttcttttgcacatgtatatccacttgtccaagttccagttgttgaatgtttattaattttattatctttgtcatttctgcatcagttttgactgatcagtttttctcctcatttgggttgtattttcttgcattgcatgcatgataattttttattggatagcttacattctgaattttaccttgtcagatgctggatatttttgtacttctataaatattattgagctgtgttatgggacacagttttgttatttggagacggtttgatactttctggtcttgcttctaggctgttagttggtaccagaatggcatttggtttagggctaattttactccaccaccaaggcaaaaacctctctgagttctctagttaccagtccccaacctttttggaaccagggaccggttttgtggaagacactttttccctggaccaggctgggggaatggtttggggatgattcaagcacattacatttattgtgtactttatttccattattattaaatgttaatatataatgaaataattatacaactcaccataatgtagaaaagtgggagggagccctgagcttcttttcctgcagctagacaatcccatctgagggtgatgggggacagtgacagatgatcaggcattagattatcataaggagcacgcaacctagatcccttgcatgctcagttcacaatatggtttgcactcctctgagaatctaatgctgccagtgatctgacaggcggtggagcttaggcagtaatgcaagcaatggggaatgcctgtaaatacagataaagcttcacttgcttgcctgctgctcacctcctgccgtgtgacacagtactggtgctgctctagtggatgcattgttggttgtgacgttctctggtggactggtagaaacagtgactattctcaattcagggattattccctctaattctttcagatgattccttcacccagcttctcaaaatttctcatacaattgtgctgatctgcacctagctgaaattcagggggtcccctctgcagatctctggagcgttctctcactcactacagctttctccttctacaactctgccctaccaaaaaccactgcggtagcctccccaaactatcacctctatctccttgattacaaatgcattgttttaatcaggtgtgttaacatggcaagcatggagacaactgcctttgaaagaagagctacttagaattcttgaaaggagggggcattgcacactaggcagggcctcatggggaagcacccagttggggaaggaggcagaaggagcacaggagagcatggcccagagccttcattgtggtccccatgggaaggaagggatgaggcagtttaggcagctgagcaggtttagttaggattggctggtatgaaaaattttggtgggctttgagctataggagtagttcctagatgtcttgtgtccagccctgaaataattcccagcaggatttagagtgatttagagtatttggcttgttgtgtgagagttttctaagggaggtggttggtgggtatggcctttggattggttgtttgctcaatatgaaagaaatgttcaccgtggaatcatttgctatctctaagaatttagctagtcatgggaggggcagcctctccccgacaagcaaggcctccaagatgtcaaagcatcataaaatgaagacaataaaaaacaattaatgcacttatcaactgagggagattaccaagctctgcttgtacttctccttcttgcactgtagcctgaaaacttttcaaatgataagctgagacaatcataagactcctctcattcgtttctcttttctcagggattgctgtctttttgttgcccaatatccagtgtcttgaaaacttttttcttcatgtattttatctttttttttttttttagttgtttcaggattttaggtaggagggtaaatccagtccctcttactccatcttgttcagaagtagaactatggaaaatcatttccatttgaaattaaaattcagttgagatttttgggaaccaataacagtttaaacaggtttggcttctatatcgataattcagcagtctttattaacagattggagtgttagagcaaggtagcgaaaagacagagcatctaagccaagacaaaggatgggtgggaagacttcaagtagacagaatgccatgaacaaaatggctgaggatgcaaattttatgtgtttagaggataagtagctcacattcactggaaagcatgagtctttaaatgaagccaagcttcaacataggttgggatcagattttgtagagaaggctaatgggagttataaagaaaatgagaatttctctttcaataaaatctgtcttttcctcatggtgttccccaaacttttttttctcctaagcccccactaatattcatttttcattccttcaccttctcctaatatctaatccatttcttagctctgtaaggtcggccttatttgtagctctagaaagaacttcactgctcagtaaggtagacattagccatatgtggctatttaaatgtaaatgaattaaataaaattgaaatttcagttccttattgccctggccacatttcaggtgttcaagaggcacatctagccaagggcctttgtattggttggatagcacagggaacatttccaccatcacagaaagttatattgcatagcactactctagaatgtgctcagaggcaaaattttaaatttcatatgcggtataactatgtgaaaactaagacttaacaataaaattttaaagatttaaatgaagtcatcaaaatagtaatattgattatttttcactaagttcttgctaatcatttcttctactcatataatttctgcattttatatacagagcacatgtttatagtaggaaaaattatgtctttgatcatttattctttttcatactataagcactttaagtctcattctctcccccactagacaatataatagtattctaactagtctcttagaaaataatacaaattgaaaaagagaaaggctatagaagaaaaatgacagaggattagtctaagagagccaataccctactagtaggagttccagaaagaggggatggagaaaacaggggaagaaattaccaaagaaataataaaagaaaattttccagaaagaaagttggtaagtccaaacagtgaatgggcccactggatttccagtctaattaaggaatagaagacttgtattagggcatattcctatgaaacttcaggattctagagctaagacagctgagtttgaggataaggagatgggataggggcaggacaaagggaagtagtcacattccaagaaactaaaattgaaatcataaaccttggatgctggaagataataaacttgagggtaagcccctttcagcttaaaattctatatacagccaaactatgtgattcatgtgggaaaagaaacaaaaattagacatgtaaacatctataaaaattcctgtgtatctttttattagttactggaaaatgtgcttcagtaaagtaagggaataaaccaagaatgagaaagtcatgaacagaatccataaaacagggaatccagtccagagaagtggcaaagggaagtccaaggatgacagctatgcagcaggcctggagagcaacccgtccaagattggatcaaaagaatggaaggctctgtggggggagggacagaataaatgaattattggatgtgtttgtacatttgggaataaaatctgatgcatttttgaagaaagaattttcattgtctactcatgagaaaagaaaatcaagtaaaggcaacaaataattctaggaaagacaaaatgatgtacaaagaaagaaactataacctatttgaaagggaggcagggaagtgagaggagaagaaaggacaggcagatcacctgggattccatcaaccagagataacgtgttattattttattgtttatcttttcaaataaatctgtaccatacacataatgtatctttacaatagtgggatcatactgtactatttcatggtttgttttttgtcagttactattatttttaaatatgtatttgacattatatattctgcaggataatttttaataggttatagaataattaatttagtgaatagaccataatgtattaatcaaatctctgttgctttaatttagttggtccttataaattccctgaaatatagtaaaacaaagacagttctgattttggaaccgggacttagagtcttatagtccagcttcttagtatataactgcgactaaatatcctgttctgatttaggagattaggccaagaaaatgcagaatatttactcctatatgtactcatgctaatatcacagacagacaagaatgattaaagtgctactttttaggattatatcatggctatatttaagggagcatctcctaccctattctctgtctagagtgctgctaacccaagtatctgcatggtccattttctcatttcattcaagttcttctctgttcacacatccccttatcagggaggtcttttcagtgaattttacataaaataggccacctctgtcactgcacagacttatctcctaagctgattttatttttctccatagcactttctcaccatctatcatcccaacactaaaatataagctcaagaatagtgtttctgtcttgtttgttgctccatctccagcgcctaaaataaggcctggcataaagtaagtaggtgctcagtcatctttgaatgaataaacaaatgaatgagttaattaactgggacttagaaaacaataggaacaacccaagaaggcagtgaagggaaattctaagtcgacagtggtccaggttagagcagaaggtctcagggtcctggaaaggaggtctccaggaagaattgactcagaaaaatattgagtagagttaagagggaaaaaaaggtaactgtaacgaaaacaaatgttggaggacagagaatggaagtgtaagagtggaagtgtggttctagataccacttggctcagcagtgaacaatattcagaagtaaaggtgtaagtatattatttaagtaagaatagaataattcaaaataagatataaacatgttgagaagatggcaggaaggaatggtagggctgtaaaagggagctaaatcctcatctttcatagcaactcagcaagggtaatcaataagttatcaagaaatgacaagatgatcgtaagtgtttagaggtttgaagataactggtggaaggacagctaaaagagttcagagaggcttcctctaggaaacgggtctagaaatgggaaatgatggaaaagaaaactatggtttggcactacaaccatttctgtgatatttgatatgaaactatatatgtgtatgtgtgttaccttgataaaactttaaacaaggaaagcagaggcaaaatgtaaaaattaataatctgggagctgggtgcggtggctcatgcctgtaatcccagcactttgagaggccaaggcaggcggatcttctgaggtcaggagttcaagaccagcctgaccaacatggtgaaaccctgtctctactaaaaatacaaaattagcggagtgtggtggcgcatgcctgtaatcccagctactctggaggctgaggcaggagaattgcttgaacctgggaggtggccgtgagccacgatcgtgccattgccctccagcccgggcaacaaagagcgaaactccatctcaaaaaataataataatctggaactaaaattccagatggttgaagcaacagggatggaggcaggatgggaggaaggcatggggaaagtgcaagtatgctaaggtcatgccttgtttagatgagtaattccagacagcaagagaaaataaaaagtaagtttgcagtttttaggtaaggctaaccactagataaataaaaatggaatttatactttcagattgttaatgaaaagaaatttgttaaatcctgggtggggaggaaaattcatcattcacactaaagataagaggcagaaataacaagaaagcgtagggtatataaagcaagatgactggcgtcagaccaaatagctttgatctcaatatatgtgaatatgtttagtccttctatttaagaaacagagactttcaaactgcatttttaaagaagtccacttacatgatttcaagagacatacttgaaacaaaatgacaaaagattgaaaatgaagggaaggacagatgctggcaaaaaagaaagcaagataagaataataataccagccaaaatggaattcagggtacaaagcattgaatgaaaattttcttaccagtacaagaaagccacataaactcatgttatctctggcgttcttcctctttcctaggtatttgacatcttgaaagtgagcatcactttgcttattttgcagccagtgtaatgggactaaccctattgaaaactcctggagaactttaaacgtatttttaaagataaataatccttttagttgtttcctttaaaaaaaaaaaagccagtatattttcatgttagtaactgtttgcattttcttggtatacatgatttattggtaacaatttgtacttctaagccttaaatcgaaatagcacatattggtctggtaaaattgcacacatcatctgctgtggtatctgacattgggctgtggcactgttaaacttttgctatggagaagccagatgaggttggaagaaggttcttttaaatgaaatgctcttgtttccagagactgtgtgcatgttgcctgactcacattcctctgttggcctcaccagtatctctcatcagatagcacgtgccaaaagaaaggaggaacatgaatttactaaaattaatttgaaatttgtgtttgttctatatattctaaatgtttgactttttattttttaaatgtagctaatgctgcctaccttgggggccaagaaatgatggaggtggtgaagagagatgacgaaaccataaaggagcatttatgtaaggtaatcactttagtgctgcaaggggatagataataagtagatgggcagagatacgagggcaaaggactagaactagttagaatctgtaagactttaagggttggtagaatgacatagagttctacttccagttaaaattgaaattatccctgaaagttgtgtagagagtagtaaagctaattgcataataacttatttttttatcacctgtttttgttgaattaattttagaatcaatacttttctattttgtcaatgcattttagcctctctaggccttctactgagaaaactccataatatttatagaataaataatgttggaatataaatgaaacagtggaaaatacattatatgttatatgatctcatgactagtgagcctttcttattctctaatgtgttagagtaggaatgtcctgctctgaccctaagaccagttttgtgaaatattcaacatttgggagttatgctgcaaatactagaatcttgcacacacacatctggaagcaccaatctctgaaactataagagtagggtttagtatatgtctaaggtcaccctagaatttggatgactgtggtactcctgtggcatcatttgtctggctgtccgttctgagtaggacagaactgtactaatattatagccactagccacatgtggttatttgtggctagccttaattgagttgtgccataagtgtaaaacacacattggatttcaaaagtttagttcccccagaagcaaagtatttcattaatttttatattgattacctgttgaaatactaccttagatatagtggattaagtaaaacatattattaaaagtaatttcacccattcctttataattttttaaacattgtaactaggaaattctaaaattgcatatgtaccttgctttatgcttctgttggacagcattagtcttaaactttacaattggtgctgaactatgatacctgctgaaatgatccctgctgagtggcaaactctcataggactcaggagcaatccacaagtgaaatacgagataacccactggacttagaatgtctttataaaccttgatacatttgacttaaacttttctacattgttaattcttaattccataacctcccagtacaattatcttaaaacgagaagtgtatatgttcttaaaattttttttttagaatattgaaaatattcacccagagaggacttttgaaaatgccagtgttgttttgtctcatggccatagtggtcatcatatttctgaaatagcagttggctagagattgaaatttggaaaccagaaggaagccctcactagccgaagggagagtgctggggcctcaggagggccccctctccagggctttcagctacttccagtcactgagcgatgtgaaaatacaagaaaaacagtattttattttccatttaaactgtaagtgaatctgtttcaaaaatgcatttaagttcttccaggttgggagttcataaaaacagctcaactctcagttaataataagactggcagatgctcacttccaaaattcacacttgctgaacaactagacccatcatgtgtcagagtctgctttaccacctgtggaagccagctgctgtaaaatactcatcatttctggattcagcttgtgtgttgtgctcagaaaaaggtcaaagaaaggtgctaacttattcctgtcccaagtgaaatccatatgcaagtgtaatcattcccagatagagggctgttcatggtaattatgtcaggactgtaagtttactgaaattttatggggaaatacgggggtgtaatggtaaatggtagacatttcaaggttagtattaacacacagtcacaggaataaactttttcaactccaggcaatagttttgtttttgagatagcattaaatatacttctagaatatggggaaacaaagcattgtttcatttaatcatgcaaaactaccttgcagttaattcattatcctttctaccagcaaaattcaagctctccactagaataatacaattacagctcctaagtgaaactaggtacagagagacaggaagtttattgcaactttttgtttctgtaataaaaagaggaaacatgctgtaatttaatattggtagaagttgaatcaacatatgtcccagtctgcttgagaaaataaggaaacttaaaagtgcacatagttctaggaagatagtgggcattgcttcctgccttccaaacacccccgataactggtcaaactaaaaccaatgcccgggattagaaatattcctatttaggtatcttaatcgaggatactctttcccatttccacccaaacaaaggcgttcagaaacttcagaactatccaggactgtccagtgtgaatagtcatcaagccacacattttgttgaaaaatcatttcctgtatctcagctattcaactaaaaatagttctgaaaaatatatctttgtgccatccagccagaatgccacaggaaagttagtctaaaaataagctttctactgtatcatgcagacagcattctacttctttctcctccccaagagaactatcataccataatctacaggctttggttctaaatccaaattttctaccactggatttccatttgacacaagaagagagctttttatatgcttgaggaaaatgggcatttttagctctaaaagatctgttgagctgattatcctccttctgaggtccagtgactttatacacagtattggacataaagtaatttattttattaaaataatttttctttcctggagcaaatataacagactcatggttgtttccaaaggagtataccatggtttatggcatcataggttatttctttttcctttttttgtttttttgagacagagtcttgcactgtcgcccaggctagagtgcagtggcacgatctcggctcactgcaacctccacttcccgggttcaagcgattttcttgcctcagcctcccgagtagctgggattacaggtacccgccaccatacccagctaatttttactagagacagggtttcaccatgttggtcaggctggtctcaaactcctgaccttgtgatttaccggcctcggcctcccaaggtgctgggattacaggcatgagccactgcgcccggcctataggttattttgtcatttgactaaatcctgcttgtctagtgtcatccccaagaggccttcccagtccttggttttggttagatgttactccctatgtaaagttatattgcatttatcacacagtatttaaacaatcaaccttcacctttccccacgttgaggtaaggagctgtgtcttcttcgtcttgatgtcccctagggcctagcataattcatacctggtaaacagtcagtaaatatgtgctagacagatggatagatggggacgccattaactagagtgtggattctaaaccttttttgtgccatgcatctctttcgctctctcataaagcttttggattctactcacaatgatgttaagtgcataaaatacacaagattacaaaagaaagaagttgttggataatgagatataatagcagtcagaatttttttttaatttgtaatgataagtataatgttttagttaccttgagcaagttagtgtgatttaaaaatacttatcatttttatagatgacaaaatataggcattactaatattgtagcttgttgcctgtattcctaattgaaagaaatactaaattttggttagagattaacaaaagtaaacatgtaaatttttccaaagtttacataaccccttctccaaacctctggacctgtacaccgcaagcaaagaagccctgcgttagagaaactagaaaaggttaggtagcatgatgttgtggcttaggcactggcctgagaacaaaaagtcatgatatgccacactgaagagactgttttggggagctattgaagggtctaagcatgggagtaacagggtgacagtcaaaacatttgacaaccatgtgatatagggattgaccaatcagaatgtatgccagctatgaacagccagttcaggggcaccagttcatatcagttagccctaggaatttggtgagattaacaaatgagagggattatcttgagggcaaatgtgtggtataatactagaaaaggatgaaatatgagttggggagcctgtttacaaagcttttataagaactaaggcattgggattgaagatggaaagatttaggagatagaatcaaaggtactgagtactaacaggatattggggaatggagatggaggaatctaagattatttctttgtatctggacttggtaataagacagggaatatgggaagagaagcagcagcaagttatgggagatggctgaacaagtggttcattttggtacttgtatttgagatgccagtgggacatgcaagtggatccgtgtctggcaggccctggatgtatgggtgtaaagcttagaaagatatttgaggctgacttttggttggggagtgatgaggctgtagttaaagccaagagcatgggtaatagcagcctaaagaagtatacagaataaggagagaagacttctaatgattgatcattagggaacccagcttaagggttgggaggaagacgaggagccactgaatgaataagatgggaggggaggtaagaagggtgggaaggagaaccaggatgaaataaaccaagggaagagaatcaactgtgcgttttcgccaccccaatcccagtttgtctggaaacctctggagtattctctgtttcatgaggcacctggtgtgtcagaggcaaataagaggtcagcactcccttgttctgtcactgttctaagccataagggatgcatgtctcattcattgaaaagtgaactcatgtttggtttataaacttgaagttttcatttcaaacccacttagggggggaattctaaactgccatgaccacgtttggcccaggcttacggaaacagctggtgtgtgctactgccagactgaatctgagcatcactatcagtaagtaggaatctgaaattgctccaaagagaacacatgaagtgcagctttcagatgaagttaggcagtggtaggggggctgcctgtaaggtggtgctgcccctgcccccagagggccaggccagggctacagtgtggcttgggaaaggggcaagtgtcctcaagaacaggaactcctctgctattgctctctccccatccctcttagcctgccttagcccaaaggtgtgtgttgcctttgggagcaaaccttgtgcagttgtttgcagattggggcatgcaaatccttctgacatgcacatgtcctgcctgctgcagcataggaaatgctccctggaccagctcaccaggcctgcctttccgccaagcctcggtattctgaaacggattgtgttagttctgcctgtttaatttaaagcctgtccagaatgtcataatcatcctgaaaatagataggtttgtttttatctcaatattgtgaccttgaaagctttatttgggcaattgtgtgagcacactctggggttctgcagtggagcctggtgactgaggggaggcaaacgtgctggagagctgggctcccagagtctcagccaagcttcaaacaccaaatccacccttgttcatgaccctgcttaagttaccggacctcactgtgcctcctttattcatcaataaaatggttaataatagtatgtagcctcatacagctattccaaaaatatgctataattcataccttgtaattcagaccttataagagtatctccgccgggcacggtggctcatgcctgtaatcccagcactttgggaggccgaggcgggtggatcatgaggtcaggagttcgagaccagcctggccaacatggtgaaaccccgtctccactaaaaatacaaatattagccgggcatggtggtgcatgcctatagtcccagctactcgggaggctgaggcagaattgcttgaacccaggagggggaggttgcagtgagccaagatcatgctactgcactccagcctgggcaacagagcgagactccgtctcaaaaaaaaaaaaaaaagaaagagtgtctggaatgcactaagcattcaataaatgtttttattactattacaaagttagttatagcctagttatgcttctaagcactttaaaaagactatttgcctaactgttcctcttctcacatccccttttcagatactttcattgtgttaatgaaaggtattagtgatgctgagtatgtggccaagagaccccggaatgcccaatgccattctaaacaacagccaccactccccataagatgcctcaaggagctgttgtataggaaccataatgaggggaaaacacaatagtacttgatttttaccaaggcttgggcccattattctagtccagagaagtctgatgaactggacttagcccttctctcagttagttgagtaaaaccattccagtacatttgcccccttcttggggcacagatccagggaaggacagaaacacagaaggagactggcgctcagggcctcttactttgccagagggcctcgccagaggaaagcagaggccctgggttagcatctcagtgcagtctcacgtgagaaagagacaagccagtcacttgatggcctcgtggcttgtatgtgggagggagaggatcctggccctttacatgttagccacacggaaaggagagtgctgctctgcacaccgctgtatacacagatggttgttccagctactggagagtgagccacacagtgccccataggacctactcctcctttggcgctcccattcccaccgctcccctctgtgcctgcagagagaagcagggttcacgggcgggaagcatttgtgttttcacctccatcctcagccactttttaaaaatctttggagatttcagttctcattttctcaagaatggtaattgagccagttaggaataaacggaagagaggaaacaaggtaactggaaaaactgaagtccctaaaccatctccctttctttagcaattctgcaagtccctaaaaacagaggctcagaaagactgcagtgaaatgttgacactttgcagctgcctgtgtccccaacagggataagattttttaagtaactgaaaggagatgcttatatcacagaatcggtttcctttaacattgcaagattggggcttacatgtctttgactctgaggggaggggagaagtggaagcctgctgctgtcatccagactgtctggactctccccagaaatgggcatgcattggaggacctaacagtttatatcccgagcccgggaaagcttcaaggggatgaaaacaggagataaaggcagggtaggggccctagctgggaagtagggggcctgtatgtgtaggtactaatttgatcccttggtattcaaccgactgctttatatctgaccttttgcttttttcacaaacaatgaaacaagcaaaaaacctgctctagtgcaaattatttcaaagaaggaaagaaaacctggagaaagcaggaatgacatatttttcttagacctctggaagaaaggccaagaagatagatctctctcagaatctgtgtcactcctctttggtcactgtctctagtgctggcttcctggttgccctgccatgcagcgtaagctgccagggagctacagctgttgatgaagtgctaacagaaagccttgcattgctcagaaaagcggtgggcattaccttcactgctgcaagaacccacaggctcaccctgtgagctcaccaggaagaaaagtaactcccagaatgtcggtgcctttcttcatttggaagatgctcaaccaaggatagccaaagggcactatagcttaggctccaggtctcctttatgaggaaaagtaggttttattataaaagtggaagtatagaatccacaccaagagctgactgttagtggcggcttgaggatagggatgtgcttcactgtttatttggttggcgacttatcttctaccccacctgtctttctctacagtcatgtctggggaatatgacatgtacattttttagataatgagtaagtatatggtaaaacaactttgttttatattttaaaaaatgtttaatacttatacattttctgagcctatgtcaaaaacaacttatcagaatagaatatattttctcaaaggctaatgtaaggtcatgtggattctttttccttgagcagggcacagctcccacccacccagcccaccattgcccagtctgtgtcgaggagctccctttgtcctcacctgtaaagcagcagcctttaagagtgcccaccatgtggaaagcacttgatacactttgttttccagtcctcagcactagcccacaggtaactagttctgtcttactttacagatgagtaaacaggcacagggaagctaagtaactggtccaggctcacagcaccaataaatggcagaaccaagattccagtccaggtggatatggctcagggacctgtacagtcttaacactgtactcactgcactacgctcttcttggctgcataaggagcttgagtagtttcacaaattactttagaataatataaatacaattattttaccacactgtgatataaagacattatgagaagccctttcactctcagcatgacacccccagaaatgccgtttaccaccctgctcaggcctgcactatatcacaaaacaggcaccccacaaattgactacccaaagtagtctgtgccaaaggctcatcaagctggatttctcgttggaaacatttcaagttgtattgatgagatatcgtttgtaccaaacttgacttcgtggtgaattatgatttaaagagcttctaaaattcagtttatccataaggttaacaccaacaacaaatatatatatgcaaaaatatatagagatgcaaaactttcattttattagcccttttattcctgtaatgcctgtagtcctactgtcctattgaatagacagataattcagatagagatttttatgtgtggcttttaaaattgttattattttaagatgttgctatgtcattgaaagtgagttttgttattagctaaatcataagatgcttctaatatttctttgttcttactataaatcctctattagtaatgcataaaagcatgcaactccaaatgtatactaaaacaaagctttgttcatgttcactccctcagggcagaatttgggttttcctgctttggggtcccgtagggctttgtccatacctctgtctgcctgttgtatttaagagccagtttatataggtctgttctctcgcctagtctgtgagctgttccagggcagagaccatcttacacacttctgaatgtcagccacttagcctagtaccagatatgggatggaatcagagtcatttttggtggaactcattttaatctatcagcttcagcaattcactgtccaacagtgctgtttgtagaccccccaaaaagtggggaaaaaaaaacacacagaagaaaagacagatgtggggacaagctgcagcaacctgcagggatattttaggagggccctgtccccttaggtgcacattaaacagttaaagggaagttcatctataagcccagagaccatagtaaccataaatccactttcctgcagaaaacacaggaggaaaagccaaagcatggttctggagaatcaaaatctagactgaaaaaaagttaaattttgtgcttaatagaaaacaatgggttacttaacatgacaatttggaaacagaaaaatttctatctcaataatgtatactttttatcaactctcatgagttccaaaacaagtgctaaggataaataaactacaggaaataatttattttcttctaaacctttgaatgtaaacatcctgctgattgcctgcgattctttgttaacaattccagtactttcatggcagttatcacccccatgacacacagtgcctcagaagagctacatagactgtgagaaggctttcagtaaaggtagttgggaaggctgggtgctgtggctcacgcctgtaatttcagtactttgtgagggtgaggtgggtggatcacttgagcccaggagttggagaccagcctgggaaacatagggagacttcgtctctacaaaaaaaaattaaaaattagctgagcatggtggcatgcgcttgtgattccagctaccctggaagctgatgtgcgaaggtcacttgagctcgggaggtcaaggctccagtaagctgagatcacaccactgcactctagactgggcccagagtaagactgtctcagaataaaaaagtaaataaaaataaaggtggctgtgttagctcctgttgacaactctcacactctattagttttcatatccagtttaagacctgccagttgtcaggttttatgtttttataacgggtctatttactggaattgtaagtagtagcaaaaggtacaagttaggaatgttgtctgtggatttgtagcccagctcttcaatgcaaaattgcttgaaataagcaggttaatcttgctaagcctcaatttccttttctgtaaaatatagatacaatactttccttagagtattgttgtgaggatacaacgagataatacatagaaagtgcttacttagcacagagcctggccattgctctcggcccattggttcatcatggtgcattgcgattcatttttgcataccgataaataaagagtatgcactgttaaccactatgtttttggtgtccagttgtttctctttctttctacttcacccctcctcccccatcccccgccagtgccaccacacactccatactttctcattttcctgttcagggctgcaggtgcggagttctccggtcagatctattgcctgtgatttataatttatagggaaaaggaagtatctcaagccagtgtatgtaaaggcattagataaccatgtgttttacttgtaagccaagactttcataggaagccctttagagaatatatagcctgaaaaagaacttgtaaaagaaaacaaaattttacaaaacgtgagcccacccccatcatcagttaggcgtttaaccaaatggggcccacttcaaacgtttaaggattgtagagaatcgagaaataaaatcagataagcatacgggaggtctagactcctcactgttctgctgtcttgaacactgacaccactctttgttgaggttcctagcacatgccttggacagtgtgtgccccataattacttggacatatttgtctcttgataccctgaggtgggtgtcgggtcccttaatccatgttgatcacccctgctcaaatcactgccttaactgcatgtacggggatggtgtttgctcagtgctgagggcttatcaagctggacttctcattggaaacatttcaagttgtaattgcatcacagaaaagtaaatggtacgttcttcatggaaacagtctttgaaatgtcagacagaaagcaacagcggtgcgtacagtgacgcttttcttgttgaggaaactgtattagatgaggtcttttctgtctggctttcctttgagctgactgccattatcataggacttcacactgtagcttgtactggagtgagggtcctagagtagctttctcagggtccagtgatcttgaggcgagagcatgccctgcagcagaggaacagacctgacaggtatgaacccaagtctgactttccagatttctcagcagtgttccctgctctgaggaagtgctgagtaactgcatagcgactgttccctatcctattccctgaatacaatcgaaaagattgctggtggtaaatatagggagtagcttagagagagcctaatgttatcagcactattggtagataattaatacctgcaaatagtttgtactcttgacagtatttcaaggcaaagctatagcagggtagttgctgagagatccggggaaacgtgtttttctactagtggaaagaatagtctcccactggttgtgaggttgcagcattttagagctacagaaagagctgagaccaggaggaagaactaggcaactgctaggctctcatattctctaggaagcaaaagaagttcttactctgctaagaaccatggcaaaatgaattctggctttaggggctttggaatgcccagaaatggttggagtgaggaaaagtaggagaatgcaaagaatgaattaagtgataaatctgtaagttgcaggtcctctgcagcgtgcaaaactggaaccccaggtaacaaccaagaaaacctccatgaagctggaatactatgcagtcataaaaaaggatgagttcatgtcctttgcagggacatggatgaagctggaaaccatcattctcagcaaactgacacaggaacagaaaaccagacatggcatgttctcactcataagtgggagttgaacaatgagaacacatggacacagggaggggaacatcacacaccggggcctgttaggggatggggggtaggggagggatagcattaggagaaatacctaatgtagatgacgggttgatgggtacagcaaaccaccgtggcacgtgtatacctatgtaacaaacctgcacactctgcacatgtcccagaatttgaagtataattaaaaaaaaaaaaaaaaaaaaaaaaaggaaacctccatgaagcaattcagagtaagtctgccacttgaggtttacttgttcataatttactctctggagtactatgttaaattttttcctctataaagtgtttttaactaaccatctaaatattggttaaggcatcatgttattgtaatgaaggccattgttttcgtaagatcagtctcatctgtcccatattcaggtcatggatttaataattgatacactcaaactatccagtgagcaataacgcctgcttccctgcactctcctcccccagcacttgatcacctccaatccttcttctcgttgtggccagagtggttttcctgacatagggacctcagcatgtcacttcactgtgcagtcttttttgccttgtggacttcgggataaagcgcaacctccttggcatgcatagaagatgctgtccatgacctcatccctctctgcctctccagtcttatctcccaccaccctatattccagccatgtggaattccagttccccacacatgccatgctctttcaagctttggtttgcttggtcttctccccacagtgtgctgccccagcttgaagactcaactgaggcatcaactctggggaatctttcctgcctactacttctgaccagctgcacctcacctgagctctcaaattgtcttgtatacatggggtccccttctcccctccccccaagactgtcttatctctattttccaggttcctaatacaaagtaggtgctccatttgtatttgatgaacaaaggaatgagtaagcaattcagtgtctgaatgaaggagcacatttggtatattagggaagctgcaagtgactacagctggccaactaggggctggagctaggcatagctctgtctttcagtgataacagaggtcaaaggatccttaagatttagttcttggtttttgtagaaattgccactatctgttcttctgaatataagatgttgctttgttgcctttatttttagaactaacagaactagaacatagcagtttttcagtgaaacacagcagcctagagcaatatacatatatatcacatgcaggtttaggtagatatccattcagggtcttagtaatgccacagaggaggctctgtctccattcagctgcttgctgtcaattgaagtatgattattgcacttccccactgaatcaacatacaggctgcatagagccttttcttagaaaggtcataaactctctcaggattctgatcacatttcatcagctacattggaaagcctgagtctatctgatctgtgtttgtattcattcaacaaatacatcccatatgactaccatgtggctatttggaaacaactaagtttattaactggtcactagtcattcagtgactatgtctcaataactgtcttcgtcatcctcaccggccttcattccagtgtccatcccaaccttagtacacaaaactttcctggtaagtcgtttcagtgaattatgagtgatctatcacacaagagtctcccagcatggggatcttcccaccaaattcttctaagtgcactcctgtacatcgtgaagccttgctgccttgagagagccacactctggagagagcttagggactagctcccagggtcaggcgtaggtgctgtcctcagagcactgccggctgctggtgtcatatctgtgtcaggaagggaacgtgttttctaataaaaggtttttgtcttgtctttcagcttacattttattatggtactatagatccttggtgtccaaaagagtactatgaagacattaagaaggattttccagaaggagacattcgactctgtgagaaaaacatacctcatgctttcatcacccattttaaccaggaaatggcagacatgattgctgactccctaaaggatgacttgtccaaaatgtaaattggcctgaggaacaagcccccactgccagtacatggaggcagtcagtgtactagacttagtaggtaaatgtttaattttgaagactgatattagaaatgaagaaagtgagaacctttgtcttacaaaccaactctccgctcgccatgttataggctgaagtaaacacagttgatgaatcattccataggtttaaccatacattttccaagactcagggaacacagtgatctacacagagtcttgtgtttgcacaagatgcccagtggcaccatatggtttattttggtaggcaggatctttgcagatgaaaaaaaaatctacatgtacttgattttaattgagttacattgtagaataggctcctctggaggaaattatgaaatacctactagaaaatgtaaaataaatcagtgaatgttaagagtatagttagatatgtgaagtgtatgagattatgacaaggatacactcatgttccaggagcaggaagtgaacctgggtctcctgtaagacagaagatgaagatgagcccaggctaacttagcacagatcttggctgagatcatcaatgtgacgtctaatgtacctgcactagacagagaataaagttcaccagacattactctggtcagctaaccagataaagaattgttgaaggaccccaactgtgcctcctgccacaggacaaccagcaagttctatgctgagccttagcctcccaggttataagctccctgcaggctcctcctctccagagccaggatggagaggcactgggctgtcccaaagcaggcttggatgtgccaacgtacagttgctccttctgtaattcttgcactaaaactccattaaagaccatcaatgagccaaatagtgtgctagccattgaggatggagttcttagctacttaatgattcttttcttctggaaatcttctagtgaataatttttaaaagcttcttttaaactgctcagtaaaacattgccatacattaactctccatttctgcattaacttcatttgctggaaagaaattattttgttaatgaaccaaacccagccattaagttatgtgaattcaccttctctagacacattgaggtatggcagagaagacacatattccctggcctagagtgggctgacaatattgctgcctcccctaaattgactcaatcttgagaaccacatactgcagtgacagttgatcatggatcagaaatattcctttttctcctagaggaaatccctcatggcattatcattccctaaggacaatgagatgtccctccgctcaaatcctaaagccccctgatgaaagatttggctctgatttgctgccaacttattggtaagtgctgaatgagttactgtgctttggcatagcttctacatcacagcaagtgacttctcagaggggaaaagccaagctccagacaaggagtgctgttagcccaaggggaagagctaatagatacataggccgtaagcacagggctgtacacagatcctttattggcatctgcatgagaggcctagaaatcggatgttagaagctaggaatcatggctctgagcgccttgcatacaggagatactcactgatactaaatcaaggcatgtaaacaatactgggtaaatcatacctaccagaataaagagtaacattcagagcttttcttttatctgttattttaaatgttactccatatttcaaaagtctgcacgtatgaaattgtgtcttatttctggtttttagagcctaagaaagatactcattcttaattcctatttatcatctgaaaaccaaatgaatttttgaaataaatgttttaccagcatttctgacctggtctggcctgatctctgtgttgggcaagagagggtacaatttgagcagttctcctgagttagactcggctcaaagtctctcttttaaagtgaaaagccacctttctcattgcttttttcataggtggaagaatcagatttcaagagactgaagttcattctgtttcattagggattagactaaaatggacaaacagtggaagaaatccattttccagaagcagctctgcctgtatgtcccagtcaaccacatggatggtctttgtgaaagttttaacttcctgcagagttaccgagtgctcagcgattgagctttgaccacacccgtgtttgttcctagtctgttcccagccataagcatctccacaagccctctgtggcttgtgtggcctgatgtccatggccaccaagggcctctcaccatacgcttctccactcaacctttggagagacacggaccaccaaaggcttgatttttcttcatcctacattatattcaaaacaaacaggctgggtgccgtagctcacacctgtgatcccagcaccttgggaggatgagctgggaagatcgtttgaggctaggagtttgagaccagcccgtgcaaaaaacgagacctcgtgtctaaaataatttttaaaaaagagcaaaaaaaaaaagcaatttcagattaaaggagactgaagagacatgacaattggacacaacatctgattctgaattggatgtttttgttataaaagacattgttgagacaatttgcacaacttgaatgaggtctgaagattagctgggagtaagatgccactgttaattttctgatttcagtggttgtactgggaagaagtaagagagtgtccttgtttgtactggagacactgaggtatctgggggtgaggggcatcatgtctgtttactgtcagatggttgaggggaaaataatgttctttgtacttgcagattttttggaagtttgagatgttttagaatttgtaaaaataattat

SEQ ID NO: 15656 - DNA, 48232 bp, Homo sapiens
gtgccgccttcccaggaccctcagggagagcgggcagccttccaggtggacaggtgaggtacagcttgccgagctcagggtgactgcccaaaggaaggacgggtgggcaggcacgcgggatctggcgccccttcttctctatggttcctcgcagagcccctgttgccctgggccagatggcccgtagcagcaaaaataatactgttccgacagctcgcgagttcggagccacttggcctgggagtcccttgagttgcaggccgggcagtcgctcacccgagcgcggtaatgcagcatttgaacccctaagtgtagcccacctgtagggagtcttatggtgcccccgcggaggagtagaggccaaaaagttgggcagctggccgggaagaactcgctaggaggggtcaaactctgggccgggagtgttctttgcccccggcgtttagtgctcacgccgccttttattcacgctgaagaccttaaccgtaaaccctcatccttgggtcttagtttggttttgttccccacgcaagacagaatgcagattggaacactttattccttggttaattcgtatcttccctcgcaagtagttaccggacacctgctttgtgtcctgtgtaccaaacacaagagttgatagtcctggccgggcgccgtggctcacgcctgtaatcccagcactttgggaccccgaggcgggcggatcaggaggtcaggagatcgagaccatcctggctaacacggtgaaaccccatctttactaaaaatacaaaaataaatacataaataaataaattagccgggcgtggtggcgggcgcctgtagtcccagctactcgggagactgaagcaggagaatggcgtgaacccgggaggtggagcttgcagtgagccgagatggcgccactgcactctagcctgggcgacaaagtgagactcagtctcaaaaaaaaaaaaagagttgatagtccttgagttgaaagaacaaatctgtatggagaaagagatacaaccaaaagaaacccagaagatttagaagcatctccagaatgtttattctcaaaagctgttttttaattaaacttctttctgaaactatacgtaggagtgtctcttgtgtgtttccccatttttccacctgaaggttaaagacttagaaacctgctaaggcccctctttccagcatgtagcattctagggggataatcagggcaacacagtgggtgcccatctaaaattttatattttaatattttgctttttgataacttaatgccttcagactggaggattttttctttcttttttttaatttttttaaaattatactttaagttctagggtacatatgcacaacgtgcaggtttgttacatatgtatacatgtgccatgttggtgtgctgcacccattaacttgtcatttacattaggtatatctcctaatgctatccctccccactcaccccaccccacaacaggccccggtgtgtgatctcccccttcctgtgtccaagtgttctcattgttcaattcccacctatgagtgagaacatgtggtgtttggttttttgtccttgcgatagtttgctgagaatgatggtttccagcttcatccatgtccctacaaaggacatgaactcattcttttttatggctgcatagtatcccatggtgtatatgtgccacattttcttaatccagtctatcattgttggacgtttgggttggttccaagtctttgctattgtaagtagtgctgcaataaacatacatgtgcatgtgtctttatagcagcatgatttatattcctttgggtatatacccagtaatgggatggctgggtcaaatggtatttctagttctagatccctgaggaatcgccacactgacttccacaatggttgagctagtttacagtcccaccaacagtgtaaaagtgttcctgtttctccacatcttctccagcacctgttgtttcctgactttttaatgatcaccattctaactgctgtgagaagatgtctcattgtagttttgatttgcatttctctgatggccagtgatgatgagcattttttcatgtgttttttgtctgcataaatgtcttcttttgagaagtgtctgttcatatccttcacccactttttgatggggttgtttgtttttttcttgtaaatttgtttgagttctttgtagattctggatattagccctttgtcagatgagtaggttgcaaaaattttctcccattctgtaggttgcctgttcactctgatggtagtttcttttgctgtgcagaagctctttagttaaattagatcccatttgtcaattttggcttttgttgccattgcttttggtgttttagacatgaagtccttgcccatgcctatgtcctgaatggtattgcctaggttttcttctagggtttttatggttttaggtctaacatttaagtctttaatccatcttgaattaatttttgtataaggtgtaaggaagggatccagtttcagctttctacatatggctagccagttttcccagcaccatttgttaagtagggaatcctttccccatttcttgtttttgtcaggtttgtcaaagatcagatagttgtagatgtgtggtattatttctgagggctctgttctgttccattgatctatatctctgttttggtaccagtaccatgctgttttggttactgtagccttgtagtatagtttgaagtcaggtagcgtgatgcctccagctttgttctttttgcttaggactgacttggcaatgcaggctcttttttggttccatatgaactttaaagtagttttttccaattccatgaagaaagtcattggtagcttgatggggatggcattgaatctataaattaccttgggcagtatggccattttcacaatattgattcttcctatccatgagcatggaatgttcttccatttgtttgtgtcctcttttatttcattgagcagtggtttgtagttctccttgaagaggtccttcacatcccttgtaagttggattcctaggtattttgttctctttgaagcaattgtgaatgggagttcactcatgatttggctctctgtttgtctgttattggtgtataagaatgcttgtgatttttgcacattgattttgtatcttgagactttgctgaagttgcttatcagcttaaggagattttgggctgagacgatggggttttctgaatatacaatcatgtcatctgcaaacagggacaatttgacttcctcttttcctaattgaataccctttatttctttctgctgcctaattgccctggccagaacttccaacactatgttgaataggagtggtgagagagggcatccctgtcttgtgccagttttcaaagggaatgcttccagtttttgcccattcagtatgatattggctgtgggtttgtcataaatagctcttattattttgggatacgtcccatcaatatctattgagagtttttagcatgaagagctgttgaatcttgtcaaaggccttttctgcatctattgagataatcatgtggtttttgtctttggttctgtttatatgctggattacgtttattgatttgcgaggacttttttctttgttaaaatgttgctctgctttcagcattttctcccttgtagtattaccataatgtatttaagattgagcacttaattctgaagtcactttaagtatacctcaaccaaagggaaattaatatattatttctaatgagtgtatttaatataggtaagtagtttgtacacttgtgaaattcttggcattaattgatgtccagaagctgaaagctactctctggtacattaaaaaaaaattgtgtgtgtaattacaagaaagtttgatgtcacagttgcaaaggagttgtgcaaaacaaattgcctttttccagtaaagataattcagcaagttcatcttgagtgtagtgtgtggtttcgtttttaatatgtcctcagcagtagtcatagattttatcttcatcatttaagctttattttctggcccacttgcacagatttaagaaaaatctcactggggttagtgtgcagtcattcagacagcaaatacagcaaaagtaggtgaaaatgtaaaagtcattaaaagaagaattgtgaaattgctcatctcgcaaccacatcaagcaggagcaaagacaactacacagaatcttggtgtaacatacactcattaccacttggactttctcctacagtattttgcagtttgttttttggattctttagtgttatataatatttcaaagtaatatgtgactgggaaatattggaataggtatcagaagactgtagaatttattttgccatttaaatgcttatgtccttgaacaaaaaatgtaaacatctttgaccttcaatttcttgttctattaattgcctgctttttaggtctgatgagaaaggaagagaatataatttgcaaataaaaagaagcaaaaaaaaaaagcagtagttttattgcaaggggctagatggtgatcaagttaggatatagaaaacaattacttgttcttacatgttattctggagaaagatgagatggatacccatagttacagcagaagcgtaaaaagaattctgtttatgcatcatctgtttatgtgttgactttcacctgtatgttttcaagtttatatagggctatgtgctaagattcccaattttcccctttcataccacttattataccagttgcaattaaatacatatataattattaataacttttttaaaaacctttttgttttgagagaattgcatattcagaggaagttgcaaaaaactttacagggaagtccttgtgtacccttcagactgcctgcctcaatggtaacaacttggataactgtggtacgatattaaaactgggaaattgacattgatacaattcacagagtatatttccatttcaccaactttataaggactcatttgtgtgtgtacacaggtctatgtgtagcttcttataactaccgtaatcaagataaagaattattccatcaccacaaggctcccttatgctgcctccttatagtcagtctatcttgtcccagccctatccctaacccgtggcaaccactgctctatctctataattttgtcatttcaaggatattgtgtagatggactcataccgtatgtaactttttgagatccatccaaattgtgtgtatctgtcatgcatttctttatttattgctgagtagtattccatgggatggctatgctacagtttgtttaaccattcattcattgaagaacatttgggttacactattataaatagagcttctatgaacttttgtctgaagatttttgagtgaacatacatttttccccctctgggataaatgcccaagagtacaattgctaagtcatatggtaagtgtatgtttagtgaattaatacttctttagcttgttgatatggtgagttacattgattttaaaatgttgaacacaactggtataaatctcacttggttaaagtatataattatatatttccatattctatttgctaatattttgttaaggtataggtagagaggtgtgagaggttaaggtataggtatgagagatgtgttgtagttttttgcttgtttgttttgtactgcctttgtcaggctttggtagggtaatagtattctacatggtttttagtgataacccttgtttcattattgctactgtattagtaatttgtgtcattttatctttttcagtgatgatttgctggttatagtgacctttttcaaagaactcgctctttatttcatctttgtctatttttatatttttaatgtcattgatttctgctcttatatttattattttcttccttctcactttaggtttattttgcttcttgtctagtgctgtgattattagtttaaggtctttctttgtttctaacgtaagcatttattgctataatttccctcttggcattgcttttgttgcatctcacaaattttgctgtcttgtattttcatttctatccagttctatatagtttaaatttttccttagaaatttgcttgacccatgaaaatatttgggagtgtgtcatttagtttccaagtgtttggtgatttacctgttgtttttctgttgttgatttctagtttttttccacaatgatcagaaaacataagctgtataatttttaatttttaagtttcttttatgactgagggtatggtgtatcttggtggatgttccatgtatgcttgaaaagaatgtgtattctgttattattggttgcagtgttctatacatgtcagttatgtcctgttcattgatggtggtgttctgttcttctgtgtcttcttgatcgtctaatagttattttcgttgctgaagatcccaactataattatggatgtctctgtttttcctttgagctctgttggttttggcttcatgttaaatatctgttgtttggtgcatatacatttaagatgttttcttgatgaattaatccttgtatctttgtacaataattttctttgctctgaagtctacttaactgatggcagtgtagccatcactacttaaaaaaagtagttagtatggcatatcttttccatacttctgttttcaacctaccaatgtcattatgttttagtgaatttcttatagacgctatatgcttgggtcttttaaaaaagaaacttctctgccaatctctgtcttttaactagtatagttatatcatttacacttaaaagtaattgctgtgttagggcttaagccagccattttattatttgttttctgtttatttcctgtttttcatatctgttcctcttttctggtctttctgtaggttgcttgaatattttcagaattctatttgacatgtttatagtgtttttgagtatctggcttagttaaccttttttagtgtgctttgggtataacaatagatgtaacaacttatcacaagggatacttttattgccttttgccaattgaagtttagagacctttcttccatgtaggtcctttctccttttccctttttaaaatttaatatttgtattttctctatacaccttgaacaccacatcaaatgttgttataacgtttacttcaactatcaaatatgatttaagaaactcataagatgaagaatagttcattttatatttaccatgactattacccgttccagtgttcttcctttactcaaattaaaccttattgatacatcatttcctttttgtttgaggaacttttttttaggagaacctcctaaagatatgtctgttagtgacaaattagtttccgtcatctgagaatgttgttcccctttgttcctgaagggtggttttgtcctatatggaatttggccttgacagttctttttctttaacatttgaaaaatgtgccatttctttctggcttccatgatttctgatgagaaatctgatggcattcaaattattgttccccttaaaggtaatgtgccatttctctttggctgcttttgagatttttttctttgtttttaattttctaaacttgacttatgatgtatcttttatttttattttttcccacttagggtttttctcagcttcttgactctgtagatttatgtcttttgtcaaattgtgaagttttcagctattatatctttatttttttcagcgccatactttcttctcttcctctaaaactctgattggatgaatgttaggtcatttgttattgtcctacaagtccctgatgcctttcttgtttctttgtctgtttttctgtgttcagactaagtaaattctgttgatctgttttcaagttcactgatcctgttctctgtcaattccactccactattgagcccatccagcaagtttttaattttaattagtattttttctattttgtaattatttttggttcttactttttaaaacatttcatccttcaaggagagctactttcaatatacatggaatttcttggaaaaactagtaacagttttaggttatttgtatatatgaactaatgttactcaagattttaaacctctgcagagttatctctgtaattagcagatgaagcatgaacatacataatttttttctctttttgtctcaggtaattccttgttacaggccctaataaaagggaaatggggaaggaaatggagaagagaatttaggccttggcaaattgaaaattgtctgtagtatctcactgacaggtaaagtaggaattttgaaattagagaaaaggaaccaggaatgaagatgaaatgaaaaatttatatttacttcactaaaacttttaaagttgtcatatagtttcagatttaaaaagctatttcttccagcctaggcaacatggtgaaaccccttctctaccaaaaatacaaaaagttagccaggcatggtggtgtgtgcctatagtctcagctacttgtggggcggaggctggaggatcacttgagcccagaaggttgaggctgcagtgagcgaagattgtgcccctgtattccagcctgggtgacaaagtgagatcctatctcaaaaataataataaaaataaataaaaaatcaaaaagttctttctcctttccttcatttcccttgaagaatactgaagattttacatagatgacaaattaggtaaatctaagaaaaaacaaaaattaagtagaacaggtaactttcagtggccatacttgagatttaggttatattgactgctgaggtttatcagtttgattcctatccctacaatataattaaaaataaaccatggaccccccccccccattgtcagactcactgacagtataacattgtgattaaaaagctctttctcagtaagtatgaaaagttaatgcatgaaaaataatatatgttaatttagtgggggaaaagatggtttctgtattacagtggtattaacacaagtagctttccatctgaaagaaaataaagttggatccttatataatggattaaaggtttagaagtagagactaataaaaattaaaatagacatctgggaaacaatatgtaaaatatggaaacccagaaaagagttagtatctgcattatacaaagttttcttacagactgataagaaaaagataactcacttggaacctagacaaatgatatgaagagacaatttacagaaaagatagtctaaaaagctaacaaacatgaaaaaatgcttaaacacacttgtagtcagtgaaatgcaaattaaagagtaaggtattttatatccaaagactgtaagacttacaaagtgtggtatcacttagtgatgatagggttgcagagggaaagataccattctacatcgctaaaagaattacattctttttttgagaataatctggcaacatctattaaaattcaaccagtaatttcacacttggcaatctggcctataaaaacaaaagcactggtagatatgaatgtatgtgagaacataggtatttaagggtacttattgcagcattgttctgaaaaaactgggaactaattgagtgcttggcaccagggagatggtcatataacttatggtatatccacattatggaaccattaaaaatgaattacttatataaactctttgacttggcaggatatccatatgttattaagtatgaaagcaaaatgcatagaagtatatataatatgctactatttgtcaaacactggcaactcattcatgaaaaaatacataaatgcttaacatatatttgtgtataattatagaagaatatggaagactatactaagttaataacatgggtttgggagagatatggatggtaaggaggagaggtagagtggaggcatgatgcaaaaggttaaaaaattgtttagaaaaatcacagcatgcattatatctcatttatccatataagtgaaattatatatatgcatataagtagaattttaaaaataaagaacatgagctctggaatctttcagacatttctggattcaaattctgactctgccactttacaacttactagctgtgtgacttaggcaaattgcgtaatgtctttgaatcaattttctcacatattttcttggggtgggaggatgaaataatagtacccatctatagggttgtcatcaggattaaatttagatagcatctgttaagtgcttagcacagtacctggcttacagaaagcactctcagttattagttcttactgttgccttggttcttacgctcttggacatttgttaatatctatttttaaaactttatcaccatcctgccactttcttgaaacactcctcactggcttacattactttacatgtcttagttaatgcctgtttctaattgttcctttttattttgctgatatcttttttccttacctatggatattgctcccaaaatatagcaggggttgccaaagaagcttttgaattagggtgactgggagaatattagtccatatatggcagcagagaagtcatgatgtagggtttatagggttgatttttaaaacaagatgattttgatacttgctctgcagaagttttatgcatcaatgaggcacccagatgaaaatgctcaatagctggaaaaacttgacaggaacttgagaagtagatataaaggattctctcacttggctaattctcgaagtggatgtaatctccaggggagagcatatagagaagggaatccagggcagaaactttggggacagggaataggagaggaaaaggttcccattgaggactgggaggtggcatagaagccaaaatagagaatttctttaagaagctgctggagaaactgtatgtctactttgttctctcttgagctttagttctgtggctcacattgtcttctggccttgttccttattttcttgaaacttaaactacatttgtaactaatcccagcttcctttcctcccactaaattcccttcttttacatttccccctatatgtatgtgaggagtgctttcattcccctcatctttggcatcaaaatctgtcatctctgcccctttcccttccctggttctccatatcattaccaagactctcattcactcctttttcattcccactcttgcctacatttgattgattattatcaaaataatctaaacaggatattttgaaataatctaaacaagattattttgatagctgccaaactctagtgtaatcttgtgttttttctgtctttcatagtcctcttaaaagaactagtttaggccaggtgaggtggctcatacctgtaatcccagcactttgggaggccgagaggggtggatcacgaggtcaggagatcgagaccgtcctggctaacacagtgaaaccccatctctactaaaaatacaaaaaattagccaggcatggtggcaggcgcctgtcgtcccagctactcgggaggctgaggcaggagaatggcgtgaaccccgggggcagagcttgctttgagccgagatcgcgccactgcactccagcctgggcgacagagcaagactcatctcaaaaaacaaaaaaaaaaaactagtttaatccagttaatccagtccctctgccttttaaatccaccagattatctttcctccaacatcttcccaaactgttctgaggaaggagatgaggtattaatgagagagattagtaggatcaccattaatgaaatatagtcaaatcagtttttagaaggttgagtccgggcgcggccgctcacgcctgtaatcccagcactttgggaggccgagatgggcggatcacgaggtcaggagatcgacaccatcctggctaacacggtgaaaccccgtctctactaaaaatacaaaaaaattagccggccgtggtggcgggcgcctgtagtcccagctactcgggaggctgaggcaggagaatggcgtgaacccgggaggtggagcttgcagtgagccgagatcgcgccactgcagtccagcctgggcgagagagcgggactccgtctcaaaaaaaaaaaaaaaagaaggtcgaatacctttttggcaccagggacccattttgtggaagtcaatttttccacaaatggtggggagtggggagtgatggttttgggatgaaactgttccatctcagatcactgggcgttagtttctcatagggagcatacaacctagatccttcgcatgcacagttcacaatagggtttgcgttcctgtgagaatttaatgcctccactgatctaacatgaggcggagctcaggcagtaatgcttgcttgccgcttatctcctgctatgtggcctggttcctaaccagttccagaccatggcccagggattgtggacccctgttgtatactatgtccccctctaaagcattctcagttcttatcggtgtgctttgaaaaagttcctcagaagtaaagcttatgtgcctttgtgtttaacttaactttgcagattgtgttttccaaagatggccacaatagtaactcccataccacatgttctttttacaatatgactttgacacttcttctactgacccctctcagtagaaatgtcacagtcatattgtacaaagaacatgctgtctttgaatattgatgggcttctgtctaacatggaagtgatgctatgtgacttttgagggtaggtcataaaaggtgatacaactttaatctggtactcttgagacatttgctcttggaaccaagccaccattttctgaagaagcttaagtagcccatattggcaggccaaatggagaaggcacatgcaggtgttccaggccaacagcctatgtgacaacagcatcagtcaccaagcatatgaacaaagatacttccagatgactcctgcctccagtgatcagatcacacccagttcttgagttttctcagctaaggccccagactttggatcagagataggctatctttgttgtgccctttctgaattcctgacccacagaatccataagcatagtaaatggttgtcttaagccactaagttttaaagtaatattttagatagcgagagtaactggaacacccaatgtttcctgagaacactttattttcttaagtatggtaactggtagcttgtgatacatgttccttggaaaacctgtttgtggaatttctggttttctaattttttagcttgccattcaaggccttcatagtgaacagtaggacagcttcggtattggcctatacatatccagcaaatcagtctcctccctgaatggtattttatttatagtttctgtatcagtattcttttactcttctagaaagcccttatgtttattcgctgatagtctcttttgtgaagtgcctgttcaaatatcatttttctattgagttgtctcttactgatttgtaaaagttctttgtaaattctggatatgtgcatgttgggacaaaaatctatttttatatcctgtgtgtatatatatatttcctaacaacaggctcgttttcagaatactatacatatgtgtatatatgtgtgtgtgtatatgtatagtgttctcccactctgtgacttgccttctgactctcttaatagtgtcttttgctaaatccaagttcttaattctaatggaggatggaatttgaaagtcttttcctttttttttgagatgaactctcactctgctgccaggctggagtgcagtggtgcgatctcggctcactgcaacctccgactccctggttcaagtaattcttctgcctcagcctcctgagtagctgggattacaggcacgcgccaccaagcgcagctaattttttttttttttgtatttctagtagagatggggtttcacgatgttggccaggatggtcttgatctcctgaccttgtgatccacctgcctcggcctcctaaagtgctgggattacaggtgtgagccaccacgcctggcagtcttttcctttatggctcatgtttactattaccttgtttacgaaacctttggccaccctaagctcataaaggtatgttccaatgttatcttttggaagctttattgttcacgtttcacatttagatctataatatacctagtactatattttgtctgtggtgtgagaaaggagtcaagattcatttattttccacatggatatccagttgaaccagcatcatttatttgaaagaccttgttttccttactcctctgcatgaacgccattgtcatgaatcatgaagatatatctttggatttgtttctggattccctgttcttgtccactgttttgtctatgttgtcttcaataatggtatatttttattaaacctggatatagggtaaagtcctccaactttgtggttgttcttcaaacttgtcttggctattctttttttttttttttttgagacggagtctctctctatcgcgcaggctggagtgcagtggcatgatctctgctcactgcaagctccgcctcccaagcgattctcctgcctcagcctcctgagtagctgggattatagacgcccgccaccacgcccggctaatttttttgtattcttagtggagatggggtttcaccgtgttagccaggatggtctctatcttctgacctcgtgatccgcccgcctcggcctcccaaagtgctgggattacaggcgtgtgagccaccgcgcccggccttgtcttgttattcttgactttttacacttccacatacatattagaattagcttaacaatttccatttttaaaaaaaggaaagggaaaagacctgatttggattggaattttacaaatctaagaattaatttggagtttatactagtgagacttccagttcacgaatacagtttgtcccctcgttatttaatttctctcagtaatatccagcaaaccacgtagctttctgtgtagaggtcttgcacatcatttgttagatttattcctaagtatttgatttttttgatgctgttataagtggtctcttttatgttttattttcaaattgtttgttgctggtatgtagaaatatatttgattttcatatattgaccttttagctaatgaccatgttgcattcacttattaattcaaataatatatgtaagggtttttttttttttgcattttctatgtatgtcatcatgtttgtgaataatcacactttcttcctatccaatctaaatatatttatatctttttttgttttcttattgcattggctgagacctcaagtatagaagtgttgatagcagacctccatatcttgatcccaaactcagagagggtttcaatattttacccttagtaaacatttactgaagatttttaatacttgtattatatgaaaaaaatgaatttcatatttatattttataaaagatttctttatttctcacttgttaagaattttttcatgactattggattttatgaaatattttctgtatcaattgagatgattatataagttttctttattctgttaatgtggtaacttaaactgattaaattttgaatatttaaacaacttctcatttctgatatatacacaatttagttgtcatctattacccttttgtatagcactagatttggtctgctaatattttgaatagtttttgcatctatctcaaccttaattataatgtacattttaaagtaaaaattacaaagaattgctgattgcataaaatgagttgggaagtgtccctctttttctattctctggacaactgtatgtaaaattggtattattccttccttaggtgttaatttcatctggaccaagaattttgtcttaaaatataagtttattaagagtcttctagtctgttttctttttgtatctgttgggtttggtttttttgtttgtttgtttgttttggaatttgcccatgtcaagtttattggcatacatttcttcatatttgtttattattttttgatgtctgtagaatctggagtgatatccttttttcacttctgatattgattgattgtaccatctcttttcttgagaagtcaagggtttacttatttataggtgttttcaaagtaaaaacttttgggtttgctaatcctctctaatgtaaactttttttcctatttcattaatatctactcttcattattatcttttttctattttctttatttggattcatttattttttttctaattccttaggccaaatggctaagtcctttatttgcagccttgttttctaatatatgcatttcaaaactttgaattttcctgcattcgtatctttatctgcatttcatacattttgtgtcctattttctattctctattgcttctctgctttctgcttatttctatattaattattttctatattttattaatttgttatacagtcttataaattctttcagtggttatggattttttttaacatttttaaaaaggttttctggcttttctaattgttctcaatggaagattatttgggatgtacagatcaccagcatgtttatgttggcttctaggccaattttaaaaaatgactaaagtaaaacttctgttaccaattaaaaattttgtttttctgccctgggcctttaaaagtcaaacctgcacttgaccagtcaccatatattttccaagtaggtttaatactagtgcctaggaatagcactaatgaaggttcagacacatgcaaagtatatgctctgctctgtgtcatcgtggcacaataacagagtccacagaatggtccacatttaatattattatgtttaaagtttttggcatttgaggaagttttagaagcttcctgttcatcttacatatgtaataaataatgtaagttatgactggatattgttggtactttaacttggaaagaaaaccatcttattacctctttttcaagtttttttgaaagactgtctggacatttaattgaaaactatttggacattgcaacacaaaccttaaaaaagttgttatcatctacagttcttacatgaataaagcagtattaccaagtagccaaagtaaaatgcagacattttactgtttgctgaagctgattaagatgtattatttataactccactttcaaatattttatttattagtacagtcttactgttctcaatggctaactttataataaataaatattatatttacatagaatcacttaatgtatactaagtatatatttaaacatataaataaatcagcccatgactttatatgtttgtattataaatagtataacaaatattataaatttgaacctctaaaatttatactagtcaaattatctaggtttgtatgagatttaattggaaaaaaccctcttactaaataaaattagaagcccattaagcaaattaaaacctatatttaagaaaataggcttgcctaagttacacagattgtatgcacgcttggtttttatccagcacaagtcttactgcttatgaaaattgattttattaaagattgcttatgggctgaggctgaaggcgtgccattatcctttaccagtatataattacaacgtactctcctttgttaatctgacagttatttgcagaactgaactaccttggattcttaggtagggaagagttttaattctcgtgcctcagattttccattgctgcttttacgtgggtgtgtgagattcagaaatacgagagtgaagtaaaataaacgatgctttataaatacatggaattaggtgcctacaggggaagctatacagcagctagccagcattttaattccatgtttctcagcttattttatttgaggtgttagagttgtacttttttgttttccaatgtttatagactgagcttgattttcatatctagttgaattctcactaattttgtggctaatcaagctcccacaatgtcatttacttgaagttaagtattgatatttatgatttgaatatatttaacaactttatagttaataactttaaattctcttctggtgaaggtattcagtttggccagtgtcttctcagtcagtgctctaatttaatatagtgtttagtgctaaatctaatattgtttctaacacattataaaggtcagaacttacataaatatactgtagtttgtgatagttttggagaatgggctacagtggcatttattagtgaagtaaaaattcagtccataagaaaatatgaagtgatactttatttagtccatatatttttaatggacagtggtctccactttctaagtggggatttttcatttttctaagtattcttaagagaatcagttttggacttttggttaaacatagaggttagaataaatatgtttatttcttcctaaattcactaaattaacagaataaacaataaaggaataaacaaagagaatgaaagaggcaatataacatcaggctagagaagtgaaattttagaaatgttagaaaagaaatgcataaattataaccaacttagagcagttttgatggaacataatatttgatcattatattgagttacaatttatttaattattccttaatatcgagtcatatatataatttttttagtgtctgataatgggttatcataattaagcattcatctatccatgaccatttagttttttcagcttttcactgttataattagcattccatgcatcagtcttaaaatattttaggtttttttcagaattgaatgactgaatcaaagtttataccttttatgagtattgatccatgctgccagattgctttgcaaagccatttttatgattaccatcaatgtgtggaatttcccatttcactacaacctagccaacattgcatttgccttaggatgttcaatctgggcagggacacatagcccttgcatcagttgcttgtctgtggtgctgtgggaaagtgtggcatgacatgacaaattttaccaggtgaagcttagctgtgtgcctttaccactgccaccttataataaagacagatgctgtgagtttagaggaagaggtgatttcctttgtttacctggggtgctcaaggaaggcttcatgtaacaaatagaatttgagctgtgtataatgagggaaagatttataaagaaaaatttgcacagacacatgagagatatatcagtctggatcaaatcagaagacagaagccacatagtaactaaaattgttagtttaacttaaagaattattagggtatgataagagaaaaactatgaagtcactctataaggagaactccaaaagttaccctagggctgaggaaaagtacccaatgaaggacggaattgaaatgaggttcagacctcattgaaagtgtggctatagcccattggatggtagagaaatttgctgcgttgtctgagccaacgctggtgcacaatcacagtgtgagcaggtgagttaagactggtaggagagcatgcagagggaatcagggcagtgcggcagggccacagtaacaacccttggggtgcaagtgagttgaggttggctagttagtagaaggagttggagcaccactttagataccactggaattgcaagttggagaggcctccctgtgtagcaatctagagcactgctgtttacagcttggggcaggacagtataccaagctgctgtgtggaacaaaggtcaggtggctggctggccaagccggtgcatatggtttgaggagaggggctggggagtagccacctggtctggggctcctggctatagtgctgctgctgcctgagtagagagctggagaaagaaagcacacagccgctagccagatgctggagaaagctttcccctgcaggcacctagtactacagcagtgttgtttttcagccttggcattattgaccttcagggctggataattatttgttgtggggagctgtcctgtgtattgtaggatatttggcagtatccttggcctctattcactgtatctcagtagttccccaagttatgacaatggaaaataatctccaaatattgccatatgtcctctgagggcaaattgtctctagttgtgaaccactgcaatagagaaatctcacagcagtggaacagtggaggggtaaaatataagctctccagaaacctgctgagaaaactccttccctccctttccagtgcactgtattgacagagcttagcatcatgtcatactggcaaatgaaaaatattttaaaggcccagatccacttttccagataagacaatgaagaatgaatttggagtagagaggtaataaactgatagctgtacaaagtacagttatgggattaaatatggttggagaattaaatatgagcaaagttatagaagcagaaaagcgtaggggcactagggaaattcaaggacaagaagactaaagtgcaaggctgatgtaaagtggtaagaggagaataagctagaagggccctttgaatcttaactctggagtgctttgagtgagtggaagagaggggaagagaaagacagaaagaccaatgaaggtttgagatttggtgctgtcagtagatgaggaaggcagaggcagaggtggaggagtgatagaaataattgggacctacatttttgcacataactaattactcaggaaatggttcatgatagtatatcctgggttttttcccacctatccatttcataatttaatgtagtgctttaatacataaaatatgcttattggggctggatgtgatggctcatgcctgtaatcccagcactttgggaggccgaggtgggtggattatctgagatcaggggttcaagaccggcctggccaacatggcaaaaccccatctctactaaaaatacaaaaattagccaggcgtggtggtacgtgcctgtagtcccagctactcaggaggctgaggcaggagaattgcttgaacctgggaggcagagtttgcagtgagccaagatcatgccactgaactccagcctgggcaacgtatatatgtatatatatatacatgtatattgtgtgtgtatatagatagatagatatagtatgtgtggatatgtatgtatatgtatatatacatatatatacacacatattcatacatacacacacacacacacacatacacacacacacacacacacacacacatagaatttgggagaagagaagagtaatatgaggaaataagagaccatagggagttcattgtccctcttactcttctatggagtgaatgcaagggcaagccagaacctctgcactttctcaccaggtgaaggtaggggaacctgtctcatggtaatgcacagagctaaaagagaattctagcagagggaatttgtggaagttacggttttgactcaaacccctctatagtctttcatttttccaaggatatgtctcctcctttctaagtactttcgtggcttgttttacgtgtcttgcaatcgtataatccagcatcactgaatagtcttatagtttcccagatgtccttgtggcatttccttctaggtatattgaaacttgcccttttttattcttgaattttgtctttggctcaaggttttacattttactgactcttcatactacttttctccccttatttagaaatggactcagaactcaaggaagaaattcctgtgcatgaggaattcattttgtgtggtggagccgaaacccaggttctaaaatgtgggccctggacagacctctttcatgatcaaagtgtcaaaaggcctaagctgcttattttcattattcctggtgagcgtaaaagtctgggtgaggagactttttgtagatactcataactatgtctgattttaaagtatagagaatttggtaaatatggaaaaccttggagaaggaattaaaatcgcttgacccattgttaacaaccacccttaatattttgacgtctggattttgtgtttttcttctatgtatttacattatgttgtctgttgtgtgtgtgtgtgtgtgtgtttgtgtcacagttggaagtatgtactatatatgcagttttgtaatgtggtttttaaagcatttcttaatatttaaaacttcatcaatatttttgccagttttctaaactttttctgcctcatttcaacatgattatatgtttattatagaatatttggccaggtgcaatggctcacgcctataatcccagcactttgggaggctgaggtgggtggatcacaaggtcaggagatcaagaccatcctggctaacatggtgaaaccccatctctactaaaaaacaaaaaattagctgggcgtggtggcacatgcctatagtcccagctactcgggaggctgaggcaggagaattgattgaacctgggaggcagaggttgcattgcccccagatcacaccaccgtactccagcctggggggcagagcgagactccgtctcaaaaaaatatttaaaaaaataaaaaataaaaaaataaaaattaaaaattagaatattctgatatttggcagctgagtcacttgtaacttttgctagatcattgtcaatagaattagggacagatgcttgagcgattgcaggtattcaaaatgcattttaaattgtgagtttgaacatacatgtttattcttattctgtgaattgccagttcgaaacccttgcccatttttcaattgtgttttcaatgttttccttattgattttcagttgattcttacacaactgtaaaattgtgttatatctgtcatacgtgacaagaatctttcctggtttgtcttttgacatcatttacaatgtttatttggttgtatagaaagtatctttgttatgtggccaaaatgctaagtctcttcctttaagacttcagggttttatgagtttcttagagagggctttcctactccaagattataaaacaattctgccatgtcttctagtatttttacaatttcatttgtgatctttaagttgatgcatctagattttaagggcaggcactgaggaagggatctacttttcttctccctctcctttggatggcttattacatggtccacaaccatttattgtatcatctgcctttctcctactgccttgcaatgctaactgtattgtaaagtagattatcctgtggccaggagtttctttccatgtttttcgcctcttcatgtgttcttcatgttttttaataaatgcagttttatgatacttttacatattttttggaacttgttcatttttattcttttccagaatattctttagcttcttttcttttggctgcagaatatattttttggcttcattaggaggaaaaaaaaagcttaaatgatctttaaagtcaactttcctaaaattgatctcgtaaaggcagagtataatgatagatactaaaggctgggaagggtgcagggctgggaggagggatgaagagagaggtaaacaggtacaaacatgcaagttagatgaaaggtgtaagttctattgttggaacttatttataccaacagaattggcatagtcggcagagtagactgactatagttaacagtagtgtattgtattggtataaagtagctagaagagaggccttggatttttctcaacacatagaaatgatgaatactcaaagtgaatgtactaaaacaccctgacatgatcattacacgttctatacaggtaacgaaatatcacatgtaccccatgaatatataacataaatatcaatatctttaaaaaaaataaataataaccaaaaaatcagcttttctagttccaacagatgttctcagaggcaaccacttttaacactggtatattcctgtgatatttattccacattcttttttgtttgtttgtttgtttagacagagtctcactctcttgcccagactggagtgcagtggtatgatctcagctcactgcaaccctccacctcctgggttcaagagattctcctgtatcagcctcatcagtagctgggattacaggtgtctgccaccatgcctggctaatttttgtagtcttagtagagacagggcttcaccatgttggccaggcgtgtgtcgaactcctggcctcaagtgatctgcccaccccagcctcccaaagtgctgggattataggcatgagccaccatgcctggcctttactcgtttctaaatgaaatacttatatttcttcttcttcagttgtcttttgttttgttttgagatggagtctctctctgttgcttaggttggagtgcagtggtgtgatctcggctcactgcaacctccgcctcccgggttcaagcaattctcctgagtttttaatattagatgttatctattgtcttcctccatgaaagaaaaagattagctttcttatactttcccttctccatgcacaatcatatacccctccttctccatctattttcctagtatgggaatatttcagttttttgttaggtcaatattcagtgcttttattattatgactatgtattatattatattatgtatattatattatattatattaattatattatacatagctaagcctatagggaattgcgcatgcatttcctttcttatatatttttgtttgttttccctgggttaatgatgttctgttatctttttgcttagttttttgtgctttaatcactcatttatcctagaactattctctagaagtgaaaagaatcctttcaatgcatttgagtcatcagtcagttttcagaatgctctgtcctttggctccagtctggactcattgctccccaggcctgctgcacagttgccatcctggggacttctgtcactttcttctggcttggatccctcgtttctcagatcccacatttttatcttagtttattctcttgtttttggtagagcatatcttctagtagcttccttagaagaggtacatgagaagtaacacagcatgctgcaaaatgtcttagactctaggttggaaataatttttctttaggaggaaaatggagggcgttaatggagggcattaatcattgttttccaacactcagagctgcttataagaagtattggtatcatttctgattttcgccttttgtatgtgaagattctctacccacattttcgagaccttttctttgttctgagattctgaaattttacagtgaagcaccttggtgtgactgttttttcatacaaggtacttgggttttggtgggcccttttaagccagaaactcatttcattctaatagcgctttgtttttcttttcttttttgtagtctcatgtttaatggatgcaatatcattttcttttcttttcttttttgtttttgcatttgcaagaattttcactgtgttccttttttcatttgcattagtctttagttttcctcaaatgtctggcaatccttgactatccattcatgtttaagaggaagacaaaaaacaaattggaagctttgcactcagagctggggcttatccagaggtgtgtctagggtgattagccatcctagcttgcctaggactgagaggttttctaggacataagactttcagtactaaaaccatgacagtctcgggcaaaacagaggagttggtcgccctaggtgggcctcatcctaaggtgattgagtagggacccagcatttcattgacggatttccagctttcagtgtctgaagctctttcttttattgttcagttttcctggggaggaatcttccaggctcctgtttgaagagtggaaacctgtctgttaatgttcaaagaggaacaggggaaaggaggtggtagtttcagtgtttggttatgcctagtccagcctcttctcagtatggtactttcattctcagctggactaagattcctgatcgagaatttctctttgttttaaccactaatgggaataaactattcttctgccaggatgtaacagtctttgtggaagtcagtccgttcagcatctattaacataaaaatacatgtacttttccagtagtgaaggagagtttgaaattatagtcatggcaagtgctgtttgatggagcagagatttggaatagcttatagcataggatagagaaaataagtagaaacattatcttaaactcgagaagggatatccttctaaggctagaaagaaggaggtgaaattggttactaaaatggaaaagtataaaggcgtatcagagggaagtgaagtctcctgcttcctgactactgttttttctgttgagagttgagaccatgttttgaatgctaatcatttccagctcatgaaaagatactaggcctgtggttcttaaagttggtgtcaggatcagaagtattgcttgagaactttaaaaatgcagttcctgggctctatccctgaccttctgaaccagaaagtctgggggttgggcaatcagtgttttaacaagccctgcagggaactgtgatacgcatatctgatccagggtgtagtcatgggaatgaattgcttaagtttaatgtaggtgaagttctttggatttcatcataataatgaattatgggacaaagtttttggctcagtcagtccaactggattttgaaatgtcctgacatgacatgacaagtgaaactgtcatttaagggtcaaggctttcagagaaagtgtgagtgactaaaaagttgatagatggaaatagatggcttgagtcttaaagaagaagaggttgttgtaatagtgaggtgaaatagtaagtgggacagacaacccacccacttccccacctggagatagtatttattccctcactcttttatcccaggtgctaggaatactgtgttgcattaagtctttgctctcattgagttatatgtggtgttagagaagagtgactgaggcctctgctgaagaggattgaaaggaagagagcccattacaggggagagccagatttcagatatggtgaggagataaagggagtattcagtgaagacactgagaatggagggaagcataaaacatttgtagtttgatagtctcattgtttatagtgctttgacattttcagatcatatttcatttcctagtgttcttttatgtttgccctgctcattagtttgtgggatttagaattgtattttgtgtgtgtgtgtgtgtgtgtgtgtgtgtgtgtgtgtgtggcaggtttcgggggagctaatctatttacactgtggtaataatcaggataacagtatttcaaggattgtgaagccactatggacaccatgttatgtccgtctctgatagactgacataacatttcattttaaatcacattgcttttgcagctagcaaaattaattcttcacttctaagttagtaatgataattgtgagttttcttttcttttttgtagtctgatgtttaatggatgcaatatcattttcttttcttttcttttttttgcatttgtaagaatttttactgtgttccttttttgatcagaatccacagattgaagaacttttaatttagtttcattttttctgatgaaccttagatcttggatttctgtaaagtaacattgtccttggactttctttaactagtgagatgaacaaagggaatcagattgagaactcaccatagagtacactgaatcataattcttaggaggtcatatggagataacagaaccatgtgaagtatcaagtgctgtgagcacagtggttggagatatagcagataaggctccatgaatgagtccaataggtctgtctacatggcaacctattatatagatactgtgccatattaacttgatatgtggcagttttcgttcctctccctacaaaattaactggaaggtataagtctatacttgcagcattgtatagttggagattattagcagtcagggcctagagatgatcactacaacttctgttatacattgcatgggtatttgactgatttgactgttatgagcatgttcaagtgtgtgtttataacacatttttatgtaaacttttgattaaatattttacttgcatgtctgcattggaatgttttccaacatccttacacctggacctctcccatacccctccgtgtgtgtgtcttttttagttgcataagtgtaggccttttaattttctttgtggtttcttaacaaggaggtttaaatggtgaagtatgaagtactgtatgcaatggtatttaagcattttgcattgcattttccacttctgtctctgttataagttagacctttgtgatacttgctatgcgttcagtttgaaaggatttattgtatgtgagtgccatgtacccaatctagtgctgcttggtgccactggatacagagaactatagcaagtgatggctacttttaaagaagttaaactttcaagtttggtacgttatacatgctacaatgttaagtatatttctgacaggataaaacttccatttttttctgcatctgttgaggatcgtatggtttttcttttacggttggttaatgtggtggatgatgttaatttttgaatgttaaaccaatccagcattcctgtgataaatcccacttggtcatgatgtattatgcttttaacattttgatggactcagtttgctaaaattttgtttagaatttttccatctttgttcacgaggtatagtggtctgtagttttttctttttctttttgcaatgtctttatgtggttttggtatgagggtgatgctggcctcatagaatgagttagaatatatttctttcttgatatggtttggctgtgtccccacccaaatctcttcttgaattgtaactcccacaatttccacgtgttgtgggaggggctcagtgggaggtaattgaatcacgggagcaggtctttctcatgctgttcttgtgatagtgaataagtcttatgaaatctgatggttttataaagaggagttcccctgcacacactccctttctttttgcctgctgccatccatgtaagatgtgacttgctactccttgccttccaccatgattgtgaagtgtcctcagccatgtggaactgtgagtccatgaaacctcttctttgtgtgtgagttgcccagtttcgggtatgtctttatcagcagcatgaaaacagactaatacatttctcttctattttctgaaagagtttttatacactgggcatttttcttccttaaatgtttgatagaattcaccagtgaagctgtgtgggcctggattttctttgtgggaagatttttaacttaaattctaattaatccaatcaatttagggctatttaggttatctgtttcttcttgagtgaactttgatagtttctgtctttctaaaagtttattttatctaagttgctaaatgtattgctatgaaaattttcatatttttcctaattactcttttaagatagaagactttttttaaatttaaatctgattatgccttaaccctgctcaatctcttttaatgttacttagattaaaagccaaattacttatcatggcccaaaaggtatcacatgattgtatttctcttcctcttcaacctgatctcatacaagatttgatatctcttgttatgctttagccacactgatagattagatgcaaagggaagaaccaaggattatggactgtcttccatttcttcaagagctaagatctttatttcttgagggcctttgaattagctcttcaagagctaagatctttatttcttgagggccttctccctccttagtatttattctcttccctcaaattttcacaaggcttatttcttgtcattttggggtcttagctaaatgtcacctcctcagacctttttttcactctattctcttcccttctctatcatgtgaccctgtttattccttttataggagttctcacactctttatctcacctatttagttatgtgttgtatattctcccactagtacataaattccaaaaaggccctcatctgtcttttgcctgacatagtgactttcatacagtaagtgctcaataaataattgagggctaaaagaagctgtaattctgaatagaattaatgaacataagtaattggcatcatcatttacttgatgatgataaaattgtggatcagaaagcttaagaactcagacttaatcccagagatagggagaaaactttgttttatttatttatttattcttcctcatttaaaaaaatatgttaagttctgggatacatgtgcagaatgtgcacgtttgttacataggtatacatgtgccatggtggtttgctgcacctgtcaacccatcatctaggttttaatgcctgcatgcattaagtatccattatctagtactcactgtttttcatatatcgtgtcattgtaacttacatctaaatcatggggttatctttagtgtctccttaatgttacaccagtttttaattgttataatagctgtggtattaatagctgccatttattcagcccctaccatgtgccaagttttgtgcaagtggctatccattcgttatttctaatgaaaatgccaactactttatagagatattgtaagactaactaaaacaaggaaggcagaagatcctacaccggattactgatgttttttaaaaattcagtattatgattttcttttgtatatactttcagtcatcaaatatttatttagcacttaccatatatgtgatgttggctaagttatttaacctctctgtactcagtttcctcatccataaaatggaagtaatgatagtgctacctcatatgataattaaataatatatgtaaagcacctaaacactgcctggcatgtagtaagttatagtacctaaaaatattagctattattattttctagccatatgaagaaatctatgagcaacgtaagacatgtgaatatgaggtataacatattcctagaaggttatactcagtaatataaaaatataaaatttttgtaaagtaatatattaatgagatgaaattttagtcacaatcccaaagagatttttaagaattgaaactagtgaaaataaccctaaagtttatgagaacagcctagaaaatttagaaaaagaaaaagggaagggatttgccctacctgttaacacttaaaaaaaaatgtagtaattaagacagtatggtcctggcagaggagaaaaggaaaaataaactgaattatttggtatcagaattagcaagtgaatgtaaaaatgtagtattgggtctgaagatatttcaaatcaatgcagaaagaatggattatataataaatggtcttggaacaattggccagtcacttggaaaaaagttggattgctacttagtattttatactaaaaagtattctaaacttactgaagacttaaatgcataaaacatgaaacagtgccacccacagcttccatagatgttatagcccctgtgctggtatgcccttcctcccttctttcttccttagctatacagtggccaataaactgaccaaagaatatatttctgcatttgaggaagttttcatcctatttgacaaagaagccaaaagcaccatcacaaaaaggaatttggaacttgggtcactaggtcagaatgcaacagaagcaaaataatatggatgctacggccgttgtatattaccgttatagctagacgttgttgtacaagtttgaatacctaacatttatataatacttgctgtgtttcaggcagtgttacaatgctttgtacattgattcacttagtcttcaaatgaggtagtaccattattacacattttgtggatgaggaaaccaaggcagagggaggttaaatagcttggccaaagctcacacagttggtaagtggcaaagccaagattccaacccaggtagtctggcttcagagtctatgctcttaaccactttactacactgcttatctagcaaactgaaagatataaaaatggagtagaaatcagtgaaattcgacaaggatgacagtggttatttacatcagtgctccagagccatgtcatgtaattgcagagaccagaaagcctaacaacatgaagaaatagataaactgatcagagaaatagatattgatggaaatggactagtagctgtgaagactttatatagatgatgattacaagatgaaaatcccatttcgttgtaatttcccccctacagatctatcagattgaatgtttttaaaaagatcgtttatttattgtttctttatagcaaactcatgtcaaaaataccttctgtacacacataagaaaaatctacatgtacttgtagacgtttgtttccccaaaagatcaagctgtacacctgtttacaattataagtgctagtgataagtgacaaggaaacagtagactccttaaagctctccctgtgcatgcttcttacactattttggctggcttgtttttctggttttcatgcatcttgttaactgagcatgaccaaatcttgaagtgccttatatgcagtattactgattttagacttcttccagatgactttatctggaagacactgaagggtgtttaaatagggtactgctgtgattttaatggaagtttgaagataatctctcttgggtactctgaagaattcagaggaaagtgtgaaaagaaacagacccatcttttctagcctgcgtgtcatcttatgcctgtttattactttgattaatctaaggtctgtgtttcttttcttaggtaacccaggtttttctgccttttatgtgccatttgcaaaggctttatactctttgacaaacagacgctttccagtttggactatcagtcatgctgggcatgcgttggctcccaaagacaagaagattcttacaacatcagagggtatgtccttgttaatatctactttcctttagagtgagtgcagggtcatgtttctagcaagcttgctaaggttaagagttacaccagtggaaacctctgcttgtggcattaggcccatggtgccatattttggtaaacttaggatttttagagacattttaactcttcatgtaattttctgtaagaatatgggtagataaaacaatctatgacttgccttctttatttaccaattagtaatcaactgtgtgttttttgatcatgtattatttttccagggttgttctaggaggaatggtggggaaaaagcagtccccaaccattttggcctctgggaaccagttttgtggaagacaatttttccacagactggggaggggtggatggtttcgggatgaaactgttccacctcagattaacaggtgtgcaacctagatctggcatgcacagttcacagtagggtactcctatgagaatccattgctgccgctgatctgacaggaggcagagctcaggcggtaatgctcactcgcccgtcgcacaccttcatctgtgtggccgggttcctgacaggccacagacaggggttgggaaccccttttataaaccatgttctttactttaaagaagctttttctctcatatttagagaataattaagtgataaaccgtggcctgctaatcatatagacacctaaggggtaaacaaaggagaaaacacagtgtgggttaggagagactttgtggagtaggcatgtgtcttagtcagtttgggctgctatagcaaaataccatagactaagtagcttttaaaaatggaaattgatttctcatagtttcttgagactggacgtccagtccagtctgcactggcagattcgatgtctgatgaaaacctacttcccgattcacaggtggcattcttgctgtcctctcgtggtggacacaggaggcaagccctcttgggactctcgcgggctctaccctcatgaccccatctgatcctaattacttcccaaagacccctctccacctcttaatagcatttgggcatagggtttcacctatggatttgggggccatataagcattcagaccattacagctggttttcacaattgaataaaatttggatttagggcatggaggtgggtgcagaggtacaacagacagaaagagtagcacagaagggagcaagatttaatagcgatgttactgctaagcagggccagtttgagagggactttgagagctggagagagagccaggactccatgctggaaggtttctaaatggaagaagtaataccatggagatgcaaactacctcctttaaatctgtgagaattctagcatgttcactgttccaaaaaataaaaaatgagagaaaaaataacttaaatataagtttataaaacataaacataactttataaaagtacagcatatccaagagttgaaggacactttcaaaaggtgtaacaattggaatgctctataggcattccattcaagggcgttttgtcctagggggtttcctttagttaatttgaggtgagatcgaggtggctgtgacttcattgcccagtttgcttctggttcttgtacgtctctctagtggtatgagcatctttttgtgcttattgagcttctcagttttaaagatattttacaataaagttacattttacatctatagtcttcgttattatatatgcatgattcttttagacattgatgtacaaggttgaacatacaaaagcctgtactctttgaaggctagttttgattatatttatttttaattgtaatctctgacctcagcctctgatcctcatatcagatacaattttttgtttctattttaaaatttgaatgtggtggcaataaatatggctgcatatgtgaactcctctgaatactttctgaaaaacattagtttactaatctgttattaatttgtgtaaatgttgcacgtcagataaacagtatcaatttatctagttttatctaattgttaaccttgtattttgcaactgaccctttagctgcagggagtatgttgtataattttctatttattttcaaaatggattaccttcctttattgtatttttagattaaaaagttatatgtgcttattaaacaatttagtatggaaaactgaataagaaaataaaaaatcggtgtcctgtaagttaaaggttgaaaagaaatactaaaacttcataatggtttaattatgcttaaacattttcagcctaaagcctaacaaacgttagcaccttggcactaagagatgagatttttcaatgaataatactttgtgtaatagctcagatattttctaggctgaagtaagcatctaggaatagcagcacaagggaccatatttttagtgctttttcccctatgtcaatatcgtgatgaagtgtgtatcttaaatgttagtgaaatagttacatttagattttcagggtattttttttcaacatttatttgcttattacctgttcaaaacttgtatttggcatatgttatacattaagaaaatatttagcatagaatttttttaaaaataaatagtggacttccagtttcagctctgacatgtagaacttggagtttgtcacttctctcctcgcaataagaaaaaagctgaggctaagtgtggtatctcatgcctgtaatcccagcactttgggaggccaaggcaggcagatcatgtgaggccaggaagttgagaccagcttggccaacatggcaaaactgcatctctactaaaagtacaaaaattagccaggcgtggtggtgcttgcctgtaatcccagctactcgggagactaagacatgagaattgcttgaaccttggaggcagaggttgcagtgagccaagattgtgccactgcactccagcctaggtgacagaatgagactgtgtctcaaaaaagaaagaaaaaaagaaaagaaaaaagctgaacaaaactaaaaatcatttttcttagacctttcagagaattgaggtcacaggacaaattgtcacctaaaatctagagagacaaggaaatacaatgaagattgtagaagacactagtgccgtttatgtagaatacactacataagtgtagaatacataaatggtgattttgatgaattgctgggggtaaagtacagactattttaaaagtaacaaacttctgcaagcctattcttgggggacttcttcactttcataggtattacttctaggaaccttatcaggtacttttgtgaaaatttgagaaatgtcctctatggttttttgttaggagtggaagagaagtaagcattttgcagtatgtccagaatattctcaataacatggcttactttccaagggaaaaagagttccagagctttatccaacctggggggaagggcagttagccaactccgtcttcccctagccttcatgtctcacatgctggaggagaaaaaaagatgacaaaaacttttgaagatcacagcacaggcattcaggcccactgaaagactgaggtttaatcattacattataggatgtttccctcctcattttaccaccatgtctacaggcctctaccttaataatagttcattataactataggagctacaagacacaaactctatttaagaaggagttcttagggaaaaccaaaggcaatggaggaaaaaaaaacaagaacattagaggaaactgaagtttctgatacctatagctacagaaaacattaagcatagccctggccaggcgtggtggctcatgcctgtaatcccagcactttgggaggctgaggcgagcagattgcttgaggttaggagtgcttgaccagcctggccaacgtgatgaaaccccatctctactaaaaatacaaaaattagccgggcatggtggtgcaagcctgtactcccagctactcgggaggttgaggcaggagaattgcttgaacccgggaggcagaggttgcagtgagccgagatagtgccactgcactccagcctgggcgacagagtgagaccctatcttaaaatacaaacaaacaaaaaaagcatagcccagcttctagtggcattaacatatagcctcacataaaaggtctatttacctcattcctattacttaatacatcatgtccagctttaagcaaaaagtaaaattagaaggcattgtaaaaggtaagaaaaaacagtctgaagagacaaagcaagcatcagaaccagagtcagatatatacttattaccaattttagaaatatcagatcgggaatttaaagtaaccatgattactacgttgagaactctaatggaagaagcagcatgcaagaacagatgggtaatgcaagcagacagtagggaactcttaagaaagaatcaaaaggaaatattagaaaacaccgtaacaaaaatgaaaaatgcctttgatggactcaccagcaggctggatgaagctgaggaaaaaatcagtgggctggaaaaataggttaatagaaattttcctaactgaaatgcaaagagaaaaaaataatttataaaagtacagcacatccaagagttgtgggacaatttcaaaaggtgtaacatatgcataattggaataccagatcaagaagaaagagaaaatggagaagataagagttgaagtacttaatgccagatgacaaaacacaggtctaggaatctcagagcacactaagcaggatcaatactaaggctctacacctacatatgtcattcttaagttgcagaaagccaaagacaaaatcttgaaaataggcagaggaaaaagtgccttacctgtagaagaacgaagatgagaattacagggaacttcttgtcagaaatcattcaacaaagaggagaatggagtgaaatatttagtgtcgaatgaaaaataacacttacctggatttctctatctagtgaaatcatccttcaaaagtaaaggagaaagaaagactttttcagaccaacagcagctgaggaaattagttgctggaaacatcctatgcaagaaatattaaaagaagttctttaggggaagggaaagcgatagagattagaaactcaaatctgtataaagaagagcatcggagaaggaataaaggtttaaaaagtttatttttcttgttccaaattgatctggtagatagctgtttattcaaagtaataaaagtaacagtatgttgggtaattacaacatggataaatgaaatgaatgtcaatcatgttataaaggatggaagagaggaattgggaatactcagttgtaacatacctggactaacggtgaaatggtatagtgttacttcagatgaacttgtgtttttttgttttttttgttttttttgagacagggtctcactctctcgcccaggctggagtacattggtacaatcttggcccactgcagcctcaacctgccaggatcaggtgatcctcccacctcagcctcccaagtagctgggactacagacgtgtgccactacacctggctaatttttggatttttagtagatgcagggtttcaccatattgcccaggctggtcttggaactccttgggctcaagcgatctgcccgcctcagcttcccaaagtgctgggattacaggcatgagccactgtgcccagccaaaaaaaaatttttttaataagtataattattatgagaagaagagagaatgttagatcatttaaaatgctcaattaaagctaggaatagagagtaggattttaaaaagaaagaacaagtataacaaagaagaaacatttataaatatgatagctattaattcaactatatcagtaatcactttatttatttatttagagatacagtctcactctgtcacccaggctggagtgcagtggtgccaacgagactaactgtagcctgaaactcccaggcttaagtgatcattcccacctcagcctcctgagtagctgagaccacaagtgtgtgccagcatgcctggctaatttttatattttttatagggacaggattttgccatgttgcctgggctagtcttgaactcctgggctcaagtgatctacctgccctggcctcctaaagtgctgggattacaggcatgagccaccatgcccagcctcagtaatcactttaaatgtgaatggtctaaatataccaattaaaatacacagattgttggagtggtagggggagatccaactatatgttgtctacaagaaaccactttaggaccaggcacagttatacacgcccgtaattccagcactttgggaggacgaggtcaacagattgcttgagcctaggagtttgagaccagcctgggcaacatggtgaaactccaactctacagaaaaatacaaaaattagtcaggcgtgctggcacgcacctgtggttcagcctactcaggaggctgaggtgggcagatcacttgaactcgggaggttgaggctgcagtgagccgagatcatgccactgcactctagtctgggcgacagagtgagatcttgtctttaaaacaaacaaataaacattttaaaacaaacaaacaaaaactttaagtataaagacacagatatgttgcaagtaaagggatatacagagatataccatggtagcactagtcaaaagaaagctggagtagctattttaattttagacaaagcaggcttcagaaaaagaaaatgtcagggataaagaggagcattacataatgataatagaaccagttcttcaaggaaacataacaatccttaacaaatatgtacctaacaacaaaggtcagaatgcaggaggcaaaactgatagactgcactattataagtggaaacatcagcaatcctttttctgtaatgaatagatccagcaaacagaaaggcagtaaagatatagttgaactgaattgcaccttcagtcaactttatttaattgacatttatagactacttcatctaacaacatagtcttctcaagcacacatggagcattcaccaagatagactacattccgggccataaaacataccttaagaaacttaaaattgagtataaattatacaaggtatgctcttagaccacagtggaattaaactagaaatcaacaacagaaacatagctaggaaatcccaatatatttagaagttaaacaacacacttttaaataacacatgggtcagtgaagtctgaagagtaacataaaaatactttgagcaaaataaaagtggaaatacaacttataaaaattggtaggatatagcaaaactagtgcttagaaggaaatttatagcattgactgcatgtattagagaagaaggaagatataaagttaattacctaagtttctgccttaggacaccagagaaagaacaatttaagcctaaagcaaagagaagaaaagatgataaaaatgggaacacaaatcaatgaagttgaaaacaagaaattattagaaaaaaaatcaacaaaccaaaagctagttatttaaaagactaataaaattaataagcctgtagccaggctaaccaaggggggagaaagagaagacgcaaattacaagtattcagaaagaaaagaagattcattgctgctgatctcttagataataaaaggacaataaacttaacttagataaaagggaccaatttattgaaagatacaagctcccaaaactcacacaaggaaaaatagatgatcagaatagactgtatctgttaaagaaattaaaccaccaaagctgaataaggacaaaacaagaaaagtataggtcaatatccttgagggacatacatgcaaaaattctcaatagaataccagcaaactgaattcaacatcacattaaaaggatatggtcatgatcaagtgagctatcttaagtcatactatagacagaagcgaacatttgaagagaacatgaatggcaactttgaaagttgaaaacagactcagaggatcacccttgatcaggtgttctcaaactttggcatgcatcaaaatcacctggagggtttattaaaacacaggtggctacctctgagttgttgatttagtagatctggggtgggacctgagaatttgcatttctaacaagttcccaggtaatattggtgctgctggtcctgggaccacattttcgggaccacattttcagaaccactgccctagatgttcacaataaacactgatacggaaaaccagtagaaaatatctgtcatgtgtctgaatttttaggaaacagctttaattcttattgtaaattgacatcttattatttataactttactttgaatatgtttatctctagttggcctgcttgtgtactattgagttaataacttagtaattagtctgggttctttgctacctaatgagaatagtgccatctagaggcattagcccaaagggccaccatagcgccaaaggaagctgtggtttctggagagggtgagagggcaactcattatcatcaaggacttattgacaacctactaggttattaactgtcatgctacaagggtatacaaagagttagaattgcttgccagtctccaccttttaggtttgtgactttctgtatctgagtagctcaaaagttctgtgaaggctaagtagggctctgggccttggaccagccccccattcagctagaacagttctgctctcatctgttgtacacattggaggttatgtttgcaaatgtatgctatagtggctttggataggcaacacagatatattatttgctgtccaagattgtcctaaggtactgattttctggcatgcaaaataatggcgtgaaaaatatgtaatcattgagaaaaagggcataagctattaccacacatcaaatgttgaaagtatgttttccttcatattagcacatgttaaaattatgaacagttggaaataatattctagtagaccacattatcacaatcataagttgaatataattggaagaacagatgttcaccaatgtcagaaggggatgattcgaggggaaaaaaagtgtgaaaagaaaatttgaggagttaggagtataaactgttttctggatttgatttgctatagagtcagcacacatgatgggaaattcattatcaactatttcaagtcattgtttagaaagtatgaaatgaaagctagaaatcatgctggttttgtattagcagataaaaacattacctaaaaaagttatacaatcttgcaactaatgatgaatttgagtcatgcttatccaaagaaacaataaactactctcactgcagtcccccaaataggaagaaagagagaaaacccagtggagctttctcttgccaggactgggagtggcagggcaacaaggaggtaagatggaatgactagatgagcccaaggcaggaacaaccaatcaatcaactctcagggctcacagtccctagaaatgaaagcacgtaaatctgtgggtcagaagagcaaaaaaccaaagtgcagagcaagagaagaagttaggaatcaagcaaattgttaagagtcccagggcagacagaagtagggagagtgagcattgcagttaacgtccataacacagaccagattgtgcgctcctctcttggcaatctataggtatcttctcattgatcacagaaccgagtccagactccttggtgtgaagttcagtttcctacttcatttatacccaactttcctttttaaccttatgcttcacctttccatataaccacacatagccacagaactcatggctttttccaagtaacagccatggaaacatggctgtttccaaaatatcactttacaataaaaagtaacacactttttatgcctttttcttttattgtttgctaagtctataacattatgttctccttgctgaatctctctgctgtttcctgctaaggactgttgaagtccttagcagataattggttttagtcaagtggaaagcataatttgatgactgtggttttcaccgtttggagaataataattaaaaattattttataaaacatatgcttggggtttacaaattttgaaatttgttttctaaataagatagcagtgttaaatagaataattatctcccatctccttcactgtaatgcatactttaagagctaacagagttgtaccagtgtttagatacagggagcttacagaatacttagggagggagctggggtttgatgagagtgtactcccacttcagcctagtaacctcaggacagttgtgaaaggaaggccttatggatcgatgaagtaggtaagcctacagaattagggaccacagttctcattgagccaattcactgatattcagtatcaacccacaacatctttgggggcttctgtattccatgtgagaaagaaatcaatggtgattttccctacaaaataggtgtaagatatctaggaacaaccgcatgtcaatgcattcttttttttaaatttattttgagaaatttttaaaaacgtagcaaaatagagttatataacaatcaaagtttctattactcacaattgacagttaacattgccatatttacataaatattttttgttaacaaaataagtgaaataaaacaatacagaaaaaggtttgttttttgtatcccatctctagttctatcatgaatttagagtaaatatttcatgtctctttttatgtttgtagttatatatatttatatatatgtatagcatggtgaacaacatattatttttttgtgtatttgaaagaaattaaggaggaaactttttattttattttttcttaaaaaaaaaggtatacatgagcagaatgtacacgtttgttacataggtatacgtgtgctatggtggtttgctgcacctattgacctgtcctgtaagttccctcccctcaccgccccacccctcaacagccctagtatgtgttgttcccctctctgtgtccatgtgttctcaatgttcacctcccacttatgggtgagaacatgcttcacaaggaaactgtattttcatcttgatcaaagaattctttaaaatatgaaatattattcttagcctttcaatttttacatgcaagttgtttagttattaagatacagctttggagtaatgactgggggcaggatggaagggtttagtagctgagcaaattctggtgtgagatgtagttactgtctgcagactcagtcctaccaaaggcatgtgtagtgctaatctccagtcttgtctgttccatggtcagagatgaccaataaatactgtttgtatgaaaataaatagttgaacttatacatttatattcagtatatagccatatatatatatatatatatgaatggcagttaaatatgtagttaaatttaaactgttttgcttggattcagatacatagttaaatgtatacatttatagtaatatacatgtaataaagaatatcttctagttatttatcttgggtagagtgggaaaaggtacagtactttttatgaatcaaagggccgttacccttctattgtgatccaataaactgtgttcttttctcacacaaatgcttgagatacttaactttggcatttaatgattgtgtttttatctatgtctgtttcctgttagtagattatgatctcctgaaaggcaaaggtagtatattttatttatgtctgtactttcaataataccaagggccaattagtcactgttttctgtcagagtagtcaattcagttcatgtaaaatgaagaaaataataatcatcagatttatctgtgttctgaggctataagggaatttaaaattgaaagcaattttaatgactgcttaataactttaataactggagcagcaaatttgaacgattagacaaaaagttaatgcgaagtactgatattatttaatttctctactaactatttcagaacaagttgtgtgtaccttttgaaataaactctagaaccgttaggtgagctgtgaagtgatatctaatagagatgggtctaagaaataggctcaggttctaagagaaaattgtcaatatgatattggggctggggttacagattaacagcatctcaaggcagaagaatttttcttagtacagaacaaaatggagtttcttatgtcttcctctttctgcatagatacaataacagtctgatctctctttctttcccccacaatttattggtaacaatatggtggattggattgtcatccaccaattcgggcagttctcaatttagaaatctcaatttagattatgttccaaatgtgcttcattgattataacttggagtacattttccttatagaaagaatggtataaatgatttccatattagcattcttctggttttgatacaattgaatgtaattttttctacattttttggagagtaagttaataatttctagcattttctcagaatatattactattaaaataataggaatgaaaatatataatcaagtatatagtcttttaacatttcattttctgctagtaaaataatatctagaattttatttactagtaaaatgaaaaaagataggctgggaatggtggtttacgcctgtaatcccagcacttcaggaggccgaggtgggtggatcacctgaggtcagaagtttgagaccagcctggccaacatggtgaaacctcatctctacaaaaattcaccaggcctggtggtgcacgcctgtaatcccagctacttgggagtcatgagaattgcttgaacccgggaggcggaggttgcagtgagctgagattgtgctactgcattccagcctgggcgacagagtgagactccatctcaaaaataaataaataaaaataaattttaaaagatagcacatttaaattttcagtcattgtacatttttagaaagtactttccccattaatcttaccactttggcaaacactagcaagtactgtgttcttgaaaatctactgaatagttcccagaggtaaagctagatctacctctgaaatattctgatttataatgtcctttaaagtttatctgaaatacaatgttttaggaccttatttatgatgtcagtgaaattttagaatatttagcccattttctttgctctaaccatgtaaatgttcttggtatatatttggaggaggacttaaataacaggaattgaaatgatgacaatcatagcttttatttatctgcttatgccagacacttaaacaacagccattggaggctagcattattatctctattttgtgtatgaggaaactgaagcctaggttaaaggatttgctcaagtcacacagttagggagatgctgagctgagatttaaacccagatgtatctcatctccagagcccgtttatctttgtactgcacctactgtcccaacagaaggaaaacttggatatttccaaatgctgcatattttgaaaaagaacttgggatgcaaatattaacattattgtggttttttatatcaaagaatgatatgatcacttctgggtagagtgattagagaagcaaggtataaactcttcaaacctaaatataatatttcatgcataaaaaggtggatttggagccattagaagtcctaccaaagtcaggttccagattctctctcttcccaattctgtttcatgctgaacttccttgttaagtggagaatggattgtaagctgacctgggaaaaagagtgagagcataacatgtttaacctgggagattaatagtactatggaaatagggaagtaagcctcattgagtcaagaaaaagcttttcaataactgtatgctggactttggggagcagtgataagcaagacctgaattgtaaagtaggagtgaattaggagtagtatagtgagataaataaacagggatgttgtggaaactgaaaagagagccactttactcctcacatcatgaatcataaaaaggtctctcagaggagataacgcttgtttcaagtttgtaggataaacaggacttagactaaaaggggagatgagcacacacacacacaaaaaaaaccatatacaaacaaaacagaagagtagtttttctgagtttggggtgcctcttgaatgagccataccgactgtaattcccatcaatgccttgcaagtcatgagagcaagaaattcagtgttcagtcactcaaattttaggaaacagttgactgtcttgtgatattttgaaatattacaccctgtcattgggttatatatatgttcatagggaaaacctattcaagttttctacactcgtagaatattagagtggccagcatcctcagagatcatctagtcagttccagttttcattcagccataacatttgctgtgtactagtcacaggacacatgaaaagatggaccttgccttcaaggaactcacagcctaagagaggaaataaacatacaaacagacaatgtgcaagtttgataaagtgctataataaaagaggtactgattaagcacagaagagagctcattaatttttcttgaggattagctaggtaaagttttaattaggtcttgaagaacctagaagagcagttcatttgtgacagggagggaggatatttcaggtcaggactgctgattatttaaaagggacagtttttaacatttctacctaagtttttcgatctggattctttaaataaataaagattatctaaaataattaagtcatgtcatggactttcttagttgtctattagtaatataaattagcctaagcagctggttctcaatgtgtggtactgggacccagtgcatcaacatctcctggaaacttggaaatgcaacttctcaggccccagcctagacctactgaaacagaaaccctggggtgtggagcccagcaatatgttttaacaagcctttaaggggattctgatgtatgctcaagtttgagaaccactggcctaagctaacagtaatacacagaattattgaaagttcatggactttgaggatttggagacctgaatttgaatctcacctctcccacttaataagtttgtgactattaatctgtcacctaatatctatgagcattgggattttcacctatcaagtgaaggttataatgtttccttcccaaaattgttgtgaaaattagttaatataatgaatgcctaatattatcactggcacactgtaggctttcgataaatggtaactgctttttatcatgattgttatctttttcttgatcttttttcagtgattacttttacttaatgaaaacgtgctcatatttttgcttttagattcaaacgctcaagaaattaaggacatttatggactaaatggacaaatagagcacaaactagctttcctgagaactcatgtgccaaaggacatgaaacttgtgctcattggccattcaata

SEQ ID NO: 15657 - DNA, 139077 bp, Homo sapiens
ggcacttccggtctcgtgccgccttcccaggaccctcagggagagcgggcagccttccaggtggacaggtgaggtacagcttgccgagctcagggtgactgcccaaaggaaggacgggtgggcaggcacgcgggatctggcgccccttcttctctatggttcctcgcagagcccctgttgccctgggccagatggcccgtagcagcaaaaataatactgttccgacagctcgcgagttcggagccacttggcctgggagtcccttgagttgcaggccgggcagtcgctcacccgagcgcggtaatgcagcatttgaacccctaagtgtagcccacctgtagggagtcttatggtgcccccgcggaggagtagaggccaaaaagttgggcagctggccgggaagaactcgctaggaggggtcaaactctgggccgggagtgttctttgcccccggcgtttagtgctcacgccgccttttattcacgctgaagaccttaaccgtaaaccctcatccttgggtcttagtttggttttgttccccacgcaagacagaatgcagattggaacactttattccttggttaattcgtatcttccctcgcaagtagttaccggacacctgctttgtgtcctgtgtaccaaacacaagagttgatagtcctggccgggcgccgtggctcacgcctgtaatcccagcactttgggaccccgaggcgggcggatcaggaggtcaggagatcgagaccatcctggctaacacggtgaaaccccatctttactaaaaatacaaaaataaatacataaataaataaattagccgggcgtggtggcgggcgcctgtagtcccagctactcgggagactgaagcaggagaatggcgtgaacccgggaggtggagcttgcagtgagccgagatggcgccactgcactctagcctgggcgacaaagtgagactcagtctcaaaaaaaaaaaaagagttgatagtccttgagttgaaagaacaaatctgtatggagaaagagatacaaccaaaagaaacccagaagatttagaagcatctccagaatgtttattctcaaaagctgttttttaattaaacttctttctgaaactatacgtaggagtgtctcttgtgtgtttccccatttttccacctgaaggttaaagacttagaaacctgctaaggcccctctttccagcatgtagcattctagggggataatcagggcaacacagtgggtgcccatctaaaattttatattttaatattttgctttttgataacttaatgccttcagactggaggattttttctttcttttttttaatttttttaaaattatactttaagttctagggtacatatgcacaacgtgcaggtttgttacatatgtatacatgtgccatgttggtgtgctgcacccattaacttgtcatttacattaggtatatctcctaatgctatccctccccactcaccccaccccacaacaggccccggtgtgtgatctcccccttcctgtgtccaagtgttctcattgttcaattcccacctatgagtgagaacatgtggtgtttggttttttgtccttgcgatagtttgctgagaatgatggtttccagcttcatccatgtccctacaaaggacatgaactcattcttttttatggctgcatagtatcccatggtgtatatgtgccacattttcttaatccagtctatcattgttggacgtttgggttggttccaagtctttgctattgtaagtagtgctgcaataaacatacatgtgcatgtgtctttatagcagcatgatttatattcctttgggtatatacccagtaatgggatggctgggtcaaatggtatttctagttctagatccctgaggaatcgccacactgacttccacaatggttgagctagtttacagtcccaccaacagtgtaaaagtgttcctgtttctccacatcttctccagcacctgttgtttcctgactttttaatgatcaccattctaactgctgtgagaagatgtctcattgtagttttgatttgcatttctctgatggccagtgatgatgagcattttttcatgtgttttttgtctgcataaatgtcttcttttgagaagtgtctgttcatatccttcacccactttttgatggggttgtttgtttttttcttgtaaatttgtttgagttctttgtagattctggatattagccctttgtcagatgagtaggttgcaaaaattttctcccattctgtaggttgcctgttcactctgatggtagtttcttttgctgtgcagaagctctttagttaaattagatcccatttgtcaattttggcttttgttgccattgcttttggtgttttagacatgaagtccttgcccatgcctatgtcctgaatggtattgcctaggttttcttctagggtttttatggttttaggtctaacatttaagtctttaatccatcttgaattaatttttgtataaggtgtaaggaagggatccagtttcagctttctacatatggctagccagttttcccagcaccatttgttaagtagggaatcctttccccatttcttgtttttgtcaggtttgtcaaagatcagatagttgtagatgtgtggtattatttctgagggctctgttctgttccattgatctatatctctgttttggtaccagtaccatgctgttttggttactgtagccttgtagtatagtttgaagtcaggtagcgtgatgcctccagctttgttctttttgcttaggactgacttggcaatgcaggctcttttttggttccatatgaactttaaagtagttttttccaattccatgaagaaagtcattggtagcttgatggggatggcattgaatctataaattaccttgggcagtatggccattttcacaatattgattcttcctatccatgagcatggaatgttcttccatttgtttgtgtcctcttttatttcattgagcagtggtttgtagttctccttgaagaggtccttcacatcccttgtaagttggattcctaggtattttgttctctttgaagcaattgtgaatgggagttcactcatgatttggctctctgtttgtctgttattggtgtataagaatgcttgtgatttttgcacattgattttgtatcttgagactttgctgaagttgcttatcagcttaaggagattttgggctgagacgatggggttttctgaatatacaatcatgtcatctgcaaacagggacaatttgacttcctcttttcctaattgaataccctttatttctttctgctgcctaattgccctggccagaacttccaacactatgttgaataggagtggtgagagagggcatccctgtcttgtgccagttttcaaagggaatgcttccagtttttgcccattcagtatgatattggctgtgggtttgtcataaatagctcttattattttgggatacgtcccatcaatatctattgagagtttttagcatgaagagctgttgaatcttgtcaaaggccttttctgcatctattgagataatcatgtggtttttgtctttggttctgtttatatgctggattacgtttattgatttgcgaggacttttttctttgttaaaatgttgctctgctttcagcattttctcccttgtagtattaccataatgtatttaagattgagcacttaattctgaagtcactttaagtatacctcaaccaaagggaaattaatatattatttctaatgagtgtatttaatataggtaagtagtttgtacacttgtgaaattcttggcattaattgatgtccagaagctgaaagctactctctggtacattaaaaaaaaattgtgtgtgtaattacaagaaagtttgatgtcacagttgcaaaggagttgtgcaaaacaaattgcctttttccagtaaagataattcagcaagttcatcttgagtgtagtgtgtggtttcgtttttaatatgtcctcagcagtagtcatagattttatcttcatcatttaagctttattttctggcccacttgcacagatttaagaaaaatctcactggggttagtgtgcagtcattcagacagcaaatacagcaaaagtaggtgaaaatgtaaaagtcattaaaagaagaattgtgaaattgctcatctcgcaaccacatcaagcaggagcaaagacaactacacagaatcttggtgtaacatacactcattaccacttggactttctcctacagtattttgcagtttgttttttggattctttagtgttatataatatttcaaagtaatatgtgactgggaaatattggaataggtatcagaagactgtagaatttattttgccatttaaatgcttatgtccttgaacaaaaaatgtaaacatctttgaccttcaatttcttgttctattaattgcctgctttttaggtctgatgagaaaggaagagaatataatttgcaaataaaaagaagcaaaaaaaaaaagcagtagttttattgcaaggggctagatggtgatcaagttaggatatagaaaacaattacttgttcttacatgttattctggagaaagatgagatggatacccatagttacagcagaagcgtaaaaagaattctgtttatgcatcatctgtttatgtgttgactttcacctgtatgttttcaagtttatatagggctatgtgctaagattcccaattttcccctttcataccacttattataccagttgcaattaaatacatatataattattaataacttttttaaaaacctttttgttttgagagaattgcatattcagaggaagttgcaaaaaactttacagggaagtccttgtgtacccttcagactgcctgcctcaatggtaacaacttggataactgtggtacgatattaaaactgggaaattgacattgatacaattcacagagtatatttccatttcaccaactttataaggactcatttgtgtgtgtacacaggtctatgtgtagcttcttataactaccgtaatcaagataaagaattattccatcaccacaaggctcccttatgctgcctccttatagtcagtctatcttgtcccagccctatccctaacccgtggcaaccactgctctatctctataattttgtcatttcaaggatattgtgtagatggactcataccgtatgtaactttttgagatccatccaaattgtgtgtatctgtcatgcatttctttatttattgctgagtagtattccatgggatggctatgctacagtttgtttaaccattcattcattgaagaacatttgggttacactattataaatagagcttctatgaacttttgtctgaagatttttgagtgaacatacatttttccccctctgggataaatgcccaagagtacaattgctaagtcatatggtaagtgtatgtttagtgaattaatacttctttagcttgttgatatggtgagttacattgattttaaaatgttgaacacaactggtataaatctcacttggttaaagtatataattatatatttccatattctatttgctaatattttgttaaggtataggtagagaggtgtgagaggttaaggtataggtatgagagatgtgttgtagttttttgcttgtttgttttgtactgcctttgtcaggctttggtagggtaatagtattctacatggtttttagtgataacccttgtttcattattgctactgtattagtaatttgtgtcattttatctttttcagtgatgatttgctggttatagtgacctttttcaaagaactcgctctttatttcatctttgtctatttttatatttttaatgtcattgatttctgctcttatatttattattttcttccttctcactttaggtttattttgcttcttgtctagtgctgtgattattagtttaaggtctttctttgtttctaacgtaagcatttattgctataatttccctcttggcattgcttttgttgcatctcacaaattttgctgtcttgtattttcatttctatccagttctatatagtttaaatttttccttagaaatttgcttgacccatgaaaatatttgggagtgtgtcatttagtttccaagtgtttggtgatttacctgttgtttttctgttgttgatttctagtttttttccacaatgatcagaaaacataagctgtataatttttaatttttaagtttcttttatgactgagggtatggtgtatcttggtggatgttccatgtatgcttgaaaagaatgtgtattctgttattattggttgcagtgttctatacatgtcagttatgtcctgttcattgatggtggtgttctgttcttctgtgtcttcttgatcgtctaatagttattttcgttgctgaagatcccaactataattatggatgtctctgtttttcctttgagctctgttggttttggcttcatgttaaatatctgttgtttggtgcatatacatttaagatgttttcttgatgaattaatccttgtatctttgtacaataattttctttgctctgaagtctacttaactgatggcagtgtagccatcactacttaaaaaaagtagttagtatggcatatcttttccatacttctgttttcaacctaccaatgtcattatgttttagtgaatttcttatagacgctatatgcttgggtcttttaaaaaagaaacttctctgccaatctctgtcttttaactagtatagttatatcatttacacttaaaagtaattgctgtgttagggcttaagccagccattttattatttgttttctgtttatttcctgtttttcatatctgttcctcttttctggtctttctgtaggttgcttgaatattttcagaattctatttgacatgtttatagtgtttttgagtatctggcttagttaaccttttttagtgtgctttgggtataacaatagatgtaacaacttatcacaagggatacttttattgccttttgccaattgaagtttagagacctttcttccatgtaggtcctttctccttttccctttttaaaatttaatatttgtattttctctatacaccttgaacaccacatcaaatgttgttataacgtttacttcaactatcaaatatgatttaagaaactcataagatgaagaatagttcattttatatttaccatgactattacccgttccagtgttcttcctttactcaaattaaaccttattgatacatcatttcctttttgtttgaggaacttttttttaggagaacctcctaaagatatgtctgttagtgacaaattagtttccgtcatctgagaatgttgttcccctttgttcctgaagggtggttttgtcctatatggaatttggccttgacagttctttttctttaacatttgaaaaatgtgccatttctttctggcttccatgatttctgatgagaaatctgatggcattcaaattattgttccccttaaaggtaatgtgccatttctctttggctgcttttgagatttttttctttgtttttaattttctaaacttgacttatgatgtatcttttatttttattttttcccacttagggtttttctcagcttcttgactctgtagatttatgtcttttgtcaaattgtgaagttttcagctattatatctttatttttttcagcgccatactttcttctcttcctctaaaactctgattggatgaatgttaggtcatttgttattgtcctacaagtccctgatgcctttcttgtttctttgtctgtttttctgtgttcagactaagtaaattctgttgatctgttttcaagttcactgatcctgttctctgtcaattccactccactattgagcccatccagcaagtttttaattttaattagtattttttctattttgtaattatttttggttcttactttttaaaacatttcatccttcaaggagagctactttcaatatacatggaatttcttggaaaaactagtaacagttttaggttatttgtatatatgaactaatgttactcaagattttaaacctctgcagagttatctctgtaattagcagatgaagcatgaacatacataatttttttctctttttgtctcaggtaattccttgttacaggccctaataaaagggaaatggggaaggaaatggagaagagaatttaggccttggcaaattgaaaattgtctgtagtatctcactgacaggtaaagtaggaattttgaaattagagaaaaggaaccaggaatgaagatgaaatgaaaaatttatatttacttcactaaaacttttaaagttgtcatatagtttcagatttaaaaagctatttcttccagcctaggcaacatggtgaaaccccttctctaccaaaaatacaaaaagttagccaggcatggtggtgtgtgcctatagtctcagctacttgtggggcggaggctggaggatcacttgagcccagaaggttgaggctgcagtgagcgaagattgtgcccctgtattccagcctgggtgacaaagtgagatcctatctcaaaaataataataaaaataaataaaaaatcaaaaagttctttctcctttccttcatttcccttgaagaatactgaagattttacatagatgacaaattaggtaaatctaagaaaaaacaaaaattaagtagaacaggtaactttcagtggccatacttgagatttaggttatattgactgctgaggtttatcagtttgattcctatccctacaatataattaaaaataaaccatggaccccccccccccattgtcagactcactgacagtataacattgtgattaaaaagctctttctcagtaagtatgaaaagttaatgcatgaaaaataatatatgttaatttagtgggggaaaagatggtttctgtattacagtggtattaacacaagtagctttccatctgaaagaaaataaagttggatccttatataatggattaaaggtttagaagtagagactaataaaaattaaaatagacatctgggaaacaatatgtaaaatatggaaacccagaaaagagttagtatctgcattatacaaagttttcttacagactgataagaaaaagataactcacttggaacctagacaaatgatatgaagagacaatttacagaaaagatagtctaaaaagctaacaaacatgaaaaaatgcttaaacacacttgtagtcagtgaaatgcaaattaaagagtaaggtattttatatccaaagactgtaagacttacaaagtgtggtatcacttagtgatgatagggttgcagagggaaagataccattctacatcgctaaaagaattacattctttttttgagaataatctggcaacatctattaaaattcaaccagtaatttcacacttggcaatctggcctataaaaacaaaagcactggtagatatgaatgtatgtgagaacataggtatttaagggtacttattgcagcattgttctgaaaaaactgggaactaattgagtgcttggcaccagggagatggtcatataacttatggtatatccacattatggaaccattaaaaatgaattacttatataaactctttgacttggcaggatatccatatgttattaagtatgaaagcaaaatgcatagaagtatatataatatgctactatttgtcaaacactggcaactcattcatgaaaaaatacataaatgcttaacatatatttgtgtataattatagaagaatatggaagactatactaagttaataacatgggtttgggagagatatggatggtaaggaggagaggtagagtggaggcatgatgcaaaaggttaaaaaattgtttagaaaaatcacagcatgcattatatctcatttatccatataagtgaaattatatatatgcatataagtagaattttaaaaataaagaacatgagctctggaatctttcagacatttctggattcaaattctgactctgccactttacaacttactagctgtgtgacttaggcaaattgcgtaatgtctttgaatcaattttctcacatattttcttggggtgggaggatgaaataatagtacccatctatagggttgtcatcaggattaaatttagatagcatctgttaagtgcttagcacagtacctggcttacagaaagcactctcagttattagttcttactgttgccttggttcttacgctcttggacatttgttaatatctatttttaaaactttatcaccatcctgccactttcttgaaacactcctcactggcttacattactttacatgtcttagttaatgcctgtttctaattgttcctttttattttgctgatatcttttttccttacctatggatattgctcccaaaatatagcaggggttgccaaagaagcttttgaattagggtgactgggagaatattagtccatatatggcagcagagaagtcatgatgtagggtttatagggttgatttttaaaacaagatgattttgatacttgctctgcagaagttttatgcatcaatgaggcacccagatgaaaatgctcaatagctggaaaaacttgacaggaacttgagaagtagatataaaggattctctcacttggctaattctcgaagtggatgtaatctccaggggagagcatatagagaagggaatccagggcagaaactttggggacagggaataggagaggaaaaggttcccattgaggactgggaggtggcatagaagccaaaatagagaatttctttaagaagctgctggagaaactgtatgtctactttgttctctcttgagctttagttctgtggctcacattgtcttctggccttgttccttattttcttgaaacttaaactacatttgtaactaatcccagcttcctttcctcccactaaattcccttcttttacatttccccctatatgtatgtgaggagtgctttcattcccctcatctttggcatcaaaatctgtcatctctgcccctttcccttccctggttctccatatcattaccaagactctcattcactcctttttcattcccactcttgcctacatttgattgattattatcaaaataatctaaacaggatattttgaaataatctaaacaagattattttgatagctgccaaactctagtgtaatcttgtgttttttctgtctttcatagtcctcttaaaagaactagtttaggccaggtgaggtggctcatacctgtaatcccagcactttgggaggccgagaggggtggatcacgaggtcaggagatcgagaccgtcctggctaacacagtgaaaccccatctctactaaaaatacaaaaaattagccaggcatggtggcaggcgcctgtcgtcccagctactcgggaggctgaggcaggagaatggcgtgaaccccgggggcagagcttgctttgagccgagatcgcgccactgcactccagcctgggcgacagagcaagactcatctcaaaaaacaaaaaaaaaaaactagtttaatccagttaatccagtccctctgccttttaaatccaccagattatctttcctccaacatcttcccaaactgttctgaggaaggagatgaggtattaatgagagagattagtaggatcaccattaatgaaatatagtcaaatcagtttttagaaggttgagtccgggcgcggccgctcacgcctgtaatcccagcactttgggaggccgagatgggcggatcacgaggtcaggagatcgacaccatcctggctaacacggtgaaaccccgtctctactaaaaatacaaaaaaattagccggccgtggtggcgggcgcctgtagtcccagctactcgggaggctgaggcaggagaatggcgtgaacccgggaggtggagcttgcagtgagccgagatcgcgccactgcagtccagcctgggcgagagagcgggactccgtctcaaaaaaaaaaaaaaaagaaggtcgaatacctttttggcaccagggacccattttgtggaagtcaatttttccacaaatggtggggagtggggagtgatggttttgggatgaaactgttccatctcagatcactgggcgttagtttctcatagggagcatacaacctagatccttcgcatgcacagttcacaatagggtttgcgttcctgtgagaatttaatgcctccactgatctaacatgaggcggagctcaggcagtaatgcttgcttgccgcttatctcctgctatgtggcctggttcctaaccagttccagaccatggcccagggattgtggacccctgttgtatactatgtccccctctaaagcattctcagttcttatcggtgtgctttgaaaaagttcctcagaagtaaagcttatgtgcctttgtgtttaacttaactttgcagattgtgttttccaaagatggccacaatagtaactcccataccacatgttctttttacaatatgactttgacacttcttctactgacccctctcagtagaaatgtcacagtcatattgtacaaagaacatgctgtctttgaatattgatgggcttctgtctaacatggaagtgatgctatgtgacttttgagggtaggtcataaaaggtgatacaactttaatctggtactcttgagacatttgctcttggaaccaagccaccattttctgaagaagcttaagtagcccatattggcaggccaaatggagaaggcacatgcaggtgttccaggccaacagcctatgtgacaacagcatcagtcaccaagcatatgaacaaagatacttccagatgactcctgcctccagtgatcagatcacacccagttcttgagttttctcagctaaggccccagactttggatcagagataggctatctttgttgtgccctttctgaattcctgacccacagaatccataagcatagtaaatggttgtcttaagccactaagttttaaagtaatattttagatagcgagagtaactggaacacccaatgtttcctgagaacactttattttcttaagtatggtaactggtagcttgtgatacatgttccttggaaaacctgtttgtggaatttctggttttctaattttttagcttgccattcaaggccttcatagtgaacagtaggacagcttcggtattggcctatacatatccagcaaatcagtctcctccctgaatggtattttatttatagtttctgtatcagtattcttttactcttctagaaagcccttatgtttattcgctgatagtctcttttgtgaagtgcctgttcaaatatcatttttctattgagttgtctcttactgatttgtaaaagttctttgtaaattctggatatgtgcatgttgggacaaaaatctatttttatatcctgtgtgtatatatatatttcctaacaacaggctcgttttcagaatactatacatatgtgtatatatgtgtgtgtgtatatgtatagtgttctcccactctgtgacttgccttctgactctcttaatagtgtcttttgctaaatccaagttcttaattctaatggaggatggaatttgaaagtcttttcctttttttttgagatgaactctcactctgctgccaggctggagtgcagtggtgcgatctcggctcactgcaacctccgactccctggttcaagtaattcttctgcctcagcctcctgagtagctgggattacaggcacgcgccaccaagcgcagctaattttttttttttttgtatttctagtagagatggggtttcacgatgttggccaggatggtcttgatctcctgaccttgtgatccacctgcctcggcctcctaaagtgctgggattacaggtgtgagccaccacgcctggcagtcttttcctttatggctcatgtttactattaccttgtttacgaaacctttggccaccctaagctcataaaggtatgttccaatgttatcttttggaagctttattgttcacgtttcacatttagatctataatatacctagtactatattttgtctgtggtgtgagaaaggagtcaagattcatttattttccacatggatatccagttgaaccagcatcatttatttgaaagaccttgttttccttactcctctgcatgaacgccattgtcatgaatcatgaagatatatctttggatttgtttctggattccctgttcttgtccactgttttgtctatgttgtcttcaataatggtatatttttattaaacctggatatagggtaaagtcctccaactttgtggttgttcttcaaacttgtcttggctattctttttttttttttttttgagacggagtctctctctatcgcgcaggctggagtgcagtggcatgatctctgctcactgcaagctccgcctcccaagcgattctcctgcctcagcctcctgagtagctgggattatagacgcccgccaccacgcccggctaatttttttgtattcttagtggagatggggtttcaccgtgttagccaggatggtctctatcttctgacctcgtgatccgcccgcctcggcctcccaaagtgctgggattacaggcgtgtgagccaccgcgcccggccttgtcttgttattcttgactttttacacttccacatacatattagaattagcttaacaatttccatttttaaaaaaaggaaagggaaaagacctgatttggattggaattttacaaatctaagaattaatttggagtttatactagtgagacttccagttcacgaatacagtttgtcccctcgttatttaatttctctcagtaatatccagcaaaccacgtagctttctgtgtagaggtcttgcacatcatttgttagatttattcctaagtatttgatttttttgatgctgttataagtggtctcttttatgttttattttcaaattgtttgttgctggtatgtagaaatatatttgattttcatatattgaccttttagctaatgaccatgttgcattcacttattaattcaaataatatatgtaagggtttttttttttttgcattttctatgtatgtcatcatgtttgtgaataatcacactttcttcctatccaatctaaatatatttatatctttttttgttttcttattgcattggctgagacctcaagtatagaagtgttgatagcagacctccatatcttgatcccaaactcagagagggtttcaatattttacccttagtaaacatttactgaagatttttaatacttgtattatatgaaaaaaatgaatttcatatttatattttataaaagatttctttatttctcacttgttaagaattttttcatgactattggattttatgaaatattttctgtatcaattgagatgattatataagttttctttattctgttaatgtggtaacttaaactgattaaattttgaatatttaaacaacttctcatttctgatatatacacaatttagttgtcatctattacccttttgtatagcactagatttggtctgctaatattttgaatagtttttgcatctatctcaaccttaattataatgtacattttaaagtaaaaattacaaagaattgctgattgcataaaatgagttgggaagtgtccctctttttctattctctggacaactgtatgtaaaattggtattattccttccttaggtgttaatttcatctggaccaagaattttgtcttaaaatataagtttattaagagtcttctagtctgttttctttttgtatctgttgggtttggtttttttgtttgtttgtttgttttggaatttgcccatgtcaagtttattggcatacatttcttcatatttgtttattattttttgatgtctgtagaatctggagtgatatccttttttcacttctgatattgattgattgtaccatctcttttcttgagaagtcaagggtttacttatttataggtgttttcaaagtaaaaacttttgggtttgctaatcctctctaatgtaaactttttttcctatttcattaatatctactcttcattattatcttttttctattttctttatttggattcatttattttttttctaattccttaggccaaatggctaagtcctttatttgcagccttgttttctaatatatgcatttcaaaactttgaattttcctgcattcgtatctttatctgcatttcatacattttgtgtcctattttctattctctattgcttctctgctttctgcttatttctatattaattattttctatattttattaatttgttatacagtcttataaattctttcagtggttatggattttttttaacatttttaaaaaggttttctggcttttctaattgttctcaatggaagattatttgggatgtacagatcaccagcatgtttatgttggcttctaggccaattttaaaaaatgactaaagtaaaacttctgttaccaattaaaaattttgtttttctgccctgggcctttaaaagtcaaacctgcacttgaccagtcaccatatattttccaagtaggtttaatactagtgcctaggaatagcactaatgaaggttcagacacatgcaaagtatatgctctgctctgtgtcatcgtggcacaataacagagtccacagaatggtccacatttaatattattatgtttaaagtttttggcatttgaggaagttttagaagcttcctgttcatcttacatatgtaataaataatgtaagttatgactggatattgttggtactttaacttggaaagaaaaccatcttattacctctttttcaagtttttttgaaagactgtctggacatttaattgaaaactatttggacattgcaacacaaaccttaaaaaagttgttatcatctacagttcttacatgaataaagcagtattaccaagtagccaaagtaaaatgcagacattttactgtttgctgaagctgattaagatgtattatttataactccactttcaaatattttatttattagtacagtcttactgttctcaatggctaactttataataaataaatattatatttacatagaatcacttaatgtatactaagtatatatttaaacatataaataaatcagcccatgactttatatgtttgtattataaatagtataacaaatattataaatttgaacctctaaaatttatactagtcaaattatctaggtttgtatgagatttaattggaaaaaaccctcttactaaataaaattagaagcccattaagcaaattaaaacctatatttaagaaaataggcttgcctaagttacacagattgtatgcacgcttggtttttatccagcacaagtcttactgcttatgaaaattgattttattaaagattgcttatgggctgaggctgaaggcgtgccattatcctttaccagtatataattacaacgtactctcctttgttaatctgacagttatttgcagaactgaactaccttggattcttaggtagggaagagttttaattctcgtgcctcagattttccattgctgcttttacgtgggtgtgtgagattcagaaatacgagagtgaagtaaaataaacgatgctttataaatacatggaattaggtgcctacaggggaagctatacagcagctagccagcattttaattccatgtttctcagcttattttatttgaggtgttagagttgtacttttttgttttccaatgtttatagactgagcttgattttcatatctagttgaattctcactaattttgtggctaatcaagctcccacaatgtcatttacttgaagttaagtattgatatttatgatttgaatatatttaacaactttatagttaataactttaaattctcttctggtgaaggtattcagtttggccagtgtcttctcagtcagtgctctaatttaatatagtgtttagtgctaaatctaatattgtttctaacacattataaaggtcagaacttacataaatatactgtagtttgtgatagttttggagaatgggctacagtggcatttattagtgaagtaaaaattcagtccataagaaaatatgaagtgatactttatttagtccatatatttttaatggacagtggtctccactttctaagtggggatttttcatttttctaagtattcttaagagaatcagttttggacttttggttaaacatagaggttagaataaatatgtttatttcttcctaaattcactaaattaacagaataaacaataaaggaataaacaaagagaatgaaagaggcaatataacatcaggctagagaagtgaaattttagaaatgttagaaaagaaatgcataaattataaccaacttagagcagttttgatggaacataatatttgatcattatattgagttacaatttatttaattattccttaatatcgagtcatatatataatttttttagtgtctgataatgggttatcataattaagcattcatctatccatgaccatttagttttttcagcttttcactgttataattagcattccatgcatcagtcttaaaatattttaggtttttttcagaattgaatgactgaatcaaagtttataccttttatgagtattgatccatgctgccagattgctttgcaaagccatttttatgattaccatcaatgtgtggaatttcccatttcactacaacctagccaacattgcatttgccttaggatgttcaatctgggcagggacacatagcccttgcatcagttgcttgtctgtggtgctgtgggaaagtgtggcatgacatgacaaattttaccaggtgaagcttagctgtgtgcctttaccactgccaccttataataaagacagatgctgtgagtttagaggaagaggtgatttcctttgtttacctggggtgctcaaggaaggcttcatgtaacaaatagaatttgagctgtgtataatgagggaaagatttataaagaaaaatttgcacagacacatgagagatatatcagtctggatcaaatcagaagacagaagccacatagtaactaaaattgttagtttaacttaaagaattattagggtatgataagagaaaaactatgaagtcactctataaggagaactccaaaagttaccctagggctgaggaaaagtacccaatgaaggacggaattgaaatgaggttcagacctcattgaaagtgtggctatagcccattggatggtagagaaatttgctgcgttgtctgagccaacgctggtgcacaatcacagtgtgagcaggtgagttaagactggtaggagagcatgcagagggaatcagggcagtgcggcagggccacagtaacaacccttggggtgcaagtgagttgaggttggctagttagtagaaggagttggagcaccactttagataccactggaattgcaagttggagaggcctccctgtgtagcaatctagagcactgctgtttacagcttggggcaggacagtataccaagctgctgtgtggaacaaaggtcaggtggctggctggccaagccggtgcatatggtttgaggagaggggctggggagtagccacctggtctggggctcctggctatagtgctgctgctgcctgagtagagagctggagaaagaaagcacacagccgctagccagatgctggagaaagctttcccctgcaggcacctagtactacagcagtgttgtttttcagccttggcattattgaccttcagggctggataattatttgttgtggggagctgtcctgtgtattgtaggatatttggcagtatccttggcctctattcactgtatctcagtagttccccaagttatgacaatggaaaataatctccaaatattgccatatgtcctctgagggcaaattgtctctagttgtgaaccactgcaatagagaaatctcacagcagtggaacagtggaggggtaaaatataagctctccagaaacctgctgagaaaactccttccctccctttccagtgcactgtattgacagagcttagcatcatgtcatactggcaaatgaaaaatattttaaaggcccagatccacttttccagataagacaatgaagaatgaatttggagtagagaggtaataaactgatagctgtacaaagtacagttatgggattaaatatggttggagaattaaatatgagcaaagttatagaagcagaaaagcgtaggggcactagggaaattcaaggacaagaagactaaagtgcaaggctgatgtaaagtggtaagaggagaataagctagaagggccctttgaatcttaactctggagtgctttgagtgagtggaagagaggggaagagaaagacagaaagaccaatgaaggtttgagatttggtgctgtcagtagatgaggaaggcagaggcagaggtggaggagtgatagaaataattgggacctacatttttgcacataactaattactcaggaaatggttcatgatagtatatcctgggttttttcccacctatccatttcataatttaatgtagtgctttaatacataaaatatgcttattggggctggatgtgatggctcatgcctgtaatcccagcactttgggaggccgaggtgggtggattatctgagatcaggggttcaagaccggcctggccaacatggcaaaaccccatctctactaaaaatacaaaaattagccaggcgtggtggtacgtgcctgtagtcccagctactcaggaggctgaggcaggagaattgcttgaacctgggaggcagagtttgcagtgagccaagatcatgccactgaactccagcctgggcaacgtatatatgtatatatatatacatgtatattgtgtgtgtatatagatagatagatatagtatgtgtggatatgtatgtatatgtatatatacatatatatacacacatattcatacatacacacacacacacacacatacacacacacacacacacacacacacatagaatttgggagaagagaagagtaatatgaggaaataagagaccatagggagttcattgtccctcttactcttctatggagtgaatgcaagggcaagccagaacctctgcactttctcaccaggtgaaggtaggggaacctgtctcatggtaatgcacagagctaaaagagaattctagcagagggaatttgtggaagttacggttttgactcaaacccctctatagtctttcatttttccaaggatatgtctcctcctttctaagtactttcgtggcttgttttacgtgtcttgcaatcgtataatccagcatcactgaatagtcttatagtttcccagatgtccttgtggcatttccttctaggtatattgaaacttgcccttttttattcttgaattttgtctttggctcaaggttttacattttactgactcttcatactacttttctccccttatttagaaatggactcagaactcaaggaagaaattcctgtgcatgaggaattcattttgtgtggtggagccgaaacccaggttctaaaatgtgggccctggacagacctctttcatgatcaaagtgtcaaaaggcctaagctgcttattttcattattcctggtgagcgtaaaagtctgggtgaggagactttttgtagatactcataactatgtctgattttaaagtatagagaatttggtaaatatggaaaaccttggagaaggaattaaaatcgcttgacccattgttaacaaccacccttaatattttgacgtctggattttgtgtttttcttctatgtatttacattatgttgtctgttgtgtgtgtgtgtgtgtgtgtttgtgtcacagttggaagtatgtactatatatgcagttttgtaatgtggtttttaaagcatttcttaatatttaaaacttcatcaatatttttgccagttttctaaactttttctgcctcatttcaacatgattatatgtttattatagaatatttggccaggtgcaatggctcacgcctataatcccagcactttgggaggctgaggtgggtggatcacaaggtcaggagatcaagaccatcctggctaacatggtgaaaccccatctctactaaaaaacaaaaaattagctgggcgtggtggcacatgcctatagtcccagctactcgggaggctgaggcaggagaattgattgaacctgggaggcagaggttgcattgcccccagatcacaccaccgtactccagcctggggggcagagcgagactccgtctcaaaaaaatatttaaaaaaataaaaaataaaaaaataaaaattaaaaattagaatattctgatatttggcagctgagtcacttgtaacttttgctagatcattgtcaatagaattagggacagatgcttgagcgattgcaggtattcaaaatgcattttaaattgtgagtttgaacatacatgtttattcttattctgtgaattgccagttcgaaacccttgcccatttttcaattgtgttttcaatgttttccttattgattttcagttgattcttacacaactgtaaaattgtgttatatctgtcatacgtgacaagaatctttcctggtttgtcttttgacatcatttacaatgtttatttggttgtatagaaagtatctttgttatgtggccaaaatgctaagtctcttcctttaagacttcagggttttatgagtttcttagagagggctttcctactccaagattataaaacaattctgccatgtcttctagtatttttacaatttcatttgtgatctttaagttgatgcatctagattttaagggcaggcactgaggaagggatctacttttcttctccctctcctttggatggcttattacatggtccacaaccatttattgtatcatctgcctttctcctactgccttgcaatgctaactgtattgtaaagtagattatcctgtggccaggagtttctttccatgtttttcgcctcttcatgtgttcttcatgttttttaataaatgcagttttatgatacttttacatattttttggaacttgttcatttttattcttttccagaatattctttagcttcttttcttttggctgcagaatatattttttggcttcattaggaggaaaaaaaaagcttaaatgatctttaaagtcaactttcctaaaattgatctcgtaaaggcagagtataatgatagatactaaaggctgggaagggtgcagggctgggaggagggatgaagagagaggtaaacaggtacaaacatgcaagttagatgaaaggtgtaagttctattgttggaacttatttataccaacagaattggcatagtcggcagagtagactgactatagttaacagtagtgtattgtattggtataaagtagctagaagagaggccttggatttttctcaacacatagaaatgatgaatactcaaagtgaatgtactaaaacaccctgacatgatcattacacgttctatacaggtaacgaaatatcacatgtaccccatgaatatataacataaatatcaatatctttaaaaaaaataaataataaccaaaaaatcagcttttctagttccaacagatgttctcagaggcaaccacttttaacactggtatattcctgtgatatttattccacattcttttttgtttgtttgtttgtttagacagagtctcactctcttgcccagactggagtgcagtggtatgatctcagctcactgcaaccctccacctcctgggttcaagagattctcctgtatcagcctcatcagtagctgggattacaggtgtctgccaccatgcctggctaatttttgtagtcttagtagagacagggcttcaccatgttggccaggcgtgtgtcgaactcctggcctcaagtgatctgcccaccccagcctcccaaagtgctgggattataggcatgagccaccatgcctggcctttactcgtttctaaatgaaatacttatatttcttcttcttcagttgtcttttgttttgttttgagatggagtctctctctgttgcttaggttggagtgcagtggtgtgatctcggctcactgcaacctccgcctcccgggttcaagcaattctcctgagtttttaatattagatgttatctattgtcttcctccatgaaagaaaaagattagctttcttatactttcccttctccatgcacaatcatatacccctccttctccatctattttcctagtatgggaatatttcagttttttgttaggtcaatattcagtgcttttattattatgactatgtattatattatattatgtatattatattatattatattaattatattatacatagctaagcctatagggaattgcgcatgcatttcctttcttatatatttttgtttgttttccctgggttaatgatgttctgttatctttttgcttagttttttgtgctttaatcactcatttatcctagaactattctctagaagtgaaaagaatcctttcaatgcatttgagtcatcagtcagttttcagaatgctctgtcctttggctccagtctggactcattgctccccaggcctgctgcacagttgccatcctggggacttctgtcactttcttctggcttggatccctcgtttctcagatcccacatttttatcttagtttattctcttgtttttggtagagcatatcttctagtagcttccttagaagaggtacatgagaagtaacacagcatgctgcaaaatgtcttagactctaggttggaaataatttttctttaggaggaaaatggagggcgttaatggagggcattaatcattgttttccaacactcagagctgcttataagaagtattggtatcatttctgattttcgccttttgtatgtgaagattctctacccacattttcgagaccttttctttgttctgagattctgaaattttacagtgaagcaccttggtgtgactgttttttcatacaaggtacttgggttttggtgggcccttttaagccagaaactcatttcattctaatagcgctttgtttttcttttcttttttgtagtctcatgtttaatggatgcaatatcattttcttttcttttcttttttgtttttgcatttgcaagaattttcactgtgttccttttttcatttgcattagtctttagttttcctcaaatgtctggcaatccttgactatccattcatgtttaagaggaagacaaaaaacaaattggaagctttgcactcagagctggggcttatccagaggtgtgtctagggtgattagccatcctagcttgcctaggactgagaggttttctaggacataagactttcagtactaaaaccatgacagtctcgggcaaaacagaggagttggtcgccctaggtgggcctcatcctaaggtgattgagtagggacccagcatttcattgacggatttccagctttcagtgtctgaagctctttcttttattgttcagttttcctggggaggaatcttccaggctcctgtttgaagagtggaaacctgtctgttaatgttcaaagaggaacaggggaaaggaggtggtagtttcagtgtttggttatgcctagtccagcctcttctcagtatggtactttcattctcagctggactaagattcctgatcgagaatttctctttgttttaaccactaatgggaataaactattcttctgccaggatgtaacagtctttgtggaagtcagtccgttcagcatctattaacataaaaatacatgtacttttccagtagtgaaggagagtttgaaattatagtcatggcaagtgctgtttgatggagcagagatttggaatagcttatagcataggatagagaaaataagtagaaacattatcttaaactcgagaagggatatccttctaaggctagaaagaaggaggtgaaattggttactaaaatggaaaagtataaaggcgtatcagagggaagtgaagtctcctgcttcctgactactgttttttctgttgagagttgagaccatgttttgaatgctaatcatttccagctcatgaaaagatactaggcctgtggttcttaaagttggtgtcaggatcagaagtattgcttgagaactttaaaaatgcagttcctgggctctatccctgaccttctgaaccagaaagtctgggggttgggcaatcagtgttttaacaagccctgcagggaactgtgatacgcatatctgatccagggtgtagtcatgggaatgaattgcttaagtttaatgtaggtgaagttctttggatttcatcataataatgaattatgggacaaagtttttggctcagtcagtccaactggattttgaaatgtcctgacatgacatgacaagtgaaactgtcatttaagggtcaaggctttcagagaaagtgtgagtgactaaaaagttgatagatggaaatagatggcttgagtcttaaagaagaagaggttgttgtaatagtgaggtgaaatagtaagtgggacagacaacccacccacttccccacctggagatagtatttattccctcactcttttatcccaggtgctaggaatactgtgttgcattaagtctttgctctcattgagttatatgtggtgttagagaagagtgactgaggcctctgctgaagaggattgaaaggaagagagcccattacaggggagagccagatttcagatatggtgaggagataaagggagtattcagtgaagacactgagaatggagggaagcataaaacatttgtagtttgatagtctcattgtttatagtgctttgacattttcagatcatatttcatttcctagtgttcttttatgtttgccctgctcattagtttgtgggatttagaattgtattttgtgtgtgtgtgtgtgtgtgtgtgtgtgtgtgtgtgtgtggcaggtttcgggggagctaatctatttacactgtggtaataatcaggataacagtatttcaaggattgtgaagccactatggacaccatgttatgtccgtctctgatagactgacataacatttcattttaaatcacattgcttttgcagctagcaaaattaattcttcacttctaagttagtaatgataattgtgagttttcttttcttttttgtagtctgatgtttaatggatgcaatatcattttcttttcttttcttttttttgcatttgtaagaatttttactgtgttccttttttgatcagaatccacagattgaagaacttttaatttagtttcattttttctgatgaaccttagatcttggatttctgtaaagtaacattgtccttggactttctttaactagtgagatgaacaaagggaatcagattgagaactcaccatagagtacactgaatcataattcttaggaggtcatatggagataacagaaccatgtgaagtatcaagtgctgtgagcacagtggttggagatatagcagataaggctccatgaatgagtccaataggtctgtctacatggcaacctattatatagatactgtgccatattaacttgatatgtggcagttttcgttcctctccctacaaaattaactggaaggtataagtctatacttgcagcattgtatagttggagattattagcagtcagggcctagagatgatcactacaacttctgttatacattgcatgggtatttgactgatttgactgttatgagcatgttcaagtgtgtgtttataacacatttttatgtaaacttttgattaaatattttacttgcatgtctgcattggaatgttttccaacatccttacacctggacctctcccatacccctccgtgtgtgtgtcttttttagttgcataagtgtaggccttttaattttctttgtggtttcttaacaaggaggtttaaatggtgaagtatgaagtactgtatgcaatggtatttaagcattttgcattgcattttccacttctgtctctgttataagttagacctttgtgatacttgctatgcgttcagtttgaaaggatttattgtatgtgagtgccatgtacccaatctagtgctgcttggtgccactggatacagagaactatagcaagtgatggctacttttaaagaagttaaactttcaagtttggtacgttatacatgctacaatgttaagtatatttctgacaggataaaacttccatttttttctgcatctgttgaggatcgtatggtttttcttttacggttggttaatgtggtggatgatgttaatttttgaatgttaaaccaatccagcattcctgtgataaatcccacttggtcatgatgtattatgcttttaacattttgatggactcagtttgctaaaattttgtttagaatttttccatctttgttcacgaggtatagtggtctgtagttttttctttttctttttgcaatgtctttatgtggttttggtatgagggtgatgctggcctcatagaatgagttagaatatatttctttcttgatatggtttggctgtgtccccacccaaatctcttcttgaattgtaactcccacaatttccacgtgttgtgggaggggctcagtgggaggtaattgaatcacgggagcaggtctttctcatgctgttcttgtgatagtgaataagtcttatgaaatctgatggttttataaagaggagttcccctgcacacactccctttctttttgcctgctgccatccatgtaagatgtgacttgctactccttgccttccaccatgattgtgaagtgtcctcagccatgtggaactgtgagtccatgaaacctcttctttgtgtgtgagttgcccagtttcgggtatgtctttatcagcagcatgaaaacagactaatacatttctcttctattttctgaaagagtttttatacactgggcatttttcttccttaaatgtttgatagaattcaccagtgaagctgtgtgggcctggattttctttgtgggaagatttttaacttaaattctaattaatccaatcaatttagggctatttaggttatctgtttcttcttgagtgaactttgatagtttctgtctttctaaaagtttattttatctaagttgctaaatgtattgctatgaaaattttcatatttttcctaattactcttttaagatagaagactttttttaaatttaaatctgattatgccttaaccctgctcaatctcttttaatgttacttagattaaaagccaaattacttatcatggcccaaaaggtatcacatgattgtatttctcttcctcttcaacctgatctcatacaagatttgatatctcttgttatgctttagccacactgatagattagatgcaaagggaagaaccaaggattatggactgtcttccatttcttcaagagctaagatctttatttcttgagggcctttgaattagctcttcaagagctaagatctttatttcttgagggccttctccctccttagtatttattctcttccctcaaattttcacaaggcttatttcttgtcattttggggtcttagctaaatgtcacctcctcagacctttttttcactctattctcttcccttctctatcatgtgaccctgtttattccttttataggagttctcacactctttatctcacctatttagttatgtgttgtatattctcccactagtacataaattccaaaaaggccctcatctgtcttttgcctgacatagtgactttcatacagtaagtgctcaataaataattgagggctaaaagaagctgtaattctgaatagaattaatgaacataagtaattggcatcatcatttacttgatgatgataaaattgtggatcagaaagcttaagaactcagacttaatcccagagatagggagaaaactttgttttatttatttatttattcttcctcatttaaaaaaatatgttaagttctgggatacatgtgcagaatgtgcacgtttgttacataggtatacatgtgccatggtggtttgctgcacctgtcaacccatcatctaggttttaatgcctgcatgcattaagtatccattatctagtactcactgtttttcatatatcgtgtcattgtaacttacatctaaatcatggggttatctttagtgtctccttaatgttacaccagtttttaattgttataatagctgtggtattaatagctgccatttattcagcccctaccatgtgccaagttttgtgcaagtggctatccattcgttatttctaatgaaaatgccaactactttatagagatattgtaagactaactaaaacaaggaaggcagaagatcctacaccggattactgatgttttttaaaaattcagtattatgattttcttttgtatatactttcagtcatcaaatatttatttagcacttaccatatatgtgatgttggctaagttatttaacctctctgtactcagtttcctcatccataaaatggaagtaatgatagtgctacctcatatgataattaaataatatatgtaaagcacctaaacactgcctggcatgtagtaagttatagtacctaaaaatattagctattattattttctagccatatgaagaaatctatgagcaacgtaagacatgtgaatatgaggtataacatattcctagaaggttatactcagtaatataaaaatataaaatttttgtaaagtaatatattaatgagatgaaattttagtcacaatcccaaagagatttttaagaattgaaactagtgaaaataaccctaaagtttatgagaacagcctagaaaatttagaaaaagaaaaagggaagggatttgccctacctgttaacacttaaaaaaaaatgtagtaattaagacagtatggtcctggcagaggagaaaaggaaaaataaactgaattatttggtatcagaattagcaagtgaatgtaaaaatgtagtattgggtctgaagatatttcaaatcaatgcagaaagaatggattatataataaatggtcttggaacaattggccagtcacttggaaaaaagttggattgctacttagtattttatactaaaaagtattctaaacttactgaagacttaaatgcataaaacatgaaacagtgccacccacagcttccatagatgttatagcccctgtgctggtatgcccttcctcccttctttcttccttagctatacagtggccaataaactgaccaaagaatatatttctgcatttgaggaagttttcatcctatttgacaaagaagccaaaagcaccatcacaaaaaggaatttggaacttgggtcactaggtcagaatgcaacagaagcaaaataatatggatgctacggccgttgtatattaccgttatagctagacgttgttgtacaagtttgaatacctaacatttatataatacttgctgtgtttcaggcagtgttacaatgctttgtacattgattcacttagtcttcaaatgaggtagtaccattattacacattttgtggatgaggaaaccaaggcagagggaggttaaatagcttggccaaagctcacacagttggtaagtggcaaagccaagattccaacccaggtagtctggcttcagagtctatgctcttaaccactttactacactgcttatctagcaaactgaaagatataaaaatggagtagaaatcagtgaaattcgacaaggatgacagtggttatttacatcagtgctccagagccatgtcatgtaattgcagagaccagaaagcctaacaacatgaagaaatagataaactgatcagagaaatagatattgatggaaatggactagtagctgtgaagactttatatagatgatgattacaagatgaaaatcccatttcgttgtaatttcccccctacagatctatcagattgaatgtttttaaaaagatcgtttatttattgtttctttatagcaaactcatgtcaaaaataccttctgtacacacataagaaaaatctacatgtacttgtagacgtttgtttccccaaaagatcaagctgtacacctgtttacaattataagtgctagtgataagtgacaaggaaacagtagactccttaaagctctccctgtgcatgcttcttacactattttggctggcttgtttttctggttttcatgcatcttgttaactgagcatgaccaaatcttgaagtgccttatatgcagtattactgattttagacttcttccagatgactttatctggaagacactgaagggtgtttaaatagggtactgctgtgattttaatggaagtttgaagataatctctcttgggtactctgaagaattcagaggaaagtgtgaaaagaaacagacccatcttttctagcctgcgtgtcatcttatgcctgtttattactttgattaatctaaggtctgtgtttcttttcttaggtaacccaggtttttctgccttttatgtgccatttgcaaaggctttatactctttgacaaacagacgctttccagtttggactatcagtcatgctgggcatgcgttggctcccaaagacaagaagattcttacaacatcagagggtatgtccttgttaatatctactttcctttagagtgagtgcagggtcatgtttctagcaagcttgctaaggttaagagttacaccagtggaaacctctgcttgtggcattaggcccatggtgccatattttggtaaacttaggatttttagagacattttaactcttcatgtaattttctgtaagaatatgggtagataaaacaatctatgacttgccttctttatttaccaattagtaatcaactgtgtgttttttgatcatgtattatttttccagggttgttctaggaggaatggtggggaaaaagcagtccccaaccattttggcctctgggaaccagttttgtggaagacaatttttccacagactggggaggggtggatggtttcgggatgaaactgttccacctcagattaacaggtgtgcaacctagatctggcatgcacagttcacagtagggtactcctatgagaatccattgctgccgctgatctgacaggaggcagagctcaggcggtaatgctcactcgcccgtcgcacaccttcatctgtgtggccgggttcctgacaggccacagacaggggttgggaaccccttttataaaccatgttctttactttaaagaagctttttctctcatatttagagaataattaagtgataaaccgtggcctgctaatcatatagacacctaaggggtaaacaaaggagaaaacacagtgtgggttaggagagactttgtggagtaggcatgtgtcttagtcagtttgggctgctatagcaaaataccatagactaagtagcttttaaaaatggaaattgatttctcatagtttcttgagactggacgtccagtccagtctgcactggcagattcgatgtctgatgaaaacctacttcccgattcacaggtggcattcttgctgtcctctcgtggtggacacaggaggcaagccctcttgggactctcgcgggctctaccctcatgaccccatctgatcctaattacttcccaaagacccctctccacctcttaatagcatttgggcatagggtttcacctatggatttgggggccatataagcattcagaccattacagctggttttcacaattgaataaaatttggatttagggcatggaggtgggtgcagaggtacaacagacagaaagagtagcacagaagggagcaagatttaatagcgatgttactgctaagcagggccagtttgagagggactttgagagctggagagagagccaggactccatgctggaaggtttctaaatggaagaagtaataccatggagatgcaaactacctcctttaaatctgtgagaattctagcatgttcactgttccaaaaaataaaaaatgagagaaaaaataacttaaatataagtttataaaacataaacataactttataaaagtacagcatatccaagagttgaaggacactttcaaaaggtgtaacaattggaatgctctataggcattccattcaagggcgttttgtcctagggggtttcctttagttaatttgaggtgagatcgaggtggctgtgacttcattgcccagtttgcttctggttcttgtacgtctctctagtggtatgagcatctttttgtgcttattgagcttctcagttttaaagatattttacaataaagttacattttacatctatagtcttcgttattatatatgcatgattcttttagacattgatgtacaaggttgaacatacaaaagcctgtactctttgaaggctagttttgattatatttatttttaattgtaatctctgacctcagcctctgatcctcatatcagatacaattttttgtttctattttaaaatttgaatgtggtggcaataaatatggctgcatatgtgaactcctctgaatactttctgaaaaacattagtttactaatctgttattaatttgtgtaaatgttgcacgtcagataaacagtatcaatttatctagttttatctaattgttaaccttgtattttgcaactgaccctttagctgcagggagtatgttgtataattttctatttattttcaaaatggattaccttcctttattgtatttttagattaaaaagttatatgtgcttattaaacaatttagtatggaaaactgaataagaaaataaaaaatcggtgtcctgtaagttaaaggttgaaaagaaatactaaaacttcataatggtttaattatgcttaaacattttcagcctaaagcctaacaaacgttagcaccttggcactaagagatgagatttttcaatgaataatactttgtgtaatagctcagatattttctaggctgaagtaagcatctaggaatagcagcacaagggaccatatttttagtgctttttcccctatgtcaatatcgtgatgaagtgtgtatcttaaatgttagtgaaatagttacatttagattttcagggtattttttttcaacatttatttgcttattacctgttcaaaacttgtatttggcatatgttatacattaagaaaatatttagcatagaatttttttaaaaataaatagtggacttccagtttcagctctgacatgtagaacttggagtttgtcacttctctcctcgcaataagaaaaaagctgaggctaagtgtggtatctcatgcctgtaatcccagcactttgggaggccaaggcaggcagatcatgtgaggccaggaagttgagaccagcttggccaacatggcaaaactgcatctctactaaaagtacaaaaattagccaggcgtggtggtgcttgcctgtaatcccagctactcgggagactaagacatgagaattgcttgaaccttggaggcagaggttgcagtgagccaagattgtgccactgcactccagcctaggtgacagaatgagactgtgtctcaaaaaagaaagaaaaaaagaaaagaaaaaagctgaacaaaactaaaaatcatttttcttagacctttcagagaattgaggtcacaggacaaattgtcacctaaaatctagagagacaaggaaatacaatgaagattgtagaagacactagtgccgtttatgtagaatacactacataagtgtagaatacataaatggtgattttgatgaattgctgggggtaaagtacagactattttaaaagtaacaaacttctgcaagcctattcttgggggacttcttcactttcataggtattacttctaggaaccttatcaggtacttttgtgaaaatttgagaaatgtcctctatggttttttgttaggagtggaagagaagtaagcattttgcagtatgtccagaatattctcaataacatggcttactttccaagggaaaaagagttccagagctttatccaacctggggggaagggcagttagccaactccgtcttcccctagccttcatgtctcacatgctggaggagaaaaaaagatgacaaaaacttttgaagatcacagcacaggcattcaggcccactgaaagactgaggtttaatcattacattataggatgtttccctcctcattttaccaccatgtctacaggcctctaccttaataatagttcattataactataggagctacaagacacaaactctatttaagaaggagttcttagggaaaaccaaaggcaatggaggaaaaaaaaacaagaacattagaggaaactgaagtttctgatacctatagctacagaaaacattaagcatagccctggccaggcgtggtggctcatgcctgtaatcccagcactttgggaggctgaggcgagcagattgcttgaggttaggagtgcttgaccagcctggccaacgtgatgaaaccccatctctactaaaaatacaaaaattagccgggcatggtggtgcaagcctgtactcccagctactcgggaggttgaggcaggagaattgcttgaacccgggaggcagaggttgcagtgagccgagatagtgccactgcactccagcctgggcgacagagtgagaccctatcttaaaatacaaacaaacaaaaaaagcatagcccagcttctagtggcattaacatatagcctcacataaaaggtctatttacctcattcctattacttaatacatcatgtccagctttaagcaaaaagtaaaattagaaggcattgtaaaaggtaagaaaaaacagtctgaagagacaaagcaagcatcagaaccagagtcagatatatacttattaccaattttagaaatatcagatcgggaatttaaagtaaccatgattactacgttgagaactctaatggaagaagcagcatgcaagaacagatgggtaatgcaagcagacagtagggaactcttaagaaagaatcaaaaggaaatattagaaaacaccgtaacaaaaatgaaaaatgcctttgatggactcaccagcaggctggatgaagctgaggaaaaaatcagtgggctggaaaaataggttaatagaaattttcctaactgaaatgcaaagagaaaaaaataatttataaaagtacagcacatccaagagttgtgggacaatttcaaaaggtgtaacatatgcataattggaataccagatcaagaagaaagagaaaatggagaagataagagttgaagtacttaatgccagatgacaaaacacaggtctaggaatctcagagcacactaagcaggatcaatactaaggctctacacctacatatgtcattcttaagttgcagaaagccaaagacaaaatcttgaaaataggcagaggaaaaagtgccttacctgtagaagaacgaagatgagaattacagggaacttcttgtcagaaatcattcaacaaagaggagaatggagtgaaatatttagtgtcgaatgaaaaataacacttacctggatttctctatctagtgaaatcatccttcaaaagtaaaggagaaagaaagactttttcagaccaacagcagctgaggaaattagttgctggaaacatcctatgcaagaaatattaaaagaagttctttaggggaagggaaagcgatagagattagaaactcaaatctgtataaagaagagcatcggagaaggaataaaggtttaaaaagtttatttttcttgttccaaattgatctggtagatagctgtttattcaaagtaataaaagtaacagtatgttgggtaattacaacatggataaatgaaatgaatgtcaatcatgttataaaggatggaagagaggaattgggaatactcagttgtaacatacctggactaacggtgaaatggtatagtgttacttcagatgaacttgtgtttttttgttttttttgttttttttgagacagggtctcactctctcgcccaggctggagtacattggtacaatcttggcccactgcagcctcaacctgccaggatcaggtgatcctcccacctcagcctcccaagtagctgggactacagacgtgtgccactacacctggctaatttttggatttttagtagatgcagggtttcaccatattgcccaggctggtcttggaactccttgggctcaagcgatctgcccgcctcagcttcccaaagtgctgggattacaggcatgagccactgtgcccagccaaaaaaaaatttttttaataagtataattattatgagaagaagagagaatgttagatcatttaaaatgctcaattaaagctaggaatagagagtaggattttaaaaagaaagaacaagtataacaaagaagaaacatttataaatatgatagctattaattcaactatatcagtaatcactttatttatttatttagagatacagtctcactctgtcacccaggctggagtgcagtggtgccaacgagactaactgtagcctgaaactcccaggcttaagtgatcattcccacctcagcctcctgagtagctgagaccacaagtgtgtgccagcatgcctggctaatttttatattttttatagggacaggattttgccatgttgcctgggctagtcttgaactcctgggctcaagtgatctacctgccctggcctcctaaagtgctgggattacaggcatgagccaccatgcccagcctcagtaatcactttaaatgtgaatggtctaaatataccaattaaaatacacagattgttggagtggtagggggagatccaactatatgttgtctacaagaaaccactttaggaccaggcacagttatacacgcccgtaattccagcactttgggaggacgaggtcaacagattgcttgagcctaggagtttgagaccagcctgggcaacatggtgaaactccaactctacagaaaaatacaaaaattagtcaggcgtgctggcacgcacctgtggttcagcctactcaggaggctgaggtgggcagatcacttgaactcgggaggttgaggctgcagtgagccgagatcatgccactgcactctagtctgggcgacagagtgagatcttgtctttaaaacaaacaaataaacattttaaaacaaacaaacaaaaactttaagtataaagacacagatatgttgcaagtaaagggatatacagagatataccatggtagcactagtcaaaagaaagctggagtagctattttaattttagacaaagcaggcttcagaaaaagaaaatgtcagggataaagaggagcattacataatgataatagaaccagttcttcaaggaaacataacaatccttaacaaatatgtacctaacaacaaaggtcagaatgcaggaggcaaaactgatagactgcactattataagtggaaacatcagcaatcctttttctgtaatgaatagatccagcaaacagaaaggcagtaaagatatagttgaactgaattgcaccttcagtcaactttatttaattgacatttatagactacttcatctaacaacatagtcttctcaagcacacatggagcattcaccaagatagactacattccgggccataaaacataccttaagaaacttaaaattgagtataaattatacaaggtatgctcttagaccacagtggaattaaactagaaatcaacaacagaaacatagctaggaaatcccaatatatttagaagttaaacaacacacttttaaataacacatgggtcagtgaagtctgaagagtaacataaaaatactttgagcaaaataaaagtggaaatacaacttataaaaattggtaggatatagcaaaactagtgcttagaaggaaatttatagcattgactgcatgtattagagaagaaggaagatataaagttaattacctaagtttctgccttaggacaccagagaaagaacaatttaagcctaaagcaaagagaagaaaagatgataaaaatgggaacacaaatcaatgaagttgaaaacaagaaattattagaaaaaaaatcaacaaaccaaaagctagttatttaaaagactaataaaattaataagcctgtagccaggctaaccaaggggggagaaagagaagacgcaaattacaagtattcagaaagaaaagaagattcattgctgctgatctcttagataataaaaggacaataaacttaacttagataaaagggaccaatttattgaaagatacaagctcccaaaactcacacaaggaaaaatagatgatcagaatagactgtatctgttaaagaaattaaaccaccaaagctgaataaggacaaaacaagaaaagtataggtcaatatccttgagggacatacatgcaaaaattctcaatagaataccagcaaactgaattcaacatcacattaaaaggatatggtcatgatcaagtgagctatcttaagtcatactatagacagaagcgaacatttgaagagaacatgaatggcaactttgaaagttgaaaacagactcagaggatcacccttgatcaggtgttctcaaactttggcatgcatcaaaatcacctggagggtttattaaaacacaggtggctacctctgagttgttgatttagtagatctggggtgggacctgagaatttgcatttctaacaagttcccaggtaatattggtgctgctggtcctgggaccacattttcgggaccacattttcagaaccactgccctagatgttcacaataaacactgatacggaaaaccagtagaaaatatctgtcatgtgtctgaatttttaggaaacagctttaattcttattgtaaattgacatcttattatttataactttactttgaatatgtttatctctagttggcctgcttgtgtactattgagttaataacttagtaattagtctgggttctttgctacctaatgagaatagtgccatctagaggcattagcccaaagggccaccatagcgccaaaggaagctgtggtttctggagagggtgagagggcaactcattatcatcaaggacttattgacaacctactaggttattaactgtcatgctacaagggtatacaaagagttagaattgcttgccagtctccaccttttaggtttgtgactttctgtatctgagtagctcaaaagttctgtgaaggctaagtagggctctgggccttggaccagccccccattcagctagaacagttctgctctcatctgttgtacacattggaggttatgtttgcaaatgtatgctatagtggctttggataggcaacacagatatattatttgctgtccaagattgtcctaaggtactgattttctggcatgcaaaataatggcgtgaaaaatatgtaatcattgagaaaaagggcataagctattaccacacatcaaatgttgaaagtatgttttccttcatattagcacatgttaaaattatgaacagttggaaataatattctagtagaccacattatcacaatcataagttgaatataattggaagaacagatgttcaccaatgtcagaaggggatgattcgaggggaaaaaaagtgtgaaaagaaaatttgaggagttaggagtataaactgttttctggatttgatttgctatagagtcagcacacatgatgggaaattcattatcaactatttcaagtcattgtttagaaagtatgaaatgaaagctagaaatcatgctggttttgtattagcagataaaaacattacctaaaaaagttatacaatcttgcaactaatgatgaatttgagtcatgcttatccaaagaaacaataaactactctcactgcagtcccccaaataggaagaaagagagaaaacccagtggagctttctcttgccaggactgggagtggcagggcaacaaggaggtaagatggaatgactagatgagcccaaggcaggaacaaccaatcaatcaactctcagggctcacagtccctagaaatgaaagcacgtaaatctgtgggtcagaagagcaaaaaaccaaagtgcagagcaagagaagaagttaggaatcaagcaaattgttaagagtcccagggcagacagaagtagggagagtgagcattgcagttaacgtccataacacagaccagattgtgcgctcctctcttggcaatctataggtatcttctcattgatcacagaaccgagtccagactccttggtgtgaagttcagtttcctacttcatttatacccaactttcctttttaaccttatgcttcacctttccatataaccacacatagccacagaactcatggctttttccaagtaacagccatggaaacatggctgtttccaaaatatcactttacaataaaaagtaacacactttttatgcctttttcttttattgtttgctaagtctataacattatgttctccttgctgaatctctctgctgtttcctgctaaggactgttgaagtccttagcagataattggttttagtcaagtggaaagcataatttgatgactgtggttttcaccgtttggagaataataattaaaaattattttataaaacatatgcttggggtttacaaattttgaaatttgttttctaaataagatagcagtgttaaatagaataattatctcccatctccttcactgtaatgcatactttaagagctaacagagttgtaccagtgtttagatacagggagcttacagaatacttagggagggagctggggtttgatgagagtgtactcccacttcagcctagtaacctcaggacagttgtgaaaggaaggccttatggatcgatgaagtaggtaagcctacagaattagggaccacagttctcattgagccaattcactgatattcagtatcaacccacaacatctttgggggcttctgtattccatgtgagaaagaaatcaatggtgattttccctacaaaataggtgtaagatatctaggaacaaccgcatgtcaatgcattcttttttttaaatttattttgagaaatttttaaaaacgtagcaaaatagagttatataacaatcaaagtttctattactcacaattgacagttaacattgccatatttacataaatattttttgttaacaaaataagtgaaataaaacaatacagaaaaaggtttgttttttgtatcccatctctagttctatcatgaatttagagtaaatatttcatgtctctttttatgtttgtagttatatatatttatatatatgtatagcatggtgaacaacatattatttttttgtgtatttgaaagaaattaaggaggaaactttttattttattttttcttaaaaaaaaaggtatacatgagcagaatgtacacgtttgttacataggtatacgtgtgctatggtggtttgctgcacctattgacctgtcctgtaagttccctcccctcaccgccccacccctcaacagccctagtatgtgttgttcccctctctgtgtccatgtgttctcaatgttcacctcccacttatgggtgagaacatgcttcacaaggaaactgtattttcatcttgatcaaagaattctttaaaatatgaaatattattcttagcctttcaatttttacatgcaagttgtttagttattaagatacagctttggagtaatgactgggggcaggatggaagggtttagtagctgagcaaattctggtgtgagatgtagttactgtctgcagactcagtcctaccaaaggcatgtgtagtgctaatctccagtcttgtctgttccatggtcagagatgaccaataaatactgtttgtatgaaaataaatagttgaacttatacatttatattcagtatatagccatatatatatatatatatatgaatggcagttaaatatgtagttaaatttaaactgttttgcttggattcagatacatagttaaatgtatacatttatagtaatatacatgtaataaagaatatcttctagttatttatcttgggtagagtgggaaaaggtacagtactttttatgaatcaaagggccgttacccttctattgtgatccaataaactgtgttcttttctcacacaaatgcttgagatacttaactttggcatttaatgattgtgtttttatctatgtctgtttcctgttagtagattatgatctcctgaaaggcaaaggtagtatattttatttatgtctgtactttcaataataccaagggccaattagtcactgttttctgtcagagtagtcaattcagttcatgtaaaatgaagaaaataataatcatcagatttatctgtgttctgaggctataagggaatttaaaattgaaagcaattttaatgactgcttaataactttaataactggagcagcaaatttgaacgattagacaaaaagttaatgcgaagtactgatattatttaatttctctactaactatttcagaacaagttgtgtgtaccttttgaaataaactctagaaccgttaggtgagctgtgaagtgatatctaatagagatgggtctaagaaataggctcaggttctaagagaaaattgtcaatatgatattggggctggggttacagattaacagcatctcaaggcagaagaatttttcttagtacagaacaaaatggagtttcttatgtcttcctctttctgcatagatacaataacagtctgatctctctttctttcccccacaatttattggtaacaatatggtggattggattgtcatccaccaattcgggcagttctcaatttagaaatctcaatttagattatgttccaaatgtgcttcattgattataacttggagtacattttccttatagaaagaatggtataaatgatttccatattagcattcttctggttttgatacaattgaatgtaattttttctacattttttggagagtaagttaataatttctagcattttctcagaatatattactattaaaataataggaatgaaaatatataatcaagtatatagtcttttaacatttcattttctgctagtaaaataatatctagaattttatttactagtaaaatgaaaaaagataggctgggaatggtggtttacgcctgtaatcccagcacttcaggaggccgaggtgggtggatcacctgaggtcagaagtttgagaccagcctggccaacatggtgaaacctcatctctacaaaaattcaccaggcctggtggtgcacgcctgtaatcccagctacttgggagtcatgagaattgcttgaacccgggaggcggaggttgcagtgagctgagattgtgctactgcattccagcctgggcgacagagtgagactccatctcaaaaataaataaataaaaataaattttaaaagatagcacatttaaattttcagtcattgtacatttttagaaagtactttccccattaatcttaccactttggcaaacactagcaagtactgtgttcttgaaaatctactgaatagttcccagaggtaaagctagatctacctctgaaatattctgatttataatgtcctttaaagtttatctgaaatacaatgttttaggaccttatttatgatgtcagtgaaattttagaatatttagcccattttctttgctctaaccatgtaaatgttcttggtatatatttggaggaggacttaaataacaggaattgaaatgatgacaatcatagcttttatttatctgcttatgccagacacttaaacaacagccattggaggctagcattattatctctattttgtgtatgaggaaactgaagcctaggttaaaggatttgctcaagtcacacagttagggagatgctgagctgagatttaaacccagatgtatctcatctccagagcccgtttatctttgtactgcacctactgtcccaacagaaggaaaacttggatatttccaaatgctgcatattttgaaaaagaacttgggatgcaaatattaacattattgtggttttttatatcaaagaatgatatgatcacttctgggtagagtgattagagaagcaaggtataaactcttcaaacctaaatataatatttcatgcataaaaaggtggatttggagccattagaagtcctaccaaagtcaggttccagattctctctcttcccaattctgtttcatgctgaacttccttgttaagtggagaatggattgtaagctgacctgggaaaaagagtgagagcataacatgtttaacctgggagattaatagtactatggaaatagggaagtaagcctcattgagtcaagaaaaagcttttcaataactgtatgctggactttggggagcagtgataagcaagacctgaattgtaaagtaggagtgaattaggagtagtatagtgagataaataaacagggatgttgtggaaactgaaaagagagccactttactcctcacatcatgaatcataaaaaggtctctcagaggagataacgcttgtttcaagtttgtaggataaacaggacttagactaaaaggggagatgagcacacacacacacaaaaaaaaccatatacaaacaaaacagaagagtagtttttctgagtttggggtgcctcttgaatgagccataccgactgtaattcccatcaatgccttgcaagtcatgagagcaagaaattcagtgttcagtcactcaaattttaggaaacagttgactgtcttgtgatattttgaaatattacaccctgtcattgggttatatatatgttcatagggaaaacctattcaagttttctacactcgtagaatattagagtggccagcatcctcagagatcatctagtcagttccagttttcattcagccataacatttgctgtgtactagtcacaggacacatgaaaagatggaccttgccttcaaggaactcacagcctaagagaggaaataaacatacaaacagacaatgtgcaagtttgataaagtgctataataaaagaggtactgattaagcacagaagagagctcattaatttttcttgaggattagctaggtaaagttttaattaggtcttgaagaacctagaagagcagttcatttgtgacagggagggaggatatttcaggtcaggactgctgattatttaaaagggacagtttttaacatttctacctaagtttttcgatctggattctttaaataaataaagattatctaaaataattaagtcatgtcatggactttcttagttgtctattagtaatataaattagcctaagcagctggttctcaatgtgtggtactgggacccagtgcatcaacatctcctggaaacttggaaatgcaacttctcaggccccagcctagacctactgaaacagaaaccctggggtgtggagcccagcaatatgttttaacaagcctttaaggggattctgatgtatgctcaagtttgagaaccactggcctaagctaacagtaatacacagaattattgaaagttcatggactttgaggatttggagacctgaatttgaatctcacctctcccacttaataagtttgtgactattaatctgtcacctaatatctatgagcattgggattttcacctatcaagtgaaggttataatgtttccttcccaaaattgttgtgaaaattagttaatataatgaatgcctaatattatcactggcacactgtaggctttcgataaatggtaactgctttttatcatgattgttatctttttcttgatcttttttcagtgattacttttacttaatgaaaacgtgctcatatttttgcttttagattcaaacgctcaagaaattaaggacatttatggactaaatggacaaatagagcacaaactagctttcctgagaactcatgtgccaaaggacatgaaacttgtgctcattggccattcaataggcagctatttcacacttcagatgctgaagcgagtccctgagctcccggtaagtaggtctccagaggtaactgtgggtgctggactgtgtgcctgcacaaatcctcctcacctttcctatgttcttttgtctcttgttcagttgataaatagaacagagagagggatatttgctttctgcctttatccttatctccatattacgatgggcttatgtgaatgtatgttcataatgtttcaaagaataatgctgagggagataagaagtttctgaaagaatgcctttgaatctagggttatcggagttcttatgttacacattacttgctgttttttataaagaaatatttaagagcggtcactaggtaagacctagacaagaatctgtcttttgtgggaaggtattttgtaaatattcttgcctttttcagaaggaagaaatgtatcatcatcatcactgataggcaaacagctgtctttatggaacactacatctttattaattcataagttcagattcttacctattctgtatcttggcagcctttttgagacacatattcacaaatgcttgcaaatatttgttggataccactgtgtgccagatattaagtgaggcgctagagacgcaaagacctatttaaagtgcccaggaaagcaagtgaactataagagatataaaacaaaacaaaaaaattgtactttcactagcatataccattgaaataactcactgaatggatgcaattcacaagataattcatttctttattcaacaaacatatattaagccctttccatgtgtcagatcctgtgctatgttttgaggacatcccagagagtaagacagtctttgaagtaggagagcctggagtctgcttgaggagacagtctaaccaatagatgtgatacctactgtcttgtttcagttcagggggtgtgggagcatggagtgctggtaaacctagtaatctgaagccaagataggacgtgatcgcttcatggctgctttgtgctaggattttgactgtttctcactccgtgggataaaatatcttcagtggggtctcagagctcactaagcactcgctccttttcttgccagcttcacctgcttgcttcttattcgtaattgcccttgggaaatgtacaactatagcctccctcgctgtggtttttgatactaaatggaggttttaaattattattgggtataagaaaatatgtttttcatttctaagtgtgaattcaataaattcaagattgtactctgttctctgtattattgtctactgtgttgggtgttttttccctaaataaggtgtcttaatcagaatgcaggctttatttttccttttagcattttgcacagcttctaatctcttttgtgccttcgaagtctcctctagtactgtgtcatgtggttgccatctttatggtgtccagctctgcctcttagtggttctacttgcacagttgctgtgagttctggcagtagaatcaggacacctaggttccaatatttattgtccttttttttttttagtctgtctgatcttagacaagttattgagtctctactttagttttgagtctcaacctcagtttcctcatttgtaaaatggggataatatgttcttcaaagtatttttgtgaggaattatataaagcatcaagaatggtatctgtaactttaaagttccaaataagtattagctattattattattagggaaataactctagagtcattgtctcagtcattaggttaactattgtattaggtatctattgctgtgtatcaaattgccccaaaacttagcagtgtaaaacaatacacatttcttcactcgtagtttctggtcagaagtctggccacagcttagctggattctctgcttcagggtctctcccaagattttaaccaacatgtcttccagggctacagttttatctgaaggctttagttgagatggatctgcatccaggctcactcttgtggtttttgacaggatcccattccttgagagttgttggacagagagccttcattcagcagtggcatttggggggaggccaccttctttaacgtgtcggcctgtctagctgacttcattagagcacacctggaagaagagtcaaggaggcagacagcctgctagcagatgaaaatcacaggctgtaacccagttacaaagtgacatcccatcacgtttcctgtattcttgttagaatcaagtcactaggtctagcccacactcaaggagagataattacacaagggcatgaatactaggaggtgaaagtcactgggagctgcctcagagctgcataccccatcattctaaaattaggatttcacttgtgtgttgtgcagtcaagaacatggacataggatgtacataaattgttgcatttatttactggtgtaggcaatgacttggacctgtcaaataaaatgtagcaaactgacatgaaatgtagttatttgttgttagttgttccaggtgtcttaaacactttaaaaacattaaaaaggatacttgcatatttgaaataatagcattactgttctataaacataggaaagaaaatattcattttggagcccatcacagactattattaacttaatcacagatctgttttggtttttgtgtttgcttcagatctgttctgcatgtgatgtgtggtttctcttttgtgtgtttgaaaatgattgttcaatacattgtcttgaacctttctctctttttgggcccatattcacaatgtctgttgggaaagaagtagaatgcatctcaaggttaatgtgctttcttatagctttttcagcatcataactttctaattattgtcctgccttcaggtgtccttgcttttgcaggaatagtggtgaaaaggggaaacaaagatgaaacgtgaacttaacctactctatttgtggagacacaactcaaactgattatagagttttcagaaagatatgtgaagctgtgttttatcttcttaaaaagggtgtaagctagaaaataatgtgtgcaataaattgtccaaagggtgtaagctagaaaataatgtgtgcaataaattgtccaaaaggtcacctcttttggggggtaggaggggcagtgaacatctgtatgatttttaaattattattcagaagctttatctggtttcaattaactacattgttgaaattccctaccccatccccagcccccattaaacacctgggtcagtgaatattggtggtgtgatccctgccaaagtgttgaaatttcagtgtctctgggctactctaagacaccgcagtgcctgcatgcctgaagttagcatgacatgctccatttaagatgcatttgacaaatatgtttgtgtaagccagaatgttacaatccttaatcattttgccaaaaataagttagctattatgttttataacatatgaagtgtgataataagaaacttgtgtttccatctcttctgttattttttactggaatatttgactcttgtaagattttgaggacatatgtgtagtttagtagctagctggtttatttagttttattttggttcagctctttgtaatattttcataactaattataggcaacttggtcttaaatcattttaagagacttattgtatatgtcagatatactgtctgacctgtattttaatatactaaaaaaaagttgcccctttaaaaaaatctggcatttaaagttgtttatctaaacaaattccatacatagaattagagatattcttcatatattttgaaattagtgctcagtatagggaatttaaagagaaacttgagcaaataggtaattgaaagactgttaaatagtagctatcatgacttacaataataaacataattgtttttagattcatagaatcttagaactgagataggctttagagacaatctggccccatctttcattttatcagtgggaagtgagagaaaggtcccttgccagtattcagccttggctctgcctgaatctggggtggggcatactggtattagctgtgagtataaaaagaatccaagaaggtattgatggctccttcaacctgtggatgatagcagagcctatagctattacagtgtgccctgcagtgtacacaactgctaagttcgtgtgactcattgtgttggtgctccaagagtaggaaaccccgtgaatgctctagcaatttcaggattgtgtgttggggtggggggagaataatacagaagcaaaaaagtagtaatcttatctccactatctagaatcttctttctcttatcaaccctctatatgttaaaaatgtgtcacctgattttgccagtaaatctttttcataaagttcaagtttgggagttgagttgaaagcccttgattcttcactgagtcttggggtgaactttaattaatataactttaattttcctctaagaatttatataacctttaatgataacatgttctcctcttcgaaggatatcagatccttcacaaacttaattttttatattatttggccttctgtgcataataacacagagtttcctttgtcttctggttagcaaaaatgtcttctctctgaatgaaatttctggattacttaaactcactctcttaagtaccagactattttacccaactggataaaaatttgtctaaaatatattacttacttatctgccttcagcaatgcatattgactatagaggaattttttcttagtgatttaagggcagtggtaataacactattattttgatagtgttatgctagaataaaatgtaatcaaaaggaatgtgcctgtgtcctgaaatttcttaggtgataatgctttttcattttttaaaaaaaatgtttcatgtatgtctattttagtttttctatctcctctctcagtgttaagtacttcttctcttccctacttctaatttattgctactaatttgctgtgggcagagaaaaccagtaactacattataatttttttcagtaggaatgaacaggtcctaaatagataaaggagtaaaattgacagcattaaatgtgtggacattgttatcactcagcctttttttctcttcttttgagatcctcaaaaaggatgttttggggcattttaagtactcaaaattttagagactcaacatacaactatagctgagaagtttgcaaaactttactaaaagaattagaataacatgttagatcatatatgttttgattcaggaatatacctcatccatactaaggaaaaaatagcttcagtgttctccaacaatgagattattgagactgtggtttacttacactattctgctgagccttcatgtctgctgtcaaagtaagacatgcttgtaagaagcattcatattatgtcactcagctatgtttaacagttgagataatctggagggagggagaagaataggaaataactcatttgtcgtagtaaattttgtcagaatcctatccctagattcaagtgacaagtgacaagacacggaaggcaaaatgaggcagtactgtaaggctcagaaagttttgtggagagggttgtcttctacctgggaagctcagaaaaagcttcctggaagagcttcagggccactgaaggatgagttgtatctggaagtagaggattttatatggtggctagggggtactgtgcattctaggcaagggagacagcatgaagagaaatggttttcatcactgggcacggggagagggcagtgggtggtgtgactgggttgcggcagagtgtgcgtggaggggtcgatcgggcatgagattcaaggttgatagagatggacaaaaagctgggctagggagcatgggctcattttctggacagcagaaagccattgaaggatctctgatgatagcagtcatgcatcaggtaaattaatctctcagagaaaaggaaaatgagatggagatagaaaaagtgcagcataaaaagtgaagatccaggtgacaggaaagtttactagtccaaataagaaataatgaagacagtgtaagggataaaattgcccagggaaattgttgagaaaagagagaggccatagatgtgtatcagcggaatgatttcatttgccataaaggagtgttacaggatctttggggtgttgctgttctggccagaaacctgtggttggcggaatctttgcctgagttttgctcgggcccactgggctcgttccaccgactctgcctgacaggctatgctcagctcatgctgccggcctggatcctatgcctccaagggagactagagtcaggcgtggagtgatgaggggtgtgtgtgagcgagtatggggtccagccactgcacagtcagacatgctggctgctgccatggggcaggcagctccaggtgccagcatgggtgtcagctctctgtgaggctgcagctggaccaggcacactgtaagcagcttccccagctggcaccagggaatgcggtggcacccagaagcttagagactccaggaaccacaaggccccaaagagggagtcacagctctggctcagggagctcccaggtctgggctccctgaagtgctgcagattttctctccttctcttcactcgcaacatggcgagcagggggcatgtttcagctttgtttgtgttacagcagctcttttagcctcgccactcatcaggtcctgagttcttgttctgcgaccaggaagaatgaggtttgcagacatgcagagggtgagcaagacagagaggagctttattgagcaataaaacagctcagagaagacccgcagtggacagctcctctgtgtagccagggtgtcccagtgagtgttcagctcctagcagagagggtagctcctctctgcagctggtcatcccatcctgcagctctcagcagagaggaggccctgtaggtggcttctctgtgcaggcaagtcatccctttgtctggatctcttggcagagatagtagctcctttctgcagcaggtcatcccattgtctctctgtcctctgctctgctctggctgagcccagggcttttatgggcctcagagagaaggaagtgcccactgattggtccatgggcagccaggggtaggcccagaaagggcaccacaagtcccctactctggtccctgggactggcagcctggcccctagccttcaaaccctccctggcctgcaggtggggcctcaccggagatcctccctcttctgcccagtggcccatctgcctcctgccagcatctaaggcacccaggttgcttgtgccaaggggcacctgcaggccagtgctgagccgccctcaacacaccccctcaatttcccctcatgcttgtcagcacccgaagtccagaggggactgaggtggcagggagctggcatgtcagtgctcctcaagtgtgtgcacacccagccgggctgtgacagtgaccaggcttggccccaaccctactccaagatcagagcgggcaccaggagcagggagaggtcatggagtggagcaggcctctccaagccttcaagggcaagggaggggggacttcccaggcccccaagggcacagagaggcctgggtccacagccttgtcttgggctgctgcctgtttctggctctagtggctccatggagcatgaagcccagctgcaccccctcacagcctggggcaggggctctaggtacttgctgggcccaggccagtgtcagggtaggggcaacatctccatgagctcccccagtggccctggcattcaggggcagctgggagctccccctcgcccagattgtggccctgcccagtgcgcacctccaggaatggattgcaggccctggtctggccgtcaggagtgtcaggcctggtggtcaccctgatgcagggcagaccctggggacagagccctgggcggccctgcgcagagccccctcctgaggcacagaaaccctccactgctggccggtccccgaagcaggcgtcacagtcagctgcctcaaggacgtggggcacaggggacccaccaccgccattgcagctcctgtagccacttctgctgccaccgtctatgcctccccactgtggatagccccctgctgccatcaggaggggaaagaggtggaagtcacagaaagaggcagaagatataataattttccaaactattggctgcaatccattaatggatcccaaaatcacttcagtgggttgcaaccagtggatcagtcaagacagtagactgtgctataataacacaatgtcagtggcttttaacaacaaaggtttgtttcttactcatgatacaaatcctttgagggtaggctgcccctatgaagatctctctatgcaagctttctccagaatccagattgatggagtagcctctgcctggaatattcaagtcccatggcagaggatataaagtgaatagtgaaccacacctacattttaaaacctctgcctggaagtgaaaattttcactcctcaaattttattggacagagcaaatcatatgaccaagtcagccatcaatgaggctgtgaagtacagtcctccccagagaatggaagcgtctgtttgtgaccaatgaaacagtgtttttaaacaatgtataataaaatcaagtaaaatagaatagaataaaaatatattgcagtaaaggcatgtattatgaaacttttgtttcactttgtgtgtgtgttgataacatagtagattataatgtcgaatgtatatcttactgtgagttaaggtaaaaaaaaaaaaaagtttgaaaaccattcatctggactagagtacaccacagcagctaagaacagagcaagaatgtcaagaaaggggtagatatatggaggattacagatggccacagatttttttgtcattcctctcaagaaatgaaacctgtttcccttcccctttaaatttaggccaagcatgtgacttactttcaccaataagatacagtggaagtaatgtacttctggtagcttcaagtccaggccttaagaggactaggagcttctatttcctccctctcagaagccagctgctgtgtaagaaagccgactgccctgagaccacgaggctgagagaagcccaagctagctacgtaggaggatcatgaggcaccaggcctgagtgaaaccttctcgggtcttccagcccatctcagcccagcccatccgccactgaatgcagcccaatgagtgaccccagcccacaccacatggagcaaaagaaccatccaactgagccctatttgaattcctgacccacagaattgtgagaaagcaaaatcattgtgattttaaaccataagtctagagatgctatgttatatagcagtagataatttaaacaaggtaacagggttgaatgtaacaaatgttgaaggcttcaggcttctagagtaaaaggttcttggtgtcctcgaagacagacttttagtgaaataatgggacaagggggttgcaggaagttaggtgataaatggatagtgattccactggccagtgaaggagaagaacacataataatttaaggaagaagctggtcaagggaactttttttcctgtaagtaggggagaatttaacatatgctgagaggaacagcccaagcgtagagagatgtcgaaaatgaaagacaaataggaacttttgttggaacaggtttccttccatttgtcttttagtctacatacttgaaaacttggaaaatggaatttttcttaatatttatgtctttgcaaaagtggtttaccccttccctggggtgtagggggaacatatattacatatttggttctccttttccatctagaaaaagtctagctcaatttttaaaattgatgttattgtcattactaacagtgattatacctaacattcatttgaaatttataaaacgtgttcacatgtaacaaggtattttaacaatctgatttttcccatcttaaagatgagaccgaagtgccaaggagccatgtgtccaacccatatgtcaactagtagaaagtagcagagctgggactctgtattctgttttctaactttcccactacctgttttctaggtgagttagagaggtgatgattacagatggttagactaagttgctttcacaaatcaccaaactatttggcctaaacttaagatttctatttttgcttttttaatatttgagttcttcaaacacacagtgagtgttttagtaggaagcaggtgaatgcattgggaggagttcagagagaactgagagaaatgacagcatgtgtgagtgttctggagcataggagataaagagactgttgaggcctgggccaagggcagaaattaaactgaaaagatagtaaatcagagtcctagaattgagctgggaacagaaggactatgaaggaaattggaggattctgcaaacatagtgcatagtagtttgacagttacctctatgtgacccattaataaatcctgctgcgtgaaaaacacaggcttagacaatcagcacctaactactctgatttctgaaagattttccatttcagaaaaccgtaagtctcttactctaagtttgtattgtagatgatgaaatgctatttttccaatcacttatgcatttatttaagtatatatgtatctgcatatttgtgcgcacacacacacattatcttttctgagttacccagaataccttgctaaaaactagacacatggacagtttcaacttttcaacttcagccatttttagttatctgtgtatttttttaaatcctgaaattgctttcaaagtggaaaaattgtgtgggcttttttcatcttttcataactcaaaaacgacttaatatgtttttctcaaactttgcaaaaaaaaaaaaatcacctttgggctgaaaccaagcatggaaaatttcaccacaaagggctaattttttggaaagctgcaagaaagtgaaaacgggtttataatagaacattcttcatgcatgttaatacttagtactttatctaatgcatttcatctgagaatttctgaacacttttcagatttaaatattgagccattttaatatttgtgtaccaatgatatattgtcagatatcgaaaagttcccccatcctctcagatgtctaatagcttgggaattagtgagatgtgtttaaaatgacaggtggggcaaatgaagttaagtggctgctagccagagaaagctgtatatttactgcccaacacattttatcactacctcttcttggcccaggagtactgtagttgtaagtaaaatataatagatgacactgggcactaatttgaataagccaacatgtctcaaagtagtatcaacagcacctgtgatcttgttagaaatgcaaattcttccccctcttcaccccaaggggtggggctcaccaaccagcatttaactagcactgcaggtgattctggtacatgcttaagtttgagaaccacctacctaagctttccaaaagcttggaacagaatgcattgaaatgctgtggacagttaaatctgtccttggtctttctgtgatgtcagctctgtcttctcatatcccttggaagcaggaggaatatgaatcaaattctctgaaggaaaggtcttctgtgttaatgtgctctagttctttccacctatgacgttgtccataaacacagagactcccttgagtaaatgtgctgatatcagcttgttcagggtaacagcactaccaagatgtattttctcatttccttgaattattagggtcaaaactgaaatgggactataaatttctttcttatttctttggaatcttttaagttctaagatggtatcagatgtgtcagtggaagttgattgaagctctttggtgtgtaagttctcaatctgacgctttgcagtagacctctgcatttcagcaaactccatggtctgtatttttgtgtcttcaggcacggaaatagttgtttacgtggcattgtaacaagttttgaaaatattaccctggtgatggaagtcactagtctgtagtatgtgggcctttagctaatccttttagcttaggttaatttcttacaataaataatttgtagaaattcataaaaaggacagcaagttctcaaagatgcaaaggatgtgaacagataattcactgaagaactaatatatcaaaaagtgtgtgcctaccacaatgtgtgatagtgtttaatgaattagtatatagtagtatacttaatgatgtctgtttatattgagtatggtagtatttgctaatgttcatttgatgaatgaacctcaacagttatcaaaattaactattactattacatagtctaaaagaaaagttgtgttgtgtatgtgtgtacttcgatatccattttaaataagtttgaacaggtaaataccaggtggcttatagtagttttctctggtggttaggggtaaaggatgtattggagtgaaaactctacattgtttctgcttttctttataatgaccatgtattatcagaaaaaaataatttccattaaaaaagtattcataccctttgaacctactaattcttttttttggaatttatattaagaaaacagacaaagatagaaaaaatcatgtgcaaaactattatctattataacaaaaaattggaaacatcctaatgtccaaccttaaaggcaaggttaggtagagtatggaaagtacagccattaaaattatatttgcaaaagacattataatacataaaagttaattatagaatattaaggatgtcagaatacatagagaatgtgtgaatacaactgtataaaaatcacacatggaaaagcttgataattataaaatgaatttagtggttgtatttaagtggtgagtttgggttttttttttctattttttatttttgaattttctgtaatgacatatatttattcactattatagacatttaatggtcatgcatttttctctctctttttttttcttttaaggtgatttgttcatgttactttagagcagaaagttgttccaggatagatcttttttaaaaatttaattttggattcatagggtacatgtacatgtttattacatgagtatattatgtaatgggggggattgggcttccagtgtaccagttacccaaatagtgaacattgtacccagtaggtataaattatgtttgctttgtatattgtcaagttcagtgcagtccttcttagggctcaagttatcctacagggcccatattaaataccaaccttcttaagtccttctgggtacaagatagtttataaatagacaaaagaacaaataagtcattagccaaatgtcacttcctgcatgaaaactttgctgattgctccgatagaatataacttctgctacttttgggccaatgatattgtctcctgtagcttttctgttgtggcttgtagcttaagtgtaatttttttttatagccacaagaacaagagctggcttgttttctttgtacccttgcaagttctagcatagggtcttacacatcccaaaaggaagacatccattttttttttcatttaattaaattaaactatatgaaagttacatcagcagcttctgctggtaaaattctcacttggttcataagtgccactgacttcttctgttcatacagattaaccactgcattgaccttaaggaaacagttgtcttgttcgacagtgaaagagaatacagatcagcagcaagagttagcagctatatacatccaaaggagcaatactaattcagcttctataagatagaattgaagaatattattatggtctcggaatagttgaagatttcttaaattggatagcacaaatgtttgtacaaaatactgctgtaagtgaaaggaaagagcttaggggtgtggcggacagactttagggtgggtggcaccccatgatcctcacctcctaatgttcattcctacacgtaatcccctccataagtggatatgactgatgacttgcatctaaccaacaaaatatgataaaggtgacagacaggaagcacatgattatgtgtatgtgatttacatacctaagattgtaaggcctgtcttgcagaagtctctctcccatgctggctttaaaagcaaactgccatgttgtgggttgtctatgttgggcggcctatatggcaaggagttgcaaggggccactagaagctgaaagctgccttccgtcaacatccaacaaaaaaactgaaatccttgatgctacactacaaagaactgaatcctctccacaaccttagtgatttgtatccttccccagtcaagcctcagatgagactgcagccctagctgacaccttgattgcagtctggtaagatgctaagcagagaacccagctaagctaggcctggactcctgatgtgcagaaactgtgcaatatcaagttcgtattgttctaagctgcaaagttttagtaatttattacatagcaatagataacaaatcaagaagaaagtaaaagggtaatagcaactccttgttttctttgcaggaaaacccacctctaagaccagtagtggccctaagttagtatcagcattgtagcagtagcagctagcctagccttttcccctgtcacttttccctgcttttacactatcttacccactcttcctactccactcaattacctagacttttggtcttccttgcaatttttttattaacattacttctctccccacctcaaaaaaaagataatttgggttgttgataagcatgtcttttgatagcttgcctggtgattatttgatgtaataacaaaatcacaggttgggattcattagcatcattcatcctactctaggttgaagcagatcttatttgaaagtattgccatattcaaatctcatctgaccaagaggttaatagtggtaggatattgagaggccctgtggtatgagagagtggcccatgctaaggcagaggtgatacatttgtgaattcccttgcatttgtgtggatataggtctgaaaaatgtcgcttgtacctggccacactgaagccttgttcatagaagagcacattcatagagcctcagtggacagactataactatcagagaagacataacagggaggggagtggaaacagatgaacaacattctgtgaaattgcctctttttggcttttgtttagttcagatagaagcttctttctaggtctgtttgtggagatgagaagtatgattgtgatctttaagaaaggaaaaagctctctaatatggttaaccagcatgtatgaggttgttttacgctcacttccagcttgtatggaaaatctgtgaacaatatgcaatgtaggccacaaaaaatttcctgaaatggaaaaagcctagcaggcactaaatgaaagctaggcactaaatgaaagatgcttcacaagaataaaatgtggttgctttgagatctcacattccaggccatttcagactaattgtatttgtttgggaagaagcaagattgtcaggtatcaggaaggtgtattgatacataaaagatggaagccagcgtcatactgcaaacctctccctaggaagccagacagtaaatcattttccagggtcagtcatatagagaccagagggagcatgcatgaatgaagacacagtctagaaactccatttcaacaaatagtttctcccctcaccagtactgttatgggagcttctgcaaaaagccaaattgagtgttagagattcagccttttcccctttcataatctactacccttaggaagatgctgaggagcttcttataacctcttacaaaggagaaagtctctgagagcttcagtaatattatattaatgtcaatagacattttttcagaagagatttcataaaaacttaaggacatattctggttatctgggtaccaggagggttctccttaaggcccttgtttccttccgttcatagttgctgtgtttgccttacagtccctgcacttagggctccatcctgactttataatttctcattgtctagatatatattttcctatctatgtgcctttgttgagctacttcctttctgctttgtcccacaccatctaactgatgcctcctgttcttctggaaaatcatctcaaacatgagctcctgtgtgaactctttcctgattcttcccagtcatttttactctgtccttcctttggtaacactttttctcataattcttctatattctaccctatattataggcattgcatatttctttgatttttcctgttagatgtttcagctttccttttaactagagcataatctgcatacagtaactcttttgtttgtctccctgcctcgttctagatatttcttctgacttaacattctacttcactaatcctcacttgagctatgtataaacacctttaaactcatctgttacatcctcaattttagttattctattttttgcctataaaatttccattttattgttataattactaattcctgcaaatctccatcttgtcatttaatatcttgatcatattatagttattttaaactccctatctgactttattctcctttgtaccatcaacaatttttaaaattatcattacttttataaaagttcagagatcatatatttgacatgaaaataaataaagattgtgtctgataattccaacatctaagtctcatgtggttgcattcctacttcagctttttcctttgctttggttatattatcttgtctatccgtatgcttgtgtattagtccaggtttgccagagaaacaaccaatgggatgtatgcacatggaaagaggtttattataaggaattggctcacatgtttatgggggttgacaaatcccaagatctgtagtcagcaaactgcagacctaggaaagccaatgatgtaattgtagtttcagtccaaaggtctgagagccagaatttctgatggtttaattccagtccaaaggctggcagcctcaggacccaggaagagctgatgtttcattttgagtctgaagacagaaaaaaaaaaaagtcctagcttgaaggtggtcaggcagaaggaattctcttttattaaaccttttggttctagtcagaccttcaactgattggatgaggctcactcacattagggagggcaatatgctttactcagtgtaccattcaaatgttaatctcagccagaaacaccctcacacatccaaattgtttgaccaaatatctgggcaccctgtggcccagtcaagctgacatgtaaaattgaccatcacagcttggcaagtattttttttaactgaatacctgacattatatgtgaaaaattagtaaaacaatattagaatcttatcttcctccagggaggatttacctttgtttttgcaattattcttagggtaggtcactttgatgccattgggaattgggttgaatcaaagctatctttggaggggctggcctatttccagttcatcgttacttctagggtatagtcctttaatagtttccactgaaagcctagagtgccttctcttttatgggcacacaattcccaggtttttccttcaagctcacaagatttttcagaaactctcttcagcttcttggcttcttagctactgcttgcaaatcagcaaataacaaagaaaagctacttcagcactcctctctgaagttcctttttccctagcattttagccttcaaatctcctctgcctctgatgccttcaaggggactttaaaaaactttcccaacttttctaattgttcttggcaaggagattgctctccaacaagatagcctgccatcttcacctcctatcaacaccattagcagctggtgctgagctttaagttcttccagctctgctattgagaagtatgtcatttcaagtttttaattatttttgtgaactgttttcttcctctggaaagttttagaatattcactttattgtcagtattatattttctgatgatattccttggactatttatcctttttaatccagaaactggcatacttacacactgaaaactcttgtatttttttctctacttgttttctcattatttgtgtgttatactttcagaaaagattttcttgatttattttcttttccattatccatttctttcaatttttagttttttgcaatgagaaataggggatattttccctactttatcttccaattcatctaattaaacttttgattttggcatctatgcaaatagtttctaaggaatttcttgttcttttcttcctttttgtaatatcctttttatttttacttcatgggtctctctttctctctctctcaggaaaacattttttagagtttttgggctcctgcattgtctgtattcattctgaattcctttcttcatgcttttaaaaaaagtactgatctgtctcttgtaagtgaagctttcctcaaatgtctagtgcttattcattatccactcatatttaagaatgaggcaccaggctgggcacggtggctctcacctgtaatcccagcactttggaaggccgaggtgggtggatcacctgaggtcaggagttcgagaccagcctgaccaatatggtgaaaccccgtctctactaaaaatacaaaaattagctgggcatggtggcgcacacttgtaatcctggctacttgggaggctgagacaggagaattgcttgaacctgggaggcagaggaggttgcccggagccaagaccgcgccactacactctagcctgggtgacagagtgagactccgtctcaaaaaaaaaagaaaaaaagaatgaggcaccaaaactatcaggaggttttgtatgggagtgggtttggtcagctggtcagctgtactacagggtaatttggacaggtatccaactttttttggtgtggtattctccagtgtacatattttttctggagccattaagtctcttcagaaaaacattttcaaaccacttatctaacacacagcatcctgaagcaaacagctcaaggagctggagtttgcatgggagaatgtcttagcatttagtattttggctttcacttatattgtttttatgatgttccttttcccctgcctttttctgtgccctgtgtctccagatcaggagcctctttcttctatttctacacagaataaacctccaggccatgatggggttatggagaagttgcttgagggtattggatgaggcaagtgtcccaggggactggctgcctctcagccagcctttcattcatcaagtctgctctgtgccctgcactgttactggcacctgttatggtcttggatccatctgtgaacaaaataggaaaagaaacaaaaaacaaactgcttatgcagaatttacagtttactaaggagagatggtaataagcataaaaatgagtaaattaatatgttcaaaggtgatactgccttgatataaagagtggagcaagataaaggggattggaagcaccatggctgggggatagagggcagtggtggactgcaagtgatttttaaaactttttatttggaaataatttcaaacttagagaagagttgtaagactaagaatagtgcaacaacatgagatacacttttaccagatttacctgttgttaatattttacctcatttgctttatttgctcccctacacacacacacacacacacacacacacacacacacaaacacagacacacaatatttcttcttgaaccgtttgaggataaattgaatatattattgccccttatccctaaagacctccttaagatgttcttaagaataagaatattctcttaatcaaccacagtacagttatcaatgtcagtaaatgtaatattgatgtaatactttaatctaccttgcatattcccattttgtcatttggcccactaatgtccttgatagcattttccctcttccactatggtctggagaatcaggtattgccttgaattttcatgttcctttattctcctttagtatgaaacatctcaagcatattcctttgttttttcataaaactgacattttgaagaatataattcctttttaaaaagagattatcctgattttgtatttgtctcatgtttccttttgactagattaaggttttgcattcttagctgtaaaataatacctcataggtgatgctatgtccttctcagagtaggtcacctgcaggcacatgacatccagctgctcatcattggtgatattaatttcaatcacctaatcgagatgttatgcagaatttctccactgcatgctttactttttcttttcttttcctttttttttttttttttttttgtggcgagggtagttggagtcttgctctgtcacccagactggagtgcagtagcatgatctcagctcactgcaaactccacctcctgggttcaagcagttctcctccctcagcctcccgagtagctgggattacaggcacttgctgccaggcctggctaatttttttttatttttttagtagagacgggtttcaccgtgttgcccaggctggtttcaaactcctgagctcagacaatctgcctgcctcagcttctcagagtgctaggattataggcatgagccaccgcgcccagcctgcgtactttactttttcttagcaatgaataaagagtctatggggaggcacttttttttcatgtcaatatcctcctcttcaacgaaattttctcctagattcaacatccattatttatccttgcctgatccaatctttaccaagattttctaactgtagtactttcttcacataaacccattagaactcaatattcttttataagcaagaaccttccttcttatgtatgtttaatttgtatatatgtatttatcagcatggacttatgaatttcggatttattaaaggtatatgattcattaccatattgattttggtgataaaattattccatatttggccactgggagccacttaagtcgggctcctgttgtaactgcaattttaagcaagatgtttattaggcatcatagaagtgacctgctggaggtagagttagccacatggctatctagggtacaagggttctaaacagcagaatagttattacaaaggctttaaggccgtgagtatgcctgtttgagaaacagcaaggccagtgtgactggagcaaagtgactaaggtgtgaagtaataagacagggaaactttcattgcatttgccctccccacactcttctatatcctgtggtccagaagaaacattaaatacacccttatacccaccaacaaacgaagaagtaaaaactgccattaagccaacttcttgaatttattttgtatgttgtaaaatccagatagctacatatagatgtgtactttttgaaaatgtatcccatcagccagtgatagttgtatttccatggagattattccagtcgcctgtatttgaacaattatacaggatctgactgtaattagaaaaaggagatgggcccaagtcaacctagtacaagtttggatttcacattttaaatcattggttaaataaaaacaaagtgaagatgaaaatgtttcttttgttaaaaaagataagaaaatataaaattggagcttttattaatttatacatgtctcagagaaataatagtcacagagaagtagcagacagtggcatgcacttattagcttctcacattattatattacactggaaacatgggctgttactgtacagtgaaactagagtttaaggtggagaaccagattgacctgatgcatgtgtttatgagtttcacattgaaggtgcctggtttttgttgttgctgttgttgttgttgttgttgttgtcgttgttttctctccaaagaatacagcttagaatgagtgaggcaagctcaaatcatgtagctgtaactgtcaacttggtgaatttctgagttatcagaaagtgagactctgggcatgatgaggccataagtcagggaatatcagcaaccatcagaagctggaagaagcaaggaatggattctcccctagagcttcttgacacagtgcagccagggcatctttatttcagcccagtgatactgatttggcctccaaaactgccagagagtaaatttttgttatttgaagccacccatttgtagcaatttgttacagcagctgctggaaactactacattgccattgacacttgatcgctatttcagtacgaagacctgtgtatctgtcttgttcagtgatactgatttggcctccaaaactgccagagtgtaaatttttgttatttgaaaccacccatttgtagcaatttgttacagcagctgctggaaactaatacattgccattgacacttgatggctatttcagtaggaagacctgtgtatccgtcttgttcagtttgggggaaactttcatgcattatttctgtcatgttcccttccctccctccctgtcttttctttctagaactcacttgataggacattagttttcctgggttgggtgtctgattttctttccacctgtttatctctatgctttcagtggaatttttttccactcagtctttttcactgatatttttaaattgaagtataaatttttttttttaaatactactgtcttgaccaggcacagtggctcatccccgtaatcctagcactttgggaagccaaagtggaagaatttcttgaagtcaggagttcaagaccagcctgggcaacatagtgagaccctgtctctacaaaaaatacaaaaattagcctggtgtggtggcgcacacctgtagttccagctacttaggaggctgagacaggaggatcacttgagcccaggaggttgaagctgctgtgagctgttatcattgccactgcactctagcttgggcaacagagcaagaacttgtctctataaaactaaataaatttaaaaataaaaaaagaataccactttgtttactgcgtgtttcttttatatcccactcatcattgatacagtattttctcttagctctaagcaaattacaatttcgtctgattcttcattgtcttttcctctgagttttatatttgttgtgctgtctttcatgttagaggctttacctaatatctgtcaatctgttgtttctttatagtaaggaagtttttccccctgaaatcaatggatgaatgggaattatatttttaagttattagaataagttaaaaatgtgtaaatagaataaatgcatttgcagggcatttactctcataagactgagggagagcatatgtgtgtattgtggcttattgttacaactatctcctagattcattgaagatagaagttacgtttgtttcatagtctcctcattggcttgtagcaatttttcaaaagaaggaaggaaacatttttaccttacaataaaagtctgaaaccacatattttatggtgatctataggaggactaactggaaccagtcacagggtactgtccctaacagaatgtgcatctttcatgcagtaattatattttactagtggaaactacattccaggaaacctttacataaaggttttacaatgttgaaaataaaagatatgctttttacctttaaaaagaaaggtggaacttaattgagaatattatagaattatttcaaaatcagactgcttttaaaaaaacttcaacttttattttagataccgggggtacatgtgcaggtttgtcaaacgggaatattgcatgatgttgaggtttgcgatacagatcctgtgacccaggtagtgagcatagtacccaataggtagtttttcaatccccccatcctcaagtggtccatagtgtttattgttcccatatttatgtccatatgtgctcaatgtttaacttccttttgcaggtgagaacatgcagcatttggttttctgttcctgcattaatttggttaggataatggcctccagctccatccatgttgctgcaaaggacatgatttcattcttttttatggctgcatagtagtccatggagtatatgtaccatattttctttatccagtctaccactgatgggcatgtgggttgtttccatgcctttgttattgtgaatagcacaacaatgaacataagtgcatgtgtctttttggtagaatgacaaagttagtctttgatttaatggtgacaaatgtgcttaattacttaatgcaaactttgctgtatgcatttgaaaagcgtcagttagttctatcaattggaaatattagctgtacttactgaacaactgtctagagccattgagttaggtgaatttcttggttactgactaacacagagtatatgatcctcagtttcatcatagagcatattcagataccgtggaggcacttttgatggacaaaggctatcagcaatgctatccagtcccattagggaagttaagagtctccccagagtctgttgtcctttctctgagctctgcagaagctgagacctcagaagtttagtaaggcagcccgggcacagtggctcacgcctgtaatcccaacactttgggaggctgaggcaggtggatcacctgaggtcaggagttcgaaaccagcctagcctatgtggtgaaaccccgtctctactaaaagtacaaaaatcagctgggtgtgatggcatgtgcctgcaatcccagctactacggaggatgaggtggaagaattgcctgaacccaggaggtggtggttgcagtgagctgagattgcaccatggcactccagtctgggcgacagaatgagactttgtttcaaaaaaaaaaaaaaaaaaaagtttagtaaggcagacgtaaaaatcaggaactaaatttcggttattgctgagtctgggagataccatggtaccaccaggagggatgctacccttatgaacctgttctgtctgggagtaaatgggaggaggaaacccccttcagagacctgtgaggaagaaataaacatcagatatgtcttctttcctgaactaagcaggacagatcctaacctgttctgttatcaaagctgatatggggacttatacacttcagccatttgggcctaaccttttctctgtgagttaactgcttatattcccaaggtttagtctctatctcatggggtcttagctgccctaactgatggatttgcttcttaccacataaaattgaacaagaaagctgtactctttgccttccagttgacttcctagacgctgagagtgtcctggggcagcttctgtggcagaaatcccttgtggctggggctgtgctgtgtgccctatacatgcctctggctatgggcctttgcattatattattcatccttggcctgaaaccctgtcacggatacctttgcctcatcttagtactggtataaaatggcattttagtatatggaactgaagtatacatgtttcacaatatcttttagtaaagttaaatagggaataatttttttactggtttcactgaataaccctgtattctatcatcagcactttgcttgtgtactcagtgtttgtcaagaaaatttctttctgagctgcttttcaaaggttccttgacccttatagagaagaaattttgagtgcctatttagtatgtttctattttactcttcatttcccatgtcctgatacctctctaaatatctctcccactagactttatgatctctgaaggcagggactttgtcttgtcacccctgtgtctccagcactcagcacagcacctggcatactgtaggtactcagtatatcttcatgaatgaacaaatgaacaaatgaatgaacaaccagtagatctaaggaatggctccccctcccagtcatgctaggcctgcgcttttaaatattggggtttttaacttagaacagtcccagtgccattgccaaagatagtggtggggtgtgtgtgtgcttcctgacccatacatagcactccagctccaactttatgccaagtagcagtttcttgatcagcagagccatcctatcacattctgtgtagctttacctctaggaaccatgagaaaggcctgttattgccaaaggccatagtagtcatgtgagaattttgtagctatagaccttaaggtttgctattcactattcactgaattctgaggctacctggagaacactgtttaattcaaaataacaggtgcttcctaagagatagttgtactgcagagcagcaggtaaagaataatttgcagtgagcctgtgagcatcattgttttctgaatgagctgtcagtgattctaaatcagaagagcccaaaacgaagtggtttccacaagatttcaagctgaggagaacagcattttgcatccaaaataaaataagtgcagagaatataaaatgataaaagcttgagaagaatgggctataggaagatattgaagctaagtttcaggtgtttgtgcagttataagttatgtaaagacctctgcaaatatgcaaacattccttattattaacaaccgtgacatgaagattaaaagtattaaatggctttttttttcacattcaggtaattaaagtgtagaaaaatctctgccccagaggtctgaatataattcacatgaatggaaaatggcaaaagtggttagtttcttgagtaccatcttaactgaaacatactaaaatggcataattttgtttcagtaatcagtagttgaaagatctcatgctttacttcttaggatatggatttaattatttctggagctaaatgatttgagacacttgtaaagattagcccatatctaacaataatagtagtaattggttcaaccataagaaaattgcctccaaacaataacaattacaaataacttattttgtacgtaaatatatagtatatataaaggttaatggcatggattcagaaatcatcctgctttaattcatatctctgtcactttgtggctgaacctcagttttctcttcagtggaatgagggaacttcataaggtttttatgtgtattaaatgaaacaatatatataaagtgcataagtgtagtacctagaaaatagtaagctatcactactactgttaatccaagtacttccctgcgaggcatattcttatctttctgacatatgaagtttttaagacagagtagaaaatctcaaaaagcaaactcttgattaaaatataatggcatttgcagtttataaactgcatacttagtaaataagcttactaagcttgtgtttccagtgtgatcctaaggagaagaacacatggccttatgggaagaggagataaactaaactaggattacttctagacctatgttttgacagctagcaagtttatctttgaaggctgtctggttgacattgcatgttggctaagacatgccttacaaatattgcagtcacataaaaagagaaactgtgtgctatttttttgtttgttttctgcttgtacggtggagaagcaccctgccataaatacattgggtgggttaaactaataaacaaataggcagggtggcagtgataatgtttttttgaagatgttgaagtactatttgtcgcagcttcacttagtcataacacataggcaccattgctgctctcccagaaaaatggatgcatctgtaataagctatataaacaggtgaagtctttcaaggattttgaagatttactgtttttttaaagcctatttaatgaaacaggttgtgcacaatccacacctaagcaccatacttcttaccttgtggccatacctcaaattgtttcttagctccttttctaaaaaatgattacaacaataataataaattcaagaaaaataagcatcaaaatactttcctctaacccctgcaaatgtatccagtataaaaattcccagtgtgcatatttaccttcctgtactgttcaagaaaacacggttgtgcttcattatcaaaagttcattctggtagataacagaagagaatgtgaaatatgcgaaaatgttttcttaggatagaatgaattggctaacatgggagttctttttttaatgagatagtaacataagaaaatgtttggtcgtgtacacagatttggaaaccttcaccacacagctgtgttatcaaattaggcatacttccttgacttaggtgatttttttttttaccaatatgaagaatgaaaaatttttattactgtgatttatcaaatttggactgcaaatttcattgaaattatcattacaatatctaggaaaagtgtcacccagcaggtaataattgttgttctccaaaggcaagagaggaaaaccagtctcatcaactaagtattagttgtgataaggtctttggtcttcttatatttttacaaggcagtgacgcattcaatgtacatattagaacttccttattgttttggtccattcccattatttcagactgcattttaattctcaatttgttattgatatagatcaatcaaatataaccctgtggttgcttatatatttttagagtttcccttacatgcagttttgcttaacatgggtcacagtaaaggatcgtttataaaagtaatggattgtttcctgtttctgccagctgatttgatcaatctgaagttccttatgtactatgggttacataaccagtctggaatctgtgtggtacattcttctagtttggtattaactgaattaatcatttatattctttaaatcattgaggacattttagtaaacacttgaactgctctcttcttcaagtactctgctccagcaatactgttcacctggctcttactcaaacacaccactttagctttctatggcctctgcacatgctcttccctctccccacaaaatttatttttccaagcatctcttagctcaccccctaactgcctttgcacaaatgtcacctttcatcaaagcctttcctgaacaccctatttaaaactatcccaccacccctagcaatttctagtcctcttttattattttatctgccccgtcataggacttgtgacttactaccatcatacatatttgattcaattattatttattgcttaaattgttatgatcatttattataaatcatgtattacagctaattaacatacatatgctcagtcatttacttgattagttattagcctcaattatatcttattttttaatatatatttttatttgacaaatagaaagtatatagattggtacaatatgatgtttggaaataagcatatattgtggaatgactaaatcaagctaagtaacttatgcagtaccttacatgcttatcttttgttgtgataagaacacttgaaatctattctactgtcttagaaatttaaaaatgggcaaaggacttgaatagacatttcttcaaaaaaaatgcaaatgaccaacaggtatatgaaaaggtgctcaacatcactaattatcagagaaatgcaaatcaaaaccacaatgatatatcacctaacacctgttaagatgtctattagaaaaacaaaatgtaacaagtgttgataaggatatggagaaatagaaatctttgtgtgccttgtacactgttgcaagagcattagtagaactactttggaaaactctttgtaattatctactaaagatgaatatatgcctactatatgacccagtgtttctactttgaagtgatacagccaacagaagtacatgcatacatgcaccaaaagacatatacagaaatattattaggacttctggtttccagttccacatgtagggagcttagaagttgccactccaaccctaacaagtaaaaagctaagcaaactgagaaatcaattcttatcggacccaggataggggaggacacagggaaaaccactgtccccaaaagactagagagacagactggcaaataccgagagccacaagttactagagcatgcagtcacaaacagaaacccccacaggaagcagtgccatggtagaaaaacctgagctgtaattgatgaattataggaggttcagtatgaacaactctgaaagttttaaactccaggaggacccactcatggggaaacaccacaattttgttagacttacctacatgagctcaattagattctccaagtaaatattgcagaaaaatccctatgtgcttctggcagggggaaggtgaaatgaaccattttgaaatatgccagagcactgtgctcttcttaacaaggtctgcccccaggagaaattagttagctaaatcctaacctgctggggtattattagagcctgacccaagggaagggaaatacctaactcttgtcagctctaaccttctgcatcagagaagggaaatactaaactccagacaactctagccatcctgtcctaccaaagaggggagaagaatactgaggaaacacttagaagtttgtacaccagaggcatatgcttactaaaagactgagacttaatcataggatgatagaatgtctcccctcccctttcccccacctaactgctacattgctaaaagctgatttataaaagttccttttacctggtacatcatgtccagctaccaagaaaaaattaccaggcataccaaaaggcaaaaaaaaaaaaaaaaaaatctgaggagaatagagcaagcttcagacccagacagatagggattctggaattatcagatgaggaatttaaatccactatgattaatatactaatggctataacagataaagaaggcatcattcaagaataggtagacaatgtaagaagagagatggaaatcctaaggaaaaagcaaagagaaatgctagagagtaaaaacaccgtaaaataaaaatggctttgatgggcttatcagtagattgaacatggctgaagaaagagtctctgagcctgagaatgtctcaacataaacctccaaaattggaaagcaaagaaaaagactgggaaaagaaaaaaaaagaataaggactgcaggacaactacaaaaggtgaaacatatgcataaggggaatactagatggaaaagaacgagagaaagaaacaagaaatatttcaaacaataatgacagagacatttcttaaattaatgtcagacatcaaacttcagatccaggaaactcagaaagaaaataataggggtttgaaactcagatctccataaagaaaagaagagcatcagagagggaataaacaaagactaaaatgttcatttttcttattcttaattgatctaactgataagtttgttcaaaataataatagcaacagtgctttcgattttgtatgtttatatgttatatgtatgcttacatataagtgaaatgaatgacaacaacacaaggagcaggagggaagacttaggattattttgtttttgtatgatacactacttataaagtggtatagtgttatttaaaagtggacttgggggtgcagcgcaccagcatggcacatgtatacatatgtaactaacctgcacaatgtgcacatgtaccctaaaacttaaagtataataaaaaaaaaaaaaaaagtggacttggactagttgtaaatggatattgcaaaatctagggcaaccactagaagaattttttttttttaagtataactgacatgctaagaaaggagagaaaatggaatcacataaaatgctcaattaaaaccacaaaaggcagaaaatatgtggaagatgaaaatagaaaataatgacaaatgtggtctatattaatttaactaccagtaatcactttgaacatcagtggtctaagtgcaccaaataggcctggtgtggtggctcacacctgtaatcccagcactttggcaggctgaggcaggaagatcacttgggcccaggagtttgagaccagcctgcacaacatagggagacagaccatctctacaaaaaatttgaaaaattagccaggcgtggtggtgtgtgcctgtagccccagctactcagaaggctgaagtgggaggatctccttgagcctgggaggtcaaggctgctgtgacagagtgagaccctgtctcaaaaaaaaaaaaaaaaaaggaaaaagaaaagaaaaagaaaagcactaattaaaagattgttagagtggatcaaaaaacaagactcaactgtatgttgtttacaagaaccccactttaaatataaagacacatgtaaatgaaaagtaaatggatggagaaaaatataccaagctaacactaatcaaaagaaaacaggagtagctatatttcagacaaggccgacttttcaaagcaaagaaagttatccagaataaaaaaggtaattacgtaatgataaagaggtcagtcctccaagaagacataacagtcctttacatgcatgtgcctagcagcaaagcatcaaactatgtgaggcaaaaactgatagaactacaagcataaatatatgcatccactatcatagttggagatttcaacacccctttatcagaaatggacagatccagcaggcagtaaatgggtaaagacctagttgaattcaacaacaccatcaatcaacttgatataattgacgtctatagactacttcatccaacaagagcagaatacacattcttctcaagatcacgtggaacattcaccaagatagaccacattatggtccataaagcacaccttaacaaatttagaatagaaattatataatgcctgctctcagaccacagtggaattttactagaaaccaataaaggaaagataactggaaagtcccaaaatacatggagattaaacatggattagaaaagaaattccaagataaattgagaaataattttgaactaaatgaaaatgaaaacacaacttatcaaaatttataggatgctgcaatgagccaggatcgtgccataaaataaaattaatatatcagagatgtatgtactccatgtccattgaaacacccttcacaatagcaaagttaacagaatcaacctaagtgtccatcagcagatgaatggataaagaaaatgtgtatgcactcaatggaatactgctcagtcttaaaaaagaagttttgtcatttgcaacaatgtagatgggcctggagaatattatggtaagtgaaataaaccagacacaggaagacaaatactgcatgtcctcacttatatgtggaatctgaaacaacagaacttataaagtggggagtagaatggtggttactagagtctggggtggtgggcagtgggagaatgaggagaggaatgttagagggtacaaagcctcaaatagacagaagtaataacgttttttcctttgggatatattgcacagtgcagtgagtatagcaaaaacagcctttataacaaatgatgctggaacaactgaacgtccatgtgcaagaaaatgaatctagacacagaccttatacttaccacaaaaaccaactcaaaatggattatagctctaaatatgaaacacaactataaaatgactagaagataacataggagaaaacctagatgaccttggatatgatgatgactttttagatacaaaccaaaggtacagtccctgaaagaaataacagataagctgaacttcattaaaattaaaaacttctacagaaagcagggtcaagagaataaaaagataagtcatagactgagagaaaatctttgaaaagacacatctgataaaagactaatccaaaatatacaaggaactcagaaaactcaaaataagaaaaatataaaacctattttaaaatgggccaaaaaccttaacagatacctcaccaaagaagatatacagatgacaaataaacatatgagaagatgctccacatcatatggcatcaaagaaatgtaaattaaaatgacagtgagataacgccacacctgttagaatggccaaaattcagaacactgacaataaatgctgaaaaggatatagaaacagcaggatatggagcacctctcattcattactggtgggaatcaaaatagtacaaccaccttggaagacagtttggtgatttcatacaaagctaaacatattcttaccatgtgatccagcaattgtgctcgtaggtatctacccaaagaagttgaaaacttagtgcacatgggcatttatagcagctttattcataattgccaaaacttacaagcaaccagtatttccttcagtaggtgaatgaataaatacactacggtacattcagatgataggatattttttagcattaaaaagaaatgagggggcctggacatggtgggtcacgtgtgtaatcccagcactttgggaggccaaggcaggagaatcatttgatcccaggagatcaagaccagcctgggcaacacagggagaccctctctctacaaaaatataaaaaatgagccaggcatggtggtgcacacctgtagtcccagttacttgggaggccgaggtgggaggatcacttgcactcaggatgaggctgcagtgagctgtgattttgcctagttataggctgagagggtggtgagtggtggttcttctcactctgaagagatctctagtcattctaaaacccattcatttgtcattactatatagaagagacaataagtaatggacctatcctttaagaaaacctctcatcaaagtatgcttctttattgcaggtaattcgtgcctttctgctctttccaacaattgaacgaatgtctgagtcacccaatggcagaattgccactccacttttgtgctggtttcgatatgttctctatgttactggctacttattattgaaaccgtgtcctgagacaatcaagtccttgctaatcagaaggggccttcaagtaatgaacctagagaatgaattttcaccattgaatatattagaaccattctgccttggtaagcacagattttaaaatgtgtatgtttattcttgtatcacaaaatgtttacacaatactctctgacagtggacaaatatcaagcaagcaattatttactagtttttttttcctcttccaaaagtttaaaactagaaataaataaaattagaaatagaatgaattttttcataagaaattagaaaagcctcatcaagctttaattttaccttatgtttctgattcttcactctagctgcagcacagtgagaaacacttcttccgcatatagtacatagtatatatggagtccctacaggaatccttggtgtgcctgttagcttagtgggagtactttacgaaaaacagcacaaggacacaaagcctaatattcttgtagagttaacaggttgtttttattttcctcctttaaatgttttgggagaatttaaatcatagaagtaataaatatttgtcatggtaatgtattttaatactgggtgctttgctgatttttatgaatatgctaggaaatgtttttgtgactttactttttggcttcaaaagttgttttaaaatgtagtctatctttttagatcatactattttatactacatttataaatgactttcataataaagtaatcctagtttcttaatctataatgtggggataacaatactccgtacttcaaaaggttattctagtgttaaatgtgataaaatatccaaagcttctatctagtattttatttataaccgacctccaatgaacgatgtaacaattagttgcagcagtagctgatggcactttctaagcttttacctgtgttcctcaaaagaactaataaggtttagtattgctattgtccccattttagatgaagcaactgaggtacaaagaggttacatgattgcccaaagttatacaactagtatgtagtgttgaaacccaggcattctgccactgtattgcatttcctttcaccatagctggtgctgttgcccttgttaatgataacagcaggactcctgaataaagttttccatgctcagctgtattaagaatgccataaggtcacatgcctaatgaactagaaacaagttaacagccctgcctgttcaattgtgcagctgcagttcatatgggaggtgtttttctaaatatgtaacaagaagcagtcctcaaaaatacaaggttcagtatatttgtcctattgatagattttttcccccttccattttccctccaatttccattctttaatatacccttagcatagtggtttaaaaagatgagataggaagagggaaagcaagggctaaggacagtcatagaaattgccagaggttgatgttggaaatatcccttaaagaccatttggtccaactcctcatctctccaccatattattaaggaaaggggtcccgatccagaccctaagagagggttcttggatctcgcgcaagaaagaattcagggtgagtctgcagtgcaaagcaaaagcaagtttattaagtaagtaaagtggtgaaagaacagctcctccatagacaaagtaggatattcctgaaaataagaggagggatgcacccaccctaggtacaatgcttatatatatagggagatgtgttctgctacaagggtttgtgataaaggattaattttcttaattactgtattttgcaagaatctatatattattattattattattattattattattattattttgagatggaatctcactctgttgcccaggctggagtgcagtggcgcgatctcggctcactgcaacctccgcttcccaggttcaagtgattctcctgcctcagcctcctgagtagctaggactacaggcaagcaccactgtgaccagctaatttttttattttttttagagacagagtttcaccatgtaggccaggctggtctcaaactcctgacctcgtgatccgcccgcctcagcctcccaaagttctgggattacaggcatgcgccaccatgtccggcccaagaatcgatatttttatcttaaaagcaaaattaggaatgcctttgttctccagatatcaggatatctggacactcccaagtctgagtctgttttagtaaacattattaatttgttcccttaactttaaacatctagaggctcggaatgccttactttctgagaatacagtccagcaagtttcagcctcattttcctagcccacactcaaaatgaagtctctctggttcacacgcctctgaaaatattatggaacagatgcctactggtgaaaatagtactgacaggaagtcacaaaccctcaactctcattttggttctgccctagagtcactctgtggcttttgtttagttacttcccctcgttggttttcagttgttgactaaatcaagagttagggccagtctacctttggaaattacttgagacccaatggaatcaacatttgaaattctggcaaatatatgtaaaactctccacatatactttgataagatcattttacgtctctttacaggtttgtttgtctctcccagccccttgttgctttttgtcattttctttttgccttgtagaatgtattttataaagcattcttcagttatggattccattttcctcctgggacttctgcttccaggaagatagagtaaatggactttccactatttctcctgctaagtactaaaaaccatggatattatctataaaacaacatcaagaagactatacaaggtagagaatagaaagcaggctatgtagggactttgggacccaaggaacaaacacagtggtgagttctctgggttttctttttaccacatatatcctagatttggagccagcaacccagaaacaccaaagagtagagacttttaaaggtcctaacaaaagcctactctctctagcccaaagaccaggaaaggagcaatgttttatagagtaggaaaaaatagtcttctccctactttgtatagttcttacttggggcagatctttgttacaaaagacagattaacaagaaaaatgtataaatttattaacatttatatttcatatgtacatgggagatacccagagaaatgagtaaatctcaaagaggtggcttctgagttcagacttaaataccatcttgaactaaaacaaagaaaagaggtcagtaatgggaggtgaccaagaaaagcactgcacacaagacaagtttgttgtgcagatttaagttagtgccctttgcgttgataatagagtccatggtgatttagaatcatccttcatggtacagagaggaaaacacccatacaaatggaaatgtcctttatagatgtcaatttccctttaaaaagggaacttctccatttttagagcttctcctgtgtcttcagtttctcaaaatactcagtttaaaataatccttttgcccaagacacatctttagggatggtatattttggtcccctacagtcattttgcagcagtgtattctggttttcaatactttctttctttattattattattatatattttttgagacagagtctcactctgccacccaggctagggtgcagtggctcaatctcagctcactgcaacctccgcctcctgggttcaagcaattctcctgcctcagtctcccaagtagttggaactacaggtgcctgccacgactcccagctaatttttgtatttttagtagagatggggtttcaccatattggccaggctggtctcaacctcctaacctcaggtgatccacctgccttggcctcccaaaatgctgggattacaggcgtgagccaccgcacctggcctctggtctttaatactttctaaaagaaacatttagacagtaactgctctactctactccagccatttccagtcatgcctgcaaagattgagtggactttaccctctccccagcagtaatgaagcaccccctctctttccctgctctacggtactgtcccagaagaggctgagtagagagcgaagactttcatcactgccctgcagtaatggggccaccatcaccactacccccatattatcagtaaaggtcatgtggggagaagtagcaagggactcaccacttgtcccagccaagatggtaacagtggaagcctagtacagagtcagaattccttcccctacccagcagctatgaggagccccttcatcccttgggtgtcaacagaagtcaaatgggtaacttagactctaccctacgtggccatagtgaaaaaaacatctaaaacataaagtttaagtaagatccagaatctcataacataatactcaaactgtccatgttttagttgcaaatcacttgtctaacaaaatctcaacttgactggaaaaaaaaaatcaatgccaacaccaaaatgacagagatattagaattatctgacaataactttaaagcagccactataaaaattatttaatgatcaattaataaacatgtttgaaactaatgagaagatagaaaatcttaggaaagagaagattaaaaaaaaactgagtggaaattttagaacaaatttaaaatctcaatggatggaaccaacaataaaatgaggagacaaagaggaaagaatcagtgaatatgagattagattaatagaaattatccaatagagagaaaatagactaaaaaggggaaaaaaaggaacagaacctcagggacctgttggactacaacgaaagatctaacatttgtgataacactagtcctagaaatagagagtaggtctggaaaagtgttcaaagaaataatggtcaaaaactcccaaattttgcaaaagatatgaatttacagattcaagaagctgagtgaatttaaaacagaataaacccaaagaaatctatactaaaacaccataaccaagcttttgaaaactaaaacaaagaaaatgtcttgaaagcagccagaagagcaaagcggtacattattcatggaagaaagtctgtttgaaggacagctagtttttcatcagaatccatggagacccaaaggaaaatgacaaaatgcaaaatgaaaataactattaatccaaaattctgtatctagcaaaagtgtctttcaggaaagaaggggaaatttaacattctcaaatgttgaaaaactaaaagaacttgtcaacattagatctatcctaaaagaataactgcaggaagttctctcaacagagaggaaatgataaaagaaggaatctgggaatgtcaaaaagaaagaacagtgaacaagttaaaatgtggacaaatgcaactttcttcttctcttgagatttctaaattatgtttaacagttaaagcaaaaattatagcactgtctcttatggttctaaacatacacagaggaaatatttagggaacgattttataaatgggggagggtacagggacataatggcaagtaaggtttctacactttacttgaactgtaagatgtaaccatatgtacatagtaataagtcatgtatatatgtaatgtagtacctagaacagccatttcaaatgctattcaaaagagatactcaaaatcaccatggatagatgaagatggaattctatatttagaaacacattgattggaagaccagaaaaagaactcagagacatgacagagaacaaacagaaaacaaataataaaatgatcatccatgattatattgaatgtaaatctaaatatacaattaaaagaaattggcagggtagattagaaaacatgactcaattgtatgctgtcctcaagtcttagtttaaatataacaatataagtaggttgaaagcaaaaggatgagaaaagatacattatgcaaacatttataagcaaaggaaaccaggaatagctttattaatatcagataaagtagatttcagtgcaaagaaaattacctaatagacatttgtagaacacttcacccaaaacagaattgatatcaacatgttgatatcattgaaaccatacagagtatgttcagtgaccacagtggaatcaaactagaaatcagcaacagaataacaaaagttagatctttaaatacttggaaagtaaaccgcacacttctaaacaactcatgagtcaaaaatggaaattacaaagaaattcaaataatactacatgtaattaataaaactatagctcacaactgtaatcctagcactttgggagtctgagatggaaggatcgcttgagcccaggagttctagaccagccagggcaacacagtgaggccctgtctctataaaaaatttaaaaattggccaggcactgtggctcatgcatgtaatcccagcactttgagaggctaaggtaggcagatcacttgagtccaggagttcaagaccagcctgggcaacatgatgaaaccccatctctactaaaaatacaaaaattagctgggcatggtgtcgcacacctgtaacaggtcctagctagttgggggactgaggcaggaggatcccttgagcctgggaagtcaaggctgcagtgagccgagatcgtgacactgcactccagcctgggagacgaagtaagatcctgtctcaaaaaaaaaaaaaaaaaaaatagccaggcatggaggtatagcctgtagtctcagcttctttgggcaggctaagatggaaggatcacttgagcccaggaggccaaggctgcggtaagccatgatcatgccactgaactccagcctgggtgacagagtgaaagcatctcaaaaaaaaataaaattattaataattaataataaaactgaatcaaaatgaaaatacagcatattaaaatttgtgggacacagctaaaacagtgatgagacaaaaatgtatgctggtgtcagaaatgattacattagaaaagaagaaaagtcctagtaacctaagcttcaacctgaagaacctagaaaaagaagagcaaaataaacccaaaaggaggaaaaggaaagaaataacaagaatagaaattagggttaggagcagtggctcacatcttgaatgccagcactttggaaggctgaggcagaaggtttgcttaaggccaggagtttgagaccagcctaggcgacatagtgagaccctgtctctacaaaaaaaattgaaaacaaaaacaatagagaaaatcaatggaagaagaaagtggctactttgaaagagtaataaaattgacaaacccctagcaagactgacaaagaaaaaacagctgaagacacaaattaccaatatcagaaatgaaatagaaaatatcaccatagagcctgcacccatcaaaaggataataaaggctactgtgaacaactctacacatataaatttgacaactggaatgaaataaaccaattcttcaaatgtggacacactaccacaattcatccaagatgaaatagaccatttgaagagccttataactttgaaggaaactcaatttgtaattttaaaacttccaaaaaaagacatttagaggctcagatgatttcactgaagaactatacctaatgtttaaagaaatactaacacaattctacctattttttaaatagaaaataggagggaacacatcccaattcactttttgaagctagtattatctaatatcaaaaccagagaaaaataatacaaaaaaagaagaaactacaggccagtatcccctatgagtatagagacaaacatctctaataaaatattagcaaacagaattcagcaatatataaaaagaattatatactattctattaccaaatgtgatttattccagggatgcaaggctagtatgatattcaaaaatccattaatataatctaacatattaacaggctaaagaagataaaccacatgattctatcaaccgatgcagggaaaaaaaaatattttgaatgcttttcttctaagactagaaacaagacaaagatgtctgctctcagcactcttattcaacatagtgctggacgttctagtcagtccagtaaggtaaggcaaggaaataaaagatatacagatcagaagagaagaaattaatctcgtttgtagatggcatgattgtctgtagagaaaatcccaaggatggttctgcggctctgccagggaataaaaatatatcaaatgattaaaaaaaaaaaaactaaaagaaaaaaatgacaatcccaaggaatctaccaaaaacaaactttgagaattaatacaagttcaacaatgtcacaggatacaggataagcacaaaagtcaatattatttgcatacactagcaatagaaaccaaaatttaaaatataatgtacatttttagccagtcggaaaaattaaattgttaggcataaatttagaaaaacatatacataattatatgctgaaaatgatgactattaataaagaaatgaaagaagacctaagtaaatggagagacatactgtgttcatggattggaagactcaacatagtaaacatgtattaatgcactctcacactgggtaatttataaagaaaagaggtttaattggctcacagttccataggctgtacaggaagaggcatccacttctgcggacgcctcaagtagcttttacttatggcagaaggcaaagtgggagcaggcgtctaacatgggaggagcgggactgagaaagacaagtgggagaggtgccacacactttaaacaaccagatcttgagataactccatcattatttctataacagcaccaagggggatggtgttaagtcatgagaaaccatccccatgattcagttacctctcaccaggtcccacctccaacattggggattacattgaggacatgagatttgggtgaggacacaaatccaaaccatatcagatgtcaattcttcctaaattgatatgcatattaaacatagttgctatcaaaatccgagcaagatttttttgtagctatcgacatgattattctaaaatgtatttggaaaggcaaaggaataagaattactaagacagttttgtaaaagaagaataaagtggaaggagtgagtctgtctggttgcaagatttattatgtagctacagtaatcaaaactttgtgatattgataaagggattaatacataaatcaatggaacagagaagagaacctagaaatagacccacacaagtgtgcccaactgatttttgacaagagggcaaaagcaatttgataaaagaggaattgccatttcaacaatgttgctggagcacttggctcttcttaggccaaaagaaaaaaagaagaaggagaaggagaaggagagaagaagaaaggaaggaaggaaatgaacctcaacctaaactgtaaaccttacaccttataaaaaggttaactctaaatgagccatgaattttaatataaatcttaaaactacaatccttttagaaaaaaagaataaaatattcaggatcaggatctaggactaggcaaagactagctgggtgtgatcacagtgagatatcattacacacctatcagaatggctaaaataaaaaaaatcagcaaccataaatgctggtaaggatgcagagaaactggatcactcatacattgctgctgataatgtaaaatggtgcacccactctggaaagcagtttgacagttaaaaacctaaacacgcagctaccctatgacccagcagttaacactcctaggcattcatccctgatatgtgaaaactggtgttcagagaaaaacctgtatatgaatgtttattgtagttttattcataatagccaaaaactggaaacaacccagaggtattttcaatgggtaaattattaaacaaactgtggtaaagccataccatggaattctacttgataataaaaaggaacagacttttaatacacacagcaacctgtgtccatctccagagaattatgctcagtgaaaaaaagcaacccttaaggtttacatactgcgtgattccatttatatagcattcttgaagtgataacattatagaaatgaagaacagattagtggttgccaggggttaaaaattaaagatgaaaatttagctaggcatggtggcacacacctgtagtcctggctacttgggaggttgaggcaggaggatcgcttgagcctaggagttcaaggttacagcgagctgtgattgcaccactgcacttcggcctgggcaacagaggaagaccctgtctctttaaaaaatacatacatacatatcctggctgtaacattatactgtggttttgcaagatattaccatgggagaaactgggtaaaaggtacatggatttctctatattatttgttacacctgcatgtaaatctacaactatcttaaaataaaagttgaattaaaaacaaaaagcattctccagctagggataccactttcctccctgggataggtgttcccctcatcctgacggcctgaattaggagctccttgtccttgagacattgagaaggttgaggacccagagtcccagggctgaggacaccattagatatgcagctgtacttatgcctctttagaaatattttctaaactcaaatcaggacatgggatataaattttatacattttttaaatttatatatgaaaagtctagctatgacaaattattcttaacggtatatttactaaatacataatatgtcacatataacatataatcaagtgcttaatgtttttaattaaaacaggaaattatgtaaaggtattttccactttttctgcatcagagttatatacacttcaggagaagtaggctccaaaagctgcacttgaaagaaaggactcttccttttaattgcaataattgacctcctactgcatcttccaggagactgaagtttaggcagcagggagcaagacagtttaggcataagacatatttccctccccaatccaaggcaaccagagttttatactacattgttgcttgaagaaccctgggcttcctttctcacacaaccctgatatatgaaatacattttgtaaatcagactgaacattcagctacatgtcttcatctctgttctaaataacaaactagcaaacaaatttttggagcacagtcctcctatttcttacatcctttccttttctgatcttttaatcccttggctctaatctggccttctgatagccaaataactactacttcagtggtctctgatttttttttttccccataacctacccagtgtgtgtaaccttgggtaaaggaaaatgaggcagtagttagttacctgtcttctttcttctttgggttattggttcattccctgcttgggttcatagttcacttcctagtagccagcctcttccctctagatccccagtgccacccctgcctcctcttgcaataaccctcacagaagctgccttcgcccaggcttgcccttaccatcactatggtgattcctagtaccttgcttcccacaaagagaaagtcccaactgagagagcaacactcaacagaagactttgggagatgatcagtgggctctgctagagtttatactccatgaatagtggacataactaatgttcataccagctacttgcatcggcataattttcatggttacacaaagagaggggttatcaagggaaaagaagatcaggtcagagatcattcccagctgggaatctggtccagctggatatttccccctggcccccacagacctgtttctctgtggcttgactatcatccagacaacgaccttttaacctgccagcatgccttttaggaggctttgcagtgtttgcagattatgtaatgtctgtgcttcagtagaaatcttacggaaacaaatggaggaagtttgctagtccaagcagtggataataaatcctgccctatctagatagaaactggttttctgtatcctttagtttatacacacatttttgttgttgttgttgtaagctctgaaaaattctaggaaccaaaatattcaaatatttcaaatcctgctgcccttttggcaaagatggcacatcctttcctgtaggcttgagttctggggcattagcgttcttctctagtatgagtgagtgaaatgtcatttcctatccagcattcagagaagagtagccctacatcagttagtgtacattataaactttaccacagtgttcatcaatgtcattttgttaactaggttattttaaatgttatttttaaagaacatatatggattttttcttcagttttaattctggaatgtttgctactctgtattttctttagatgttcttccacttcatgaaaaataggcttttcactgagacagctaagttgattttctgatcaaagctaaaagaaaatacgtcttagttcagcagtatagcaagtcaaaataattaactttaaaaaatattctagggtcttttcgttagttaggccaaattgatattttatttcctttcagttacctaactagaaaaacatagcacagagacatagggaatttctggtagattacattactttgttgaatatattcttgtaaaataaattttcataattttttcttcccttaatatggaattagctttttaagatataaaatgaactattaaatgagatgacaacataagcatttgcatcactaaagaatcataaatttcttctagaatatttttaactcaatcccagaataatttttgagtaagacgaaaccagactctcatgttaccttacctattctctcatttatctgagcagcttatgaaaatatgtttataaaacccaactgtggcttttatttatttatttatattagagacagggtcttgctatgttggccaagctagtctcaaactccaggcctcaagcagtcctcgaccttggcctcccacagtgctgagattacaggtgtgagccgtcatgcccggccccagctgcagcttttaatgattcatgcaagtataacctaaaattcaggaatgaaggaaaaggtttttttgtttgtttttgtttttgtttttcggtcagtgttaggatttaggacaagaggtgattagtgtggtactaggatataatctctggtttagaagttaatagcgcaatgaatatcttattttttctaaagaaatttttatatttcaaaattaacgccagtctaaaaagttgcattattttttaaaatcatacaacacctccagttgtttttcactttggtgaactcagtgtcgcttaggtaagattatctgtttgcagactaaattgattatcgtaatgaccacagtcctggcttatagagaaatacataataaactatgttgactacgaaacatttctccaaattatgcagaaagtttagaatgggagaattatttttttaggtctagttttcactttgttgcaacttggcaccattggaaaggtggaaaacaacctggaaataaataaataaccgctgaagaattttcccttggaagaaggtttcatctgggtttctaagactatctggtcctacttaaccttttgacaaaccctgctggtatagcctttctgagtacccagccttactctgcctacagctgtgttggcatgtggggctgctcatgtctccagaatcttctagtcttgcagctcgtcctcaaccctaaattttgttcccacacagccctgcttgacttgaaccttcctaacttccctacactcagcacatcttgccagcctcaggaatagtcagaatatgtgctaggaggagctttcctgtgaaaggctctttttcagtcagctcctaccctgcctcctctcaggcaagccctggatatgtgcagatgccactttctcccccactcaagtaccagagcctgataggcagttaagcacatcagcccttgtgctgtgaccaaaaacacccagaatattcaaaggccctatttctattcacttttatcatctgggattgagtttgactatagataacagaaaaccaaattacagtggcctaaacagatagggatctatttttctcatgtgccaagaaatccaggcataggcagtccagaggtaaataacatctcaacagtgccatctgggacatgggtcgtatgtttctactctgttgtcctttgcacatcacataaacctttatccttgtggtcatcatctcatggtcacgtcatggctcctgcaactctagacctcatgtctaacattcagccagaaagaaagggaaaggggagaaaggcaaaaggcctactcctgattaggctttggcttatttaaaaagagaatgtcctccctaggaacttttagattagtagccaaaatatcccttactctgaggaatagagaaaagccatatgttttgatttccccatgactcagtagagtcaatcaagggaaatgaaaatttttgttggcttttaggtagttacattgcgtctactacatccacactgcaagatggtcttgagattcaacatccatggacttaatctcagaatagcccacctaccaaacactgaggtaagacagtcagtccaccagaactaaaatccatcgttgccatgttcctgcagaatgccttcaggcgttgtaacccttggcaagataagctcacagtgaggtctaccgtttatttcttaattgtgacaggtcttcttcaaatcttgtctaaataagtacccatccacagtagagctcatctcagctcccaagattattgtattttttattttaaagggagttttaaaatgtttggcatttcatcggtattaatgggcttactaatgattattctcctcagccaccccccatcatggtgctgaatctaccaaagccttttcctaacctgtcaaaccttttcatgagtactttaagaaagtgatttttccttgtaaacgtggtggtatattttggacatgtagaatctgtcagaccttttaaataagatcaaagtgactagaagtagtatctcagtcaccatagaccaagagtaaaactcacatatatattgcggtatatacacccacaatggttgatttcctacctcccaaattcacctgtcataatgaaaccatgcccatctcctgtaattccccttgcttcagtaccaacaagtccctctcctcaataatggcaaagccaaacaaactggggcattctaatatgaatcatactagtggtactaggctacgtaccaccaaaacagcagcacaacttggcttgccaccttgcagttctactttagaaaactatttatgcatcaccttccattttatgattagttgtggtttaaattgcctctacattgtctctggctcttataactagtgtgtatgtggcctagtttctgactagtcccaacaggggctgttagacttgtactctggccttcagttattcatctcacttttataccagtacctgccagcttggcttaccagtgtcagtgtgcttcagcctctagttctggcctccatcatgatgtcagctcttggaccacttcctccccaccccgctttccaaagcactagctgagtaaccttctctgtcagtctcttcccatttatttcacttaacaacccttccttactgatacctgctgtgagctaactgttcagataagcactggagagaataatgaatgaaatatagttcctgcccttaagttacttacagtgggatagaagagaaaaaatatgaagaattttaatatatcatagggctatcataaatcagatacaaggtatgaatggtaatgagaaaggagagatcagttctattaatacctaggtaagtaacagaggagaagatgaatgaatttggacttgaaggtgagttgggatttttccagacagacaaaatggcaccaggataggcaattagaaggcagccttctgttatggattatgtgtacttggagaattgggtgataacatttgacctgtgagatgaatgccctattggtcttccagctttagccctcactcggctatttcaaaccttttagccagcataagttaaagttgtatagtaatttttggacattaagcaaatcttagaaaataatgttagtaaataacattagactcttcaattagtcttttttatacctgtgtttaatggagcaaaagtaaagaattaacattcttccaaatcattctctttccttcatgtttttgtttccattactactgctactagacatttccttcactgtagtgcttgaaattctgagttctgctggatttccaggaatgctgttgacagtcattgccaagagaaatgtgttttccacttaggaaattacacttctatttggtattattatttctgaccactatgttgtattatgagcatttctgaggaatgacaaagatggcttccttggagcaattactggaaaagaagctggtgttctattaaaaaaaatatatgcttagataggaaattaccaagaaataaataagggtaggaataaaggtgggatggagtacattccctgatgaaaaaatttactttcagaaaataggactccttacaaattatttgaatttttaagtttttttttaatttaagaatgacaaaaaagtacttaaaacataaatgtgtcccttcatgaattatcacaaaacaaacttctattaactgccacccactcaagaatcaccattgcccgagtctcagaagacccccttatgcttctgcccatctcacttactccattttcccaaatgtaactactactaacatctagatgtacctggttttggactttaaataactggaattgtataatgtatacttgtttgtgtctgacttctctcagtcaacattgtatgttgcaactttaattatttcatttttattactaaatacttttccactggatgaatgcactacagtgtatttatttattctatgattgatgaatacttgggttgtttccaatgtggtactactaaaaataatactgtcaagagcatttttatgcttgcctttcagtgaacttatgcacatatttctcttgggtccatccagagaggaaatgcagaggtcatatggtatgcatatgtttagcttcagaagacaatactaaatggtttccaaagtggttgtaccaatgtgtactcccaccagcaatatatgagtttatgttgcttcatttgctcaccaacacttggtattgtctgtattttttgtttttgctatgttttgtaatttgggtcaatctagtaggtatatagtgccatctgatggtgttaaggttttctaaaaaatattttgagattgttctttttctttgattacataatagttgtacatattttagggtacatgtgacattcgaatacctgtatacactgtgttatgatcagattagggtaaatggggtatccatctcttcaaatatttatctttgttttaagaacattacaattcttctcttctagctattttgaaatatacaattactataattttcccactgcattatcaaatacaggaacttatttcttatatctgattctgtttttgtaccccttaaccaatttctctcatctgttccaccccgcttcctttctaagcctctggtagtgaccattctactgtctacccctgtgagattcactttttttttttttttttttttttgagacagtttcattctgtcgcccaggctggagtacagtggcgcaatctcggctcactgcaaactctgcctcccgggtttaagcaattctcctctctcccaccttcccccgccagtagccaggattgcaggcgcacaccaccacgctcggctaatttttgcatttttagtagagacggtttcaccatgttggccaggctggtctcgaactcctgacctcaggtgatccgcccgcctaggcctcccaaagtgctgggattacaggcgtgagccactgtgcccagccgtaagattcactttttagctcccacataggaatgagaacatgcaatatttgtctttctgtgcctggttttcacttaacataataacctccaatcccatccatttttctgcaaatgacaggatttcattctttttatggctgaataatattccattatgtgtatataccacattttctttatccattcaccaactgatggacacttagattcattagtatcttgggtactgtgaacagtgctgcaataaacatgggaatgcagatacctctttgatacactgatttcctttcttttggatatagacctatcagtgggattgctgaactgaactatgtggtagttctagttttagttttttgggaaaactctaaactgttttccataatggctatactactttacattcccaacagtttacaggtattcccctttctctgcatcctcaccagcatttgttattttttgtctttttcttgatagccactctaactggagtgagatgacacctaattgtggggttttttttttgtttgttggtttgtttttaatgttttatttccatagattttggggaacaggtggtatttggttacacgagtaagttctttagtggtgatttgtgagattttggtccacccatcacccaagcagtatatagtgaacttaatttgtagtcttggttttgatttgcattttcctgatagtgatgctgagcattttttatgtacttgttggccatttgtatgtcttcctttgagaaatttctattcaggtctttggtccatgttttattcagattatttgtcatcatgctattgagttgtttgagttccctaaatatcctggttattaatcccttgttagatggatagtttgcaaatattttctcccatgctgtagactgtttcttcactttgttgattgtttacttttctatgtgtagctttttagcttggtgtaatcccatttgtctatttttcgcttttgttgcctgtgtttttgaggtcttacccgaaaaaaatctttccccagaccaatgtcctgtagcattccccctaatgttttcttttagtagtttcatgtcctattaaagtctttaatccatttgagttgatttttgtatatggtaaaagataggatcgatctagcttcattcttctgcatatggatatctagtttcaataatgtttattagagagactatcctttccccaatgtgtgttcttagtgcctttgttgaaaacaagttggctgtaagtatactgatttatttctgagttctctattacattccattggtctgtgtctgcttttatgccagtatcatgttgatttaattactatagctttgtagcatgatttaaagtcaggtagtatgatgcttccagctttgtttttttgtttttgttttttcctttccttaggattccttagcaattcggcgtcttttgggattccatacaaattttaggattgttttctccatttctgtgaagcatgtcattagtattttgagagagattgcattgaatctgtagattgctttgggtcatataacatttcaatgatattaacccttccaatccatgagcatgggatatcttttcctttgtgtgtgtgtcctttccatttctttcatcagtgttttatagttttccttataaagaaaaacttgttttgttaaattcacttcttttgttaaatttattcctaggtattttttagtagctattgtaaataggattgctttcttgattactttttcagattgatcactgtaaacgtatataaacactgctgatttttgtatgttgattttgtatcctgcaactttactatctttatttatcagttctgagagttttttgatggagtctttaggttttactaaataaaagatcatgtcatctgcaaacaaggttaatttgacttcttcctttccaatttggatactctttgtttctttctcttgcctaattgctctatctaggacttctaatactatgttgagttgaagtggtgaaaatgggcatcttgtcttgttagatgttagtggaaatactttgttcactgttcagtgtgatattagctgtgagtctgtcatatattgcccttatggtattgaggtatgttttttctataccccgtttgttgagagtttttattatggagggatgttgaattttatcaaacacttttccagcatgtattgaaacaatcatatggtttctgttcttgattctattgatgtgatgtatcatgtttattgatttgtgtatgctgaaccatccttgcctccctgggctgaattccacatgatcatggtgatcttttcaatgtgttactgaattcagtttgctagtattttgttgaggatttttgcatttatgctcatcagttatattggcctgtggttttctgttatattcttgtctggtcttggtatcatggtaatgctggcctcatagaatgagtttggaaatattccctcctcttcaattttttaaagtagtttgagtagaattggtattagttcttcttcagatgtttggtagaattcagcagtgtttctatcaggtcctggactttcctttcatgggagacttattattattatttagatcttactcattatttgtctgtttttctatttctttgtttcaattttagtagattgtatttttccaggaatttatccattacttgtaggttttccagttcattggcatgtagctgttgatagtagtctctagtgatcctttctatttttctggtaccagttgtaatgtttccttttttgtctctgattttacctatttgggttttccagcatgttggtattgtctatctttaaaaaaaaaaaaaaaactttttcattttattgatcttttgtggttttttagtctccattttatttatttctgttctgatctttattattttttttattctacaaattttaggtttgatttgttcttgcttttctggttccttgaagtgtatcattaggttatttatttgaagcctgtatttttttgacataggcatttattgctataaacttccctcttagtcctacttttgctgtatcccataggttctggtatattgtgtttccattttcatttgttttaagagtttttaaaaaatttctctcataatttcttcattgacccattggtcatttgggagcatgttgtttaatttccatgtatttgtacagttttcaaagttcctctttgcaaagattctagttttattccattgtggtcagaaaatatacttaatatgatttctattcttttaaatttgttgagactttttggtgacctaacatatgccctatgctggagaatgttccatgcactgatgagaaaaatgtgtgttctgcagtagttggatgaaatgctcataaatgtctgttaggtccatttggtctagagtatagtttaactgcaatgtttctttgttaattttctgcctggataatctatctattgccaaaagcaaggtgctgaagtcccttactattactgtattgcagtctacctctccctttatttctgttaacatttgttttgtatatttgggtgttctggtgttaggtacatatatatttattaatgtaatatcgtcttgctgaattgatatctttataattatataatggccttttttgtctctttttatagtttttgacttaaagtctattttatgtgctataaatatagctattcctgctctttttaaagttccatttgcatggagtatctttttccatctcttcacttttactctatgggtatctttataggtgagataagtttcttgtaggcagcatatatttgggtcttgttttttaatccattcagccattctatgtcttaattggagaatttagttgatttacattcaatgttattattgataggtaaggacttaatactgtcgttttacttgtttgcttgttgttttgtaaccctgtcttcctttcttactctctttatttgtggttgtgattttctctggtagtgtgttttaactcattgcttttgatttttattatattttaggtttttgctttgggttactatagtgcttacaaaaacattttatagttataagaagttacctataactaagctaatgtttttgtaagcactcctgtagtcccagctaattgaaggctaacgtgggaagatctctagagcccagcaggtcaaggctgcagtgatctgtgattgcaccactgcactccagcttaggtgacagagtgagaccttgtctcaaacacacacagacacacacacacactgatagcaacctaactttgatcacaaaaacaagagaaaagaaacaaatacaaaacatgtacacattaactccattctccccctacattttgaatttctgatgttacaaaaaataataaaagaatttacttttaaatttgataatgttttctttcatagaggcagaaaagcatgtaaatcaaagattgacctgttcttgtggtagtcagtttgtctgtgagtccatttggcactccagcatatatcatattggaagagtttcagatttttgaatttacatttccatgatagctaatgagggtgagtactttttcataatttgagtaacttctgaaatttctgctcttgtctattgcccatcttgatgtttggtttccagcctttttcttactggtttgtagaagttttaagataaattccagataccagtacctttgacatatggcacatatcttcttccactctgtggattgtctcattagtctcttaatatggtctttttgctggaaaaaaattctaattttaatgtaatttaacaatcttttgtggttagtgttgtagtgtcctactaaaggaatcttttcctaccccaaagttatgaaatattctcctatgttatcttctagaaatttaattcttttgccttttaccttttgatctacagcccacctacaattgatttttatgtaaagttgaaggtagaaatcaagtttgtcttttcttctccataggactatccagttgacccatcatcatttagtgaaaagaccatttattaattttttcttgctgtgtaacaaatgaacacaagcttagtatcttaaaacaacacccttttattaactcacagtatgtaggtaaggagttcatgctcaaatcaagttgtcagccaggctcttcttgtctggaggctctgggaaaaaaaaatccaattccgaaattgctcagattgttggcaagacatccattttgtgtggctttagactgaggtccatgttttcttgctggctgtcagccagggtgcttctctactcatatatatatatatatgtatatatacttaaagttctagggtacatctacacaacgtgcaggtttgttacataggtatacatgtgccatgttggtttactgcactgattaactcatcatttacattgggaatttctccaaatgctatccctcccccaaccccccaccccacgacaggccccactgtgtgatgttcccctccctgtgtccaagtgttctcattgttcaattcccacctatgagtgagaacatgtggtgtttggttttctgtccttgtgatagtttgctcggaatgatggtttccagcttcatccatgtccctgcaaaggacattaactcatccttctttatggctgcatagtattccatggtgtagatgtgccacattttcttaatctagtctatcattgatggacatttgggttggttccaagtctttgctattgtgaacagtgctgcaataaatatacgtgtgcatgtgtctttatagtagcatgatttataatcctttgggtatctacccagtaatgggatcgctggatcaaatggtatttctagttctagatccttgaggaattgccacactgtcttccgcaatggttgaactaatttacactccaacaaacagtgtaaaagcattccaatttctccatatcctctccagcatctgttgtttcctgattttttaatgatcgccattctaactagtgtgagatggtatctcattgtggttttgatttgcatttctctgatgaccagtgatgatgagcattttttcatgtgtctgttggctgcataaatgtcttcttttgagaagtgtctgttcatatccttcacccacttgttgatggggttgtttgtttgtcctctctcacttccttgagcagtggttcgtagttctcctttaagaggtccctcacatcccttgtaagttgtattcctaggtattttattctctttgtagcaattgtgaatgggagttcactcatgatttggctctctgtttgcctgttattgaggataggaatgcttgggatttttgcacattgattttgtatcctgagaccttgctgaagctgcttgtcagcttaaggaaattttgggctgagacaatggggttttctaaatatacaatcatgtcatctgcaaacagggacaatttgacttcctcttttcctaattgaataccctttatttctttctcctgcctgattgccctggccagaacttccaacactatgttaaataggtgtggtgagatagggcatccctgtcttgtgccggtttgcaaaggcattgcttccaatttttgcccattcagtgtgatactggctgtgggtttgtcataagtagttcttattattttcagatacgttccatcaatacctagtttattgagagtttttagcatgaagggctgttgaattttgtcaaaggccttttccgcatctattgagataatcatgtggtttttgtcgttggttctgtttatgcgatggattacatttattgatttgcatatgttgaaacagccttgcgtcccagggatgaagccaacttgatcgtggaggataagctttttgatgtgctgctggattcggtttgccagtattttattgaggatttttgcactgatgttcatcagcgatattggtctaaaattctttttttgttgtgtctctgccaggctttggtatcaggatgatgttgacctcataaaatgagttagggaggattccctctttttctattgattggaatagtttcagaaggaatggtaccagctcctctttgtacctctggtagaattcggctatgaatctgtctggtcctggactttttttggttggtaggccattgattattgcctcaatttcagatcctgttattggtctattcagagattccacttcttcctggcttagtcttgggagggtgtatgtgtccaggaatttatccatttcttctagattttctagtttatttgcgtagaagtgtttatagtattctctgatggtagtttgtatttctgtgagattggtggtgatatcccctttatcattttgtattgcatctatttgattcttctctcttttcttctttattagtcttgctagcagtctatcaattttgctgatcttttcaaaaaaccagctcctggattcattgattttttgaagggttttttgtgtctctacctctttcagttctgctctgatcttagttatttcttgccttctgctagctgtcgaatttgcttgctcttgcttctctagttcttttaattgtgacattagggtgttgattttagatctttcctgctttcctgtgtgggtatttagtgctacaaatttccctctacacactgctttaaatgtgtcccagagatcctggtacgttgtgtctttgttctcattggtttcaaagaacatctttatttctgccttcatttcattatttacccagtagtcattcaggagcaggttgttcagtttccatgtagttgtgtgattttgaccaagtttcttaatcctgagttctaatttgattgcactgtggtctgagagacagtttgttgtgatttccattcttttacatttgctgaggagtgctttacttccaactatggggtcaattttggaataagtgccatgtggtgctgagaagaaggtatattctgttgatttggggtggagtgttctgtagatgtctattaggtctgcttggtgcagagctgagttcaagtcctggatatgcttgttaaccttctggctcattgatttgtctaatattgacagtggggtgttaaagtctcccattattattgtgtgggagtctaagtctctttgtaggtctctaaggacttcctttatgaatctaggtgctcctgtattggttgcatatatatttaggatagttagctcttcttgttgaattgatccatttaccgttacgtaatggccttgtctcttttgatctttgttggtttaaagtctgtttcatctgagatgaggattgcaatccctgcttttttttgctttccatttgcttggtagatcttcctccatccctttattttgagcctatgtgtgtctctgcacgtgagatgggtctcctgaatacagcacactgatgggtcttgactctatccaatttgccagtctgtgtcttttaattggggcatttagtccatttacatttaaggttaatattgttaggtgtgaatttgatcctgtcattatgatgttagctggttattttgcccattacttgatgcagtttcttcataggattgatggtctttacaatttggcatatttttgcagtggctggtaccggttgtttctttccatgtttagtgcttccttcaggagctcttgtaaggcaggcctggtgacaaaatctctcagcatttgcttgtctgtaaaggattttatttctccttcatttacgaagcttagtttggctgtatatgaaattctgggttgaaaattcttttctttaagaatgttgaatattggcccccactctcttctggcttgtagagtttctgctgagagatccgctgttagtctgatgggcttccctttgtgggtaagctgacctttctctctggctgcccttaacattttttccttcatttcaaccttggtgaatctgacaattatgtgtcttggggttgctcttctcgaggagtatctttgtggtgttctctgtatttccggaatttgaatgttggcctgccttgctaggttgggaaagttctcctggataatatcctgaagactgttttccaacttggtttcattctccccatcactttcaggtacactaatcaaacatagatttggtcttttcacatagtcccatatttcttggaggctttgttcatttctttttactctttttttctctaaacttctcttctcactttatttcattaatttgatcttcaatcactgataccctttcttccacttgaccaaatcggctattgaagcttgtgcaggcatcacgtagttcttgtgccatggttttcagctccatcaggtcatttaaggtcttctctacactgtttattctagttagccattcacctaatcttttttcaaggtttttagcttccttgtgatgggtttgaacatcctcctttagcttggagaagtttgttattaccgaccttcagaagcctacttctgtcaactcataatgtcattctctgtccagctttgttccattgctggcgaggagctgcaatcctttggagtagaagagccactctggtttttagaattttcagcttttctgctctggtttctccccatctttgtgattttgtctacctttcatctttgatgttggtgacctacagatggggttttggtgtggatgtccttttggttgatgttgatgctattcctttctgtttgttagttttccttctaacagtcaggtctctcagccgcaggtctgttggagtttgctggaggtccactccagaccctgcttgcctgggtatcaccagcggaggctgcagaacagcaaatattgctgcctgatccttcctctggaagctttgtcccagaggggcacccacctgtatgaggtgtctgctggcctctactgggaggtgtctcccagtacatgggggtcagggacccacttgaggaggcagtctgtccgttctcagagctcaaatgctgtgctgggagaaccactgctgtcttcagagctgtcagacaggaacatttaagtctgcagaagtttctgctgccttttgttcagctatgccctgccctcagaggtggagtctatagaggcagcaagccttggtgctgcagtgggctctgccctgtttgagctttctggccgctttgtttgcctactcaagactcagcaatggtggacgcccctccccctgccgggctgctgccttgcaggtcaatctcagactgctgcgctagcagtgagcaaggctctgtgggcgtgggacccgctgagccaggcgcaggatgtaatcttctggtgggccattagctaagaccattggaaaagtgcagtatttgagcaagagtgtcccatttttccaggtacagtctgtcatggcttctcttggctaggaaagggaaatcccctgacccttgtgtttctggggtgaggcgatgccccgccctgctttggctcaccctccctgggctgcacccactgtccaaccagtcccaatgagatgaaccaggtacctcagttggaaatgcagaaatcacccgtcttctctgtcaatcatgctggaagctgcagaccggagctgttcctattcggccatcttggaacggaccacttctctactctttttttttttttttgatacggactctcgctctgtcgccgaggctagagtgcagtggcgcaatctcggcccacttcaagctccacctcccgggttcacaccattctgcctcagcctcccgagtagctgggactacaggcgcccaccaccacgcctggctaattttttgtatttttagtagagacagggtttcaccatgttagccaggatggtctcgatctcctgaccttgtgatccgcccgtctcagcctcccaaagtgctgggattacaggcgtgacacttctctactctttaaaggccactctcaggtcctttccatgtgagttccatcttcatacctactatggtgcatttaatccttctagtgctccaaatctctgacttcctttctgcaaccaaccagagaaaactcagattttaaagggcacatgtgaataggttaggctgggcccactagcataatcctcccttcttaaagtcaactctgccagataacatgacctatcataggagtaatatgtcatattcacagggtcaaatatttgaaagacgtcttagaattctgcttaccacaaactgtctttttcccactgttttgaagtgctacctatgccaaaaacaaaatagtcatatatatgtgtatatatatgtatatgtgtataatatatatgtatatatatgtataatatatgtgtatatatgtataatatatatgtgtatatatatgtataatatatatgtgtatatatatgtatactatatatctatatatatatatctatatatatatatacacacacacacacacacacacccctatatatatatagtccggggtgagtcatatatatagtcatttctgggaagagtttatgtagaatcaatatttcttccttaattgttcattgaattgactaatgaaatcatcttggcctggggttttctttgtgaagagattttaaattacaaattccatttctttaatatatgtaagactattcagggtatctgtttctttttgagtaagcttaacatttttgtctttgtgcagactttgtccattttgtccaaggtgtctacattcatgacataaagtttttcacaaaattatgtgattatccttttgatatctggaatctgcagagatgtcacctctctctttcctgatatttgtaatatcttaatatcttttgtcttctcacatttttttccctgatcaatctggctaaacacttatcaatttgattgttttattgaagaaccagcttttagttccatttattttcttgattattttattggcttcaatttcattaattaattgcattaatttctggtgtgaactttatttcctgcctacttcagagttaactgctcttctctttctagtttcttgcaatggaaactgaaataattgattttgtaatgtaagtttttagcgttataaatttctctctaactactgctttggccctgtcccacaaagtctgatatcttggagtgtgacttgcttctttcacttagcataatgttttcagggttttttcatggtttagcatgtgccagtgcttcattactttttattgatgaataatatttcgttgcatgactttaccatgttttgtctttccattcatcaattggtggacattcagattgtttgcactctttgactattatgaataatattgctgtaaacactcatgtacaagttttttgtggacttatgtttctaattctcttgtctataggtggaattgctgggtaatatggtaactctgtatttaatattttagggaactgccaaacagttttccaaagttcctgtaccagtttataattctaacaacaagacatgagggttacagtttctccacatcttgtcaacactggttattgtttgtctttttttattatagccatcctagtgaagtagtatctcattgtggttttgattatatttccttgatgactaatgatgttgaacatcttttcacatgcttattggccatttgtacagattgaatatcccttatctgaaatgcttgagatgagaagtgtttaggatatgggattttttttggatttggaaatatttgcatatacataatgagatattttgggaatgggacccaagtctaaacacaaaatttacttatattttatatacacctcatacacatagcctgaaggtaactgcacaatatttttaattttgtgcatgaagaaagttttgactgcaacccattacatatagtcatgtgtgaaattttccacttgtagcatcatgttggcactcaaaaagctgaattttggaagatttcagattttatgtttttacattagggatactcaacctgtacatcttcttaagaagatatttagaaatgtctgttgcaatcctttgcccattttcaatcagattgtctttattattgatttgtaagagttctttatatattatggctagagatctttatcagacatatgatcttttcccattctttagattgtctttttactttcttgatggtgtcctttaaagcataaaagtgttagttttgatgaagtccaatttatttatttatttttgtcacttgtgcttttgatgtcatagttacaaaccattctgtaatctaaggtcacaaagatgtatttctctttcctactgagagttttatagttttagttgttacatttagggctatgatccattctgaatttatttcctatgtcatgtgaggtagtgatccagcttccttcttttgcacatgtatatccacttgtccaagttccagttgttgaatgtttattaattttattatctttgtcatttctgcatcagttttgactgatcagtttttctcctcatttgggttgtattttcttgcattgcatgcatgataattttttattggatagcttacattctgaattttaccttgtcagatgctggatatttttgtacttctataaatattattgagctgtgttatgggacacagttttgttatttggagacggtttgatactttctggtcttgcttctaggctgttagttggtaccagaatggcatttggtttagggctaattttactccaccaccaaggcaaaaacctctctgagttctctagttaccagtccccaacctttttggaaccagggaccggttttgtggaagacactttttccctggaccaggctgggggaatggtttggggatgattcaagcacattacatttattgtgtactttatttccattattattaaatgttaatatataatgaaataattatacaactcaccataatgtagaaaagtgggagggagccctgagcttcttttcctgcagctagacaatcccatctgagggtgatgggggacagtgacagatgatcaggcattagattatcataaggagcacgcaacctagatcccttgcatgctcagttcacaatatggtttgcactcctctgagaatctaatgctgccagtgatctgacaggcggtggagcttaggcagtaatgcaagcaatggggaatgcctgtaaatacagataaagcttcacttgcttgcctgctgctcacctcctgccgtgtgacacagtactggtgctgctctagtggatgcattgttggttgtgacgttctctggtggactggtagaaacagtgactattctcaattcagggattattccctctaattctttcagatgattccttcacccagcttctcaaaatttctcatacaattgtgctgatctgcacctagctgaaattcagggggtcccctctgcagatctctggagcgttctctcactcactacagctttctccttctacaactctgccctaccaaaaaccactgcggtagcctccccaaactatcacctctatctccttgattacaaatgcattgttttaatcaggtgtgttaacatggcaagcatggagacaactgcctttgaaagaagagctacttagaattcttgaaaggagggggcattgcacactaggcagggcctcatggggaagcacccagttggggaaggaggcagaaggagcacaggagagcatggcccagagccttcattgtggtccccatgggaaggaagggatgaggcagtttaggcagctgagcaggtttagttaggattggctggtatgaaaaattttggtgggctttgagctataggagtagttcctagatgtcttgtgtccagccctgaaataattcccagcaggatttagagtgatttagagtatttggcttgttgtgtgagagttttctaagggaggtggttggtgggtatggcctttggattggttgtttgctcaatatgaaagaaatgttcaccgtggaatcatttgctatctctaagaatttagctagtcatgggaggggcagcctctccccgacaagcaaggcctccaagatgtcaaagcatcataaaatgaagacaataaaaaacaattaatgcacttatcaactgagggagattaccaagctctgcttgtacttctccttcttgcactgtagcctgaaaacttttcaaatgataagctgagacaatcataagactcctctcattcgtttctcttttctcagggattgctgtctttttgttgcccaatatccagtgtcttgaaaacttttttcttcatgtattttatctttttttttttttttagttgtttcaggattttaggtaggagggtaaatccagtccctcttactccatcttgttcagaagtagaactatggaaaatcatttccatttgaaattaaaattcagttgagatttttgggaaccaataacagtttaaacaggtttggcttctatatcgataattcagcagtctttattaacagattggagtgttagagcaaggtagcgaaaagacagagcatctaagccaagacaaaggatgggtgggaagacttcaagtagacagaatgccatgaacaaaatggctgaggatgcaaattttatgtgtttagaggataagtagctcacattcactggaaagcatgagtctttaaatgaagccaagcttcaacataggttgggatcagattttgtagagaaggctaatgggagttataaagaaaatgagaatttctctttcaataaaatctgtcttttcctcatggtgttccccaaacttttttttctcctaagcccccactaatattcatttttcattccttcaccttctcctaatatctaatccatttcttagctctgtaaggtcggccttatttgtagctctagaaagaacttcactgctcagtaaggtagacattagccatatgtggctatttaaatgtaaatgaattaaataaaattgaaatttcagttccttattgccctggccacatttcaggtgttcaagaggcacatctagccaagggcctttgtattggttggatagcacagggaacatttccaccatcacagaaagttatattgcatagcactactctagaatgtgctcagaggcaaaattttaaatttcatatgcggtataactatgtgaaaactaagacttaacaataaaattttaaagatttaaatgaagtcatcaaaatagtaatattgattatttttcactaagttcttgctaatcatttcttctactcatataatttctgcattttatatacagagcacatgtttatagtaggaaaaattatgtctttgatcatttattctttttcatactataagcactttaagtctcattctctcccccactagacaatataatagtattctaactagtctcttagaaaataatacaaattgaaaaagagaaaggctatagaagaaaaatgacagaggattagtctaagagagccaataccctactagtaggagttccagaaagaggggatggagaaaacaggggaagaaattaccaaagaaataataaaagaaaattttccagaaagaaagttggtaagtccaaacagtgaatgggcccactggatttccagtctaattaaggaatagaagacttgtattagggcatattcctatgaaacttcaggattctagagctaagacagctgagtttgaggataaggagatgggataggggcaggacaaagggaagtagtcacattccaagaaactaaaattgaaatcataaaccttggatgctggaagataataaacttgagggtaagcccctttcagcttaaaattctatatacagccaaactatgtgattcatgtgggaaaagaaacaaaaattagacatgtaaacatctataaaaattcctgtgtatctttttattagttactggaaaatgtgcttcagtaaagtaagggaataaaccaagaatgagaaagtcatgaacagaatccataaaacagggaatccagtccagagaagtggcaaagggaagtccaaggatgacagctatgcagcaggcctggagagcaacccgtccaagattggatcaaaagaatggaaggctctgtggggggagggacagaataaatgaattattggatgtgtttgtacatttgggaataaaatctgatgcatttttgaagaaagaattttcattgtctactcatgagaaaagaaaatcaagtaaaggcaacaaataattctaggaaagacaaaatgatgtacaaagaaagaaactataacctatttgaaagggaggcagggaagtgagaggagaagaaaggacaggcagatcacctgggattccatcaaccagagataacgtgttattattttattgtttatcttttcaaataaatctgtaccatacacataatgtatctttacaatagtgggatcatactgtactatttcatggtttgttttttgtcagttactattatttttaaatatgtatttgacattatatattctgcaggataatttttaataggttatagaataattaatttagtgaatagaccataatgtattaatcaaatctctgttgctttaatttagttggtccttataaattccctgaaatatagtaaaacaaagacagttctgattttggaaccgggacttagagtcttatagtccagcttcttagtatataactgcgactaaatatcctgttctgatttaggagattaggccaagaaaatgcagaatatttactcctatatgtactcatgctaatatcacagacagacaagaatgattaaagtgctactttttaggattatatcatggctatatttaagggagcatctcctaccctattctctgtctagagtgctgctaacccaagtatctgcatggtccattttctcatttcattcaagttcttctctgttcacacatccccttatcagggaggtcttttcagtgaattttacataaaataggccacctctgtcactgcacagacttatctcctaagctgattttatttttctccatagcactttctcaccatctatcatcccaacactaaaatataagctcaagaatagtgtttctgtcttgtttgttgctccatctccagcgcctaaaataaggcctggcataaagtaagtaggtgctcagtcatctttgaatgaataaacaaatgaatgagttaattaactgggacttagaaaacaataggaacaacccaagaaggcagtgaagggaaattctaagtcgacagtggtccaggttagagcagaaggtctcagggtcctggaaaggaggtctccaggaagaattgactcagaaaaatattgagtagagttaagagggaaaaaaaggtaactgtaacgaaaacaaatgttggaggacagagaatggaagtgtaagagtggaagtgtggttctagataccacttggctcagcagtgaacaatattcagaagtaaaggtgtaagtatattatttaagtaagaatagaataattcaaaataagatataaacatgttgagaagatggcaggaaggaatggtagggctgtaaaagggagctaaatcctcatctttcatagcaactcagcaagggtaatcaataagttatcaagaaatgacaagatgatcgtaagtgtttagaggtttgaagataactggtggaaggacagctaaaagagttcagagaggcttcctctaggaaacgggtctagaaatgggaaatgatggaaaagaaaactatggtttggcactacaaccatttctgtgatatttgatatgaaactatatatgtgtatgtgtgttaccttgataaaactttaaacaaggaaagcagaggcaaaatgtaaaaattaataatctgggagctgggtgcggtggctcatgcctgtaatcccagcactttgagaggccaaggcaggcggatcttctgaggtcaggagttcaagaccagcctgaccaacatggtgaaaccctgtctctactaaaaatacaaaattagcggagtgtggtggcgcatgcctgtaatcccagctactctggaggctgaggcaggagaattgcttgaacctgggaggtggccgtgagccacgatcgtgccattgccctccagcccgggcaacaaagagcgaaactccatctcaaaaaataataataatctggaactaaaattccagatggttgaagcaacagggatggaggcaggatgggaggaaggcatggggaaagtgcaagtatgctaaggtcatgccttgtttagatgagtaattccagacagcaagagaaaataaaaagtaagtttgcagtttttaggtaaggctaaccactagataaataaaaatggaatttatactttcagattgttaatgaaaagaaatttgttaaatcctgggtggggaggaaaattcatcattcacactaaagataagaggcagaaataacaagaaagcgtagggtatataaagcaagatgactggcgtcagaccaaatagctttgatctcaatatatgtgaatatgtttagtccttctatttaagaaacagagactttcaaactgcatttttaaagaagtccacttacatgatttcaagagacatacttgaaacaaaatgacaaaagattgaaaatgaagggaaggacagatgctggcaaaaaagaaagcaagataagaataataataccagccaaaatggaattcagggtacaaagcattgaatgaaaattttcttaccagtacaagaaagccacataaactcatgttatctctggcgttcttcctctttcctaggtatttgacatcttgaaagtgagcatcactttgcttattttgcagccagtgtaatgggactaaccctattgaaaactcctggagaactttaaacgtatttttaaagataaataatccttttagttgtttcctttaaaaaaaaaaaagccagtatattttcatgttagtaactgtttgcattttcttggtatacatgatttattggtaacaatttgtacttctaagccttaaatcgaaatagcacatattggtctggtaaaattgcacacatcatctgctgtggtatctgacattgggctgtggcactgttaaacttttgctatggagaagccagatgaggttggaagaaggttcttttaaatgaaatgctcttgtttccagagactgtgtgcatgttgcctgactcacattcctctgttggcctcaccagtatctctcatcagatagcacgtgccaaaagaaaggaggaacatgaatttactaaaattaatttgaaatttgtgtttgttctatatattctaaatgtttgactttttattttttaaatgtagctaatgctgcctaccttgggggccaagaaatgatggaggtggtgaagagagatgacgaaaccataaaggagcatttatgtaaggtaatcactttagtgctgcaaggggatagataataagtagatgggcagagatacgagggcaaaggactagaactagttagaatctgtaagactttaagggttggtagaatgacatagagttctacttccagttaaaattgaaattatccctgaaagttgtgtagagagtagtaaagctaattgcataataacttatttttttatcacctgtttttgttgaattaattttagaatcaatacttttctattttgtcaatgcattttagcctctctaggccttctactgagaaaactccataatatttatagaataaataatgttggaatataaatgaaacagtggaaaatacattatatgttatatgatctcatgactagtgagcctttcttattctctaatgtgttagagtaggaatgtcctgctctgaccctaagaccagttttgtgaaatattcaacatttgggagttatgctgcaaatactagaatcttgcacacacacatctggaagcaccaatctctgaaactataagagtagggtttagtatatgtctaaggtcaccctagaatttggatgactgtggtactcctgtggcatcatttgtctggctgtccgttctgagtaggacagaactgtactaatattatagccactagccacatgtggttatttgtggctagccttaattgagttgtgccataagtgtaaaacacacattggatttcaaaagtttagttcccccagaagcaaagtatttcattaatttttatattgattacctgttgaaatactaccttagatatagtggattaagtaaaacatattattaaaagtaatttcacccattcctttataattttttaaacattgtaactaggaaattctaaaattgcatatgtaccttgctttatgcttctgttggacagcattagtcttaaactttacaattggtgctgaactatgatacctgctgaaatgatccctgctgagtggcaaactctcataggactcaggagcaatccacaagtgaaatacgagataacccactggacttagaatgtctttataaaccttgatacatttgacttaaacttttctacattgttaattcttaattccataacctcccagtacaattatcttaaaacgagaagtgtatatgttcttaaaattttttttttagaatattgaaaatattcacccagagaggacttttgaaaatgccagtgttgttttgtctcatggccatagtggtcatcatatttctgaaatagcagttggctagagattgaaatttggaaaccagaaggaagccctcactagccgaagggagagtgctggggcctcaggagggccccctctccagggctttcagctacttccagtcactgagcgatgtgaaaatacaagaaaaacagtattttattttccatttaaactgtaagtgaatctgtttcaaaaatgcatttaagttcttccaggttgggagttcataaaaacagctcaactctcagttaataataagactggcagatgctcacttccaaaattcacacttgctgaacaactagacccatcatgtgtcagagtctgctttaccacctgtggaagccagctgctgtaaaatactcatcatttctggattcagcttgtgtgttgtgctcagaaaaaggtcaaagaaaggtgctaacttattcctgtcccaagtgaaatccatatgcaagtgtaatcattcccagatagagggctgttcatggtaattatgtcaggactgtaagtttactgaaattttatggggaaatacgggggtgtaatggtaaatggtagacatttcaaggttagtattaacacacagtcacaggaataaactttttcaactccaggcaatagttttgtttttgagatagcattaaatatacttctagaatatggggaaacaaagcattgtttcatttaatcatgcaaaactaccttgcagttaattcattatcctttctaccagcaaaattcaagctctccactagaataatacaattacagctcctaagtgaaactaggtacagagagacaggaagtttattgcaactttttgtttctgtaataaaaagaggaaacatgctgtaatttaatattggtagaagttgaatcaacatatgtcccagtctgcttgagaaaataaggaaacttaaaagtgcacatagttctaggaagatagtgggcattgcttcctgccttccaaacacccccgataactggtcaaactaaaaccaatgcccgggattagaaatattcctatttaggtatcttaatcgaggatactctttcccatttccacccaaacaaaggcgttcagaaacttcagaactatccaggactgtccagtgtgaatagtcatcaagccacacattttgttgaaaaatcatttcctgtatctcagctattcaactaaaaatagttctgaaaaatatatctttgtgccatccagccagaatgccacaggaaagttagtctaaaaataagctttctactgtatcatgcagacagcattctacttctttctcctccccaagagaactatcataccataatctacaggctttggttctaaatccaaattttctaccactggatttccatttgacacaagaagagagctttttatatgcttgaggaaaatgggcatttttagctctaaaagatctgttgagctgattatcctccttctgaggtccagtgactttatacacagtattggacataaagtaatttattttattaaaataatttttctttcctggagcaaatataacagactcatggttgtttccaaaggagtataccatggtttatggcatcataggttatttctttttcctttttttgtttttttgagacagagtcttgcactgtcgcccaggctagagtgcagtggcacgatctcggctcactgcaacctccacttcccgggttcaagcgattttcttgcctcagcctcccgagtagctgggattacaggtacccgccaccatacccagctaatttttactagagacagggtttcaccatgttggtcaggctggtctcaaactcctgaccttgtgatttaccggcctcggcctcccaaggtgctgggattacaggcatgagccactgcgcccggcctataggttattttgtcatttgactaaatcctgcttgtctagtgtcatccccaagaggccttcccagtccttggttttggttagatgttactccctatgtaaagttatattgcatttatcacacagtatttaaacaatcaaccttcacctttccccacgttgaggtaaggagctgtgtcttcttcgtcttgatgtcccctagggcctagcataattcatacctggtaaacagtcagtaaatatgtgctagacagatggatagatggggacgccattaactagagtgtggattctaaaccttttttgtgccatgcatctctttcgctctctcataaagcttttggattctactcacaatgatgttaagtgcataaaatacacaagattacaaaagaaagaagttgttggataatgagatataatagcagtcagaatttttttttaatttgtaatgataagtataatgttttagttaccttgagcaagttagtgtgatttaaaaatacttatcatttttatagatgacaaaatataggcattactaatattgtagcttgttgcctgtattcctaattgaaagaaatactaaattttggttagagattaacaaaagtaaacatgtaaatttttccaaagtttacataaccccttctccaaacctctggacctgtacaccgcaagcaaagaagccctgcgttagagaaactagaaaaggttaggtagcatgatgttgtggcttaggcactggcctgagaacaaaaagtcatgatatgccacactgaagagactgttttggggagctattgaagggtctaagcatgggagtaacagggtgacagtcaaaacatttgacaaccatgtgatatagggattgaccaatcagaatgtatgccagctatgaacagccagttcaggggcaccagttcatatcagttagccctaggaatttggtgagattaacaaatgagagggattatcttgagggcaaatgtgtggtataatactagaaaaggatgaaatatgagttggggagcctgtttacaaagcttttataagaactaaggcattgggattgaagatggaaagatttaggagatagaatcaaaggtactgagtactaacaggatattggggaatggagatggaggaatctaagattatttctttgtatctggacttggtaataagacagggaatatgggaagagaagcagcagcaagttatgggagatggctgaacaagtggttcattttggtacttgtatttgagatgccagtgggacatgcaagtggatccgtgtctggcaggccctggatgtatgggtgtaaagcttagaaagatatttgaggctgacttttggttggggagtgatgaggctgtagttaaagccaagagcatgggtaatagcagcctaaagaagtatacagaataaggagagaagacttctaatgattgatcattagggaacccagcttaagggttgggaggaagacgaggagccactgaatgaataagatgggaggggaggtaagaagggtgggaaggagaaccaggatgaaataaaccaagggaagagaatcaactgtgcgttttcgccaccccaatcccagtttgtctggaaacctctggagtattctctgtttcatgaggcacctggtgtgtcagaggcaaataagaggtcagcactcccttgttctgtcactgttctaagccataagggatgcatgtctcattcattgaaaagtgaactcatgtttggtttataaacttgaagttttcatttcaaacccacttagggggggaattctaaactgccatgaccacgtttggcccaggcttacggaaacagctggtgtgtgctactgccagactgaatctgagcatcactatcagtaagtaggaatctgaaattgctccaaagagaacacatgaagtgcagctttcagatgaagttaggcagtggtaggggggctgcctgtaaggtggtgctgcccctgcccccagagggccaggccagggctacagtgtggcttgggaaaggggcaagtgtcctcaagaacaggaactcctctgctattgctctctccccatccctcttagcctgccttagcccaaaggtgtgtgttgcctttgggagcaaaccttgtgcagttgtttgcagattggggcatgcaaatccttctgacatgcacatgtcctgcctgctgcagcataggaaatgctccctggaccagctcaccaggcctgcctttccgccaagcctcggtattctgaaacggattgtgttagttctgcctgtttaatttaaagcctgtccagaatgtcataatcatcctgaaaatagataggtttgtttttatctcaatattgtgaccttgaaagctttatttgggcaattgtgtgagcacactctggggttctgcagtggagcctggtgactgaggggaggcaaacgtgctggagagctgggctcccagagtctcagccaagcttcaaacaccaaatccacccttgttcatgaccctgcttaagttaccggacctcactgtgcctcctttattcatcaataaaatggttaataatagtatgtagcctcatacagctattccaaaaatatgctataattcataccttgtaattcagaccttataagagtatctccgccgggcacggtggctcatgcctgtaatcccagcactttgggaggccgaggcgggtggatcatgaggtcaggagttcgagaccagcctggccaacatggtgaaaccccgtctccactaaaaatacaaatattagccgggcatggtggtgcatgcctatagtcccagctactcgggaggctgaggcagaattgcttgaacccaggagggggaggttgcagtgagccaagatcatgctactgcactccagcctgggcaacagagcgagactccgtctcaaaaaaaaaaaaaaaagaaagagtgtctggaatgcactaagcattcaataaatgtttttattactattacaaagttagttatagcctagttatgcttctaagcactttaaaaagactatttgcctaactgttcctcttctcacatccccttttcagatactttcattgtgttaatgaaaggtattagtgatgctgagtatgtggccaagagaccccggaatgcccaatgccattctaaacaacagccaccactccccataagatgcctcaaggagctgttgtataggaaccataatgaggggaaaacacaatagtacttgatttttaccaaggcttgggcccattattctagtccagagaagtctgatgaactggacttagcccttctctcagttagttgagtaaaaccattccagtacatttgcccccttcttggggcacagatccagggaaggacagaaacacagaaggagactggcgctcagggcctcttactttgccagagggcctcgccagaggaaagcagaggccctgggttagcatctcagtgcagtctcacgtgagaaagagacaagccagtcacttgatggcctcgtggcttgtatgtgggagggagaggatcctggccctttacatgttagccacacggaaaggagagtgctgctctgcacaccgctgtatacacagatggttgttccagctactggagagtgagccacacagtgccccataggacctactcctcctttggcgctcccattcccaccgctcccctctgtgcctgcagagagaagcagggttcacgggcgggaagcatttgtgttttcacctccatcctcagccactttttaaaaatctttggagatttcagttctcattttctcaagaatggtaattgagccagttaggaataaacggaagagaggaaacaaggtaactggaaaaactgaagtccctaaaccatctccctttctttagcaattctgcaagtccctaaaaacagaggctcagaaagactgcagtgaaatgttgacactttgcagctgcctgtgtccccaacagggataagattttttaagtaactgaaaggagatgcttatatcacagaatcggtttcctttaacattgcaagattggggcttacatgtctttgactctgaggggaggggagaagtggaagcctgctgctgtcatccagactgtctggactctccccagaaatgggcatgcattggaggacctaacagtttatatcccgagcccgggaaagcttcaaggggatgaaaacaggagataaaggcagggtaggggccctagctgggaagtagggggcctgtatgtgtaggtactaatttgatcccttggtattcaaccgactgctttatatctgaccttttgcttttttcacaaacaatgaaacaagcaaaaaacctgctctagtgcaaattatttcaaagaaggaaagaaaacctggagaaagcaggaatgacatatttttcttagacctctggaagaaaggccaagaagatagatctctctcagaatctgtgtcactcctctttggtcactgtctctagtgctggcttcctggttgccctgccatgcagcgtaagctgccagggagctacagctgttgatgaagtgctaacagaaagccttgcattgctcagaaaagcggtgggcattaccttcactgctgcaagaacccacaggctcaccctgtgagctcaccaggaagaaaagtaactcccagaatgtcggtgcctttcttcatttggaagatgctcaaccaaggatagccaaagggcactatagcttaggctccaggtctcctttatgaggaaaagtaggttttattataaaagtggaagtatagaatccacaccaagagctgactgttagtggcggcttgaggatagggatgtgcttcactgtttatttggttggcgacttatcttctaccccacctgtctttctctacagtcatgtctggggaatatgacatgtacattttttagataatgagtaagtatatggtaaaacaactttgttttatattttaaaaaatgtttaatacttatacattttctgagcctatgtcaaaaacaacttatcagaatagaatatattttctcaaaggctaatgtaaggtcatgtggattctttttccttgagcagggcacagctcccacccacccagcccaccattgcccagtctgtgtcgaggagctccctttgtcctcacctgtaaagcagcagcctttaagagtgcccaccatgtggaaagcacttgatacactttgttttccagtcctcagcactagcccacaggtaactagttctgtcttactttacagatgagtaaacaggcacagggaagctaagtaactggtccaggctcacagcaccaataaatggcagaaccaagattccagtccaggtggatatggctcagggacctgtacagtcttaacactgtactcactgcactacgctcttcttggctgcataaggagcttgagtagtttcacaaattactttagaataatataaatacaattattttaccacactgtgatataaagacattatgagaagccctttcactctcagcatgacacccccagaaatgccgtttaccaccctgctcaggcctgcactatatcacaaaacaggcaccccacaaattgactacccaaagtagtctgtgccaaaggctcatcaagctggatttctcgttggaaacatttcaagttgtattgatgagatatcgtttgtaccaaacttgacttcgtggtgaattatgatttaaagagcttctaaaattcagtttatccataaggttaacaccaacaacaaatatatatatgcaaaaatatatagagatgcaaaactttcattttattagcccttttattcctgtaatgcctgtagtcctactgtcctattgaatagacagataattcagatagagatttttatgtgtggcttttaaaattgttattattttaagatgttgctatgtcattgaaagtgagttttgttattagctaaatcataagatgcttctaatatttctttgttcttactataaatcctctattagtaatgcataaaagcatgcaactccaaatgtatactaaaacaaagctttgttcatgttcactccctcagggcagaatttgggttttcctgctttggggtcccgtagggctttgtccatacctctgtctgcctgttgtatttaagagccagtttatataggtctgttctctcgcctagtctgtgagctgttccagggcagagaccatcttacacacttctgaatgtcagccacttagcctagtaccagatatgggatggaatcagagtcatttttggtggaactcattttaatctatcagcttcagcaattcactgtccaacagtgctgtttgtagaccccccaaaaagtggggaaaaaaaaacacacagaagaaaagacagatgtggggacaagctgcagcaacctgcagggatattttaggagggccctgtccccttaggtgcacattaaacagttaaagggaagttcatctataagcccagagaccatagtaaccataaatccactttcctgcagaaaacacaggaggaaaagccaaagcatggttctggagaatcaaaatctagactgaaaaaaagttaaattttgtgcttaatagaaaacaatgggttacttaacatgacaatttggaaacagaaaaatttctatctcaataatgtatactttttatcaactctcatgagttccaaaacaagtgctaaggataaataaactacaggaaataatttattttcttctaaacctttgaatgtaaacatcctgctgattgcctgcgattctttgttaacaattccagtactttcatggcagttatcacccccatgacacacagtgcctcagaagagctacatagactgtgagaaggctttcagtaaaggtagttgggaaggctgggtgctgtggctcacgcctgtaatttcagtactttgtgagggtgaggtgggtggatcacttgagcccaggagttggagaccagcctgggaaacatagggagacttcgtctctacaaaaaaaaattaaaaattagctgagcatggtggcatgcgcttgtgattccagctaccctggaagctgatgtgcgaaggtcacttgagctcgggaggtcaaggctccagtaagctgagatcacaccactgcactctagactgggcccagagtaagactgtctcagaataaaaaagtaaataaaaataaaggtggctgtgttagctcctgttgacaactctcacactctattagttttcatatccagtttaagacctgccagttgtcaggttttatgtttttataacgggtctatttactggaattgtaagtagtagcaaaaggtacaagttaggaatgttgtctgtggatttgtagcccagctcttcaatgcaaaattgcttgaaataagcaggttaatcttgctaagcctcaatttccttttctgtaaaatatagatacaatactttccttagagtattgttgtgaggatacaacgagataatacatagaaagtgcttacttagcacagagcctggccattgctctcggcccattggttcatcatggtgcattgcgattcatttttgcataccgataaataaagagtatgcactgttaaccactatgtttttggtgtccagttgtttctctttctttctacttcacccctcctcccccatcccccgccagtgccaccacacactccatactttctcattttcctgttcagggctgcaggtgcggagttctccggtcagatctattgcctgtgatttataatttatagggaaaaggaagtatctcaagccagtgtatgtaaaggcattagataaccatgtgttttacttgtaagccaagactttcataggaagccctttagagaatatatagcctgaaaaagaacttgtaaaagaaaacaaaattttacaaaacgtgagcccacccccatcatcagttaggcgtttaaccaaatggggcccacttcaaacgtttaaggattgtagagaatcgagaaataaaatcagataagcatacgggaggtctagactcctcactgttctgctgtcttgaacactgacaccactctttgttgaggttcctagcacatgccttggacagtgtgtgccccataattacttggacatatttgtctcttgataccctgaggtgggtgtcgggtcccttaatccatgttgatcacccctgctcaaatcactgccttaactgcatgtacggggatggtgtttgctcagtgctgagggcttatcaagctggacttctcattggaaacatttcaagttgtaattgcatcacagaaaagtaaatggtacgttcttcatggaaacagtctttgaaatgtcagacagaaagcaacagcggtgcgtacagtgacgcttttcttgttgaggaaactgtattagatgaggtcttttctgtctggctttcctttgagctgactgccattatcataggacttcacactgtagcttgtactggagtgagggtcctagagtagctttctcagggtccagtgatcttgaggcgagagcatgccctgcagcagaggaacagacctgacaggtatgaacccaagtctgactttccagatttctcagcagtgttccctgctctgaggaagtgctgagtaactgcatagcgactgttccctatcctattccctgaatacaatcgaaaagattgctggtggtaaatatagggagtagcttagagagagcctaatgttatcagcactattggtagataattaatacctgcaaatagtttgtactcttgacagtatttcaaggcaaagctatagcagggtagttgctgagagatccggggaaacgtgtttttctactagtggaaagaatagtctcccactggttgtgaggttgcagcattttagagctacagaaagagctgagaccaggaggaagaactaggcaactgctaggctctcatattctctaggaagcaaaagaagttcttactctgctaagaaccatggcaaaatgaattctggctttaggggctttggaatgcccagaaatggttggagtgaggaaaagtaggagaatgcaaagaatgaattaagtgataaatctgtaagttgcaggtcctctgcagcgtgcaaaactggaaccccaggtaacaaccaagaaaacctccatgaagctggaatactatgcagtcataaaaaaggatgagttcatgtcctttgcagggacatggatgaagctggaaaccatcattctcagcaaactgacacaggaacagaaaaccagacatggcatgttctcactcataagtgggagttgaacaatgagaacacatggacacagggaggggaacatcacacaccggggcctgttaggggatggggggtaggggagggatagcattaggagaaatacctaatgtagatgacgggttgatgggtacagcaaaccaccgtggcacgtgtatacctatgtaacaaacctgcacactctgcacatgtcccagaatttgaagtataattaaaaaaaaaaaaaaaaaaaaaaaaaggaaacctccatgaagcaattcagagtaagtctgccacttgaggtttacttgttcataatttactctctggagtactatgttaaattttttcctctataaagtgtttttaactaaccatctaaatattggttaaggcatcatgttattgtaatgaaggccattgttttcgtaagatcagtctcatctgtcccatattcaggtcatggatttaataattgatacactcaaactatccagtgagcaataacgcctgcttccctgcactctcctcccccagcacttgatcacctccaatccttcttctcgttgtggccagagtggttttcctgacatagggacctcagcatgtcacttcactgtgcagtcttttttgccttgtggacttcgggataaagcgcaacctccttggcatgcatagaagatgctgtccatgacctcatccctctctgcctctccagtcttatctcccaccaccctatattccagccatgtggaattccagttccccacacatgccatgctctttcaagctttggtttgcttggtcttctccccacagtgtgctgccccagcttgaagactcaactgaggcatcaactctggggaatctttcctgcctactacttctgaccagctgcacctcacctgagctctcaaattgtcttgtatacatggggtccccttctcccctccccccaagactgtcttatctctattttccaggttcctaatacaaagtaggtgctccatttgtatttgatgaacaaaggaatgagtaagcaattcagtgtctgaatgaaggagcacatttggtatattagggaagctgcaagtgactacagctggccaactaggggctggagctaggcatagctctgtctttcagtgataacagaggtcaaaggatccttaagatttagttcttggtttttgtagaaattgccactatctgttcttctgaatataagatgttgctttgttgcctttatttttagaactaacagaactagaacatagcagtttttcagtgaaacacagcagcctagagcaatatacatatatatcacatgcaggtttaggtagatatccattcagggtcttagtaatgccacagaggaggctctgtctccattcagctgcttgctgtcaattgaagtatgattattgcacttccccactgaatcaacatacaggctgcatagagccttttcttagaaaggtcataaactctctcaggattctgatcacatttcatcagctacattggaaagcctgagtctatctgatctgtgtttgtattcattcaacaaatacatcccatatgactaccatgtggctatttggaaacaactaagtttattaactggtcactagtcattcagtgactatgtctcaataactgtcttcgtcatcctcaccggccttcattccagtgtccatcccaaccttagtacacaaaactttcctggtaagtcgtttcagtgaattatgagtgatctatcacacaagagtctcccagcatggggatcttcccaccaaattcttctaagtgcactcctgtacatcgtgaagccttgctgccttgagagagccacactctggagagagcttagggactagctcccagggtcaggcgtaggtgctgtcctcagagcactgccggctgctggtgtcatatctgtgtcaggaagggaacgtgttttctaataaaaggtttttgtcttgtctttcagcttacattttattatggtactatagatccttggtgtccaaaagagtactatgaagacattaagaaggattttccagaaggagacattcgactctgtgagaaaaacatacctcatgctttcatcacccattttaaccaggaaatggcagacatgattgctgactccctaaaggatgacttgtccaaaatgtaaattggcctgaggaacaagcccccactgccagtacatggaggcagtcagtgtactagacttagtaggtaaatgtttaattttgaagactgatattagaaatgaagaaagtgagaacctttgtcttacaaaccaactctccgctcgccatgttataggctgaagtaaacacagttgatgaatcattccataggtttaaccatacattttccaagactcagggaacacagtgatctacacagagtcttgtgtttgcacaagatgcccagtggcaccatatggtttattttggtaggcaggatctttgcagatgaaaaaaaaatctacatgtacttgattttaattgagttacattgtagaataggctcctctggaggaaattatgaaatacctactagaaaatgtaaaataaatcagtgaatgttaagagtatagttagatatgtgaagtgtatgagattatgacaaggatacactcatgttccaggagcaggaagtgaacctgggtctcctgtaagacagaagatgaagatgagcccaggctaacttagcacagatcttggctgagatcatcaatgtgacgtctaatgtacctgcactagacagagaataaagttcaccagacattactctggtcagctaaccagataaagaattgttgaaggaccccaactgtgcctcctgccacaggacaaccagcaagttctatgctgagccttagcctcccaggttataagctccctgcaggctcctcctctccagagccaggatggagaggcactgggctgtcccaaagcaggcttggatgtgccaacgtacagttgctccttctgtaattcttgcactaaaactccattaaagaccatcaatgagccaaatagtgtgctagccattgaggatggagttcttagctacttaatgattcttttcttctggaaatcttctagtgaataatttttaaaagcttcttttaaactgctcagtaaaacattgccatacattaactctccatttctgcattaacttcatttgctggaaagaaattattttgttaatgaaccaaacccagccattaagttatgtgaattcaccttctctagacacattgaggtatggcagagaagacacatattccctggcctagagtgggctgacaatattgctgcctcccctaaattgactcaatcttgagaaccacatactgcagtgacagttgatcatggatcagaaatattcctttttctcctagaggaaatccctcatggcattatcattccctaaggacaatgagatgtccctccgctcaaatcctaaagccccctgatgaaagatttggctctgatttgctgccaacttattggtaagtgctgaatgagttactgtgctttggcatagcttctacatcacagcaagtgacttctcagaggggaaaagccaagctccagacaaggagtgctgttagcccaaggggaagagctaatagatacataggccgtaagcacagggctgtacacagatcctttattggcatctgcatgagaggcctagaaatcggatgttagaagctaggaatcatggctctgagcgccttgcatacaggagatactcactgatactaaatcaaggcatgtaaacaatactgggtaaatcatacctaccagaataaagagtaacattcagagcttttcttttatctgttattttaaatgttactccatatttcaaaagtctgcacgtatgaaattgtgtcttatttctggtttttagagcctaagaaagatactcattcttaattcctatttatcatctgaaaaccaaatgaatttttgaaataaatgttttaccagcatttctgacctggtctggcctgatctctgtgttgggcaagagagggtacaatttgagcagttctcctgagttagactcggctcaaagtctctcttttaaagtgaaaagccacctttctcattgcttttttcataggtggaagaatcagatttcaagagactgaagttcattctgtttcattagggattagactaaaatggacaaacagtggaagaaatccattttccagaagcagctctgcctgtatgtcccagtcaaccacatggatggtctttgtgaaagttttaacttcctgcagagttaccgagtgctcagcgattgagctttgaccacacccgtgtttgttcctagtctgttcccagccataagcatctccacaagccctctgtggcttgtgtggcctgatgtccatggccaccaagggcctctcaccatacgcttctccactcaacctttggagagacacggaccaccaaaggcttgatttttcttcatcctacattatattcaaaacaaacaggctgggtgccgtagctcacacctgtgatcccagcaccttgggaggatgagctgggaagatcgtttgaggctaggagtttgagaccagcccgtgcaaaaaacgagacctcgtgtctaaaataatttttaaaaaagagcaaaaaaaaaaagcaatttcagattaaaggagactgaagagacatgacaattggacacaacatctgattctgaattggatgtttttgttataaaagacattgttgagacaatttgcacaacttgaatgaggtctgaagattagctgggagtaagatgccactgttaattttctgatttcagtggttgtactgggaagaagtaagagagtgtccttgtttgtactggagacactgaggtatctgggggtgaggggcatcatgtctgtttactgtcagatggttgaggggaaaataatgttctttgtacttgcagattttttggaagtttgagatgttttagaatttgtaaaaataattatttttaaaaccccacca

SEQ ID NO: 15658 - DNA, 83071 bp, Homo sapiens
gtgacgtcacctgaggggggcacttccggtctcgtgccgccttcccaggaccctcagggagagcgggcagccttccaggtggacaggtgaggtacagcttgccgagctcagggtgactgcccaaaggaaggacgggtgggcaggcacgcgggatctggcgccccttcttctctatggttcctcgcagagcccctgttgccctgggccagatggcccgtagcagcaaaaataatactgttccgacagctcgcgagttcggagccacttggcctgggagtcccttgagttgcaggccgggcagtcgctcacccgagcgcggtaatgcagcatttgaacccctaagtgtagcccacctgtagggagtcttatggtgcccccgcggaggagtagaggccaaaaagttgggcagctggccgggaagaactcgctaggaggggtcaaactctgggccgggagtgttctttgcccccggcgtttagtgctcacgccgccttttattcacgctgaagaccttaaccgtaaaccctcatccttgggtcttagtttggttttgttccccacgcaagacagaatgcagattggaacactttattccttggttaattcgtatcttccctcgcaagtagttaccggacacctgctttgtgtcctgtgtaccaaacacaagagttgatagtcctggccgggcgccgtggctcacgcctgtaatcccagcactttgggaccccgaggcgggcggatcaggaggtcaggagatcgagaccatcctggctaacacggtgaaaccccatctttactaaaaatacaaaaataaatacataaataaataaattagccgggcgtggtggcgggcgcctgtagtcccagctactcgggagactgaagcaggagaatggcgtgaacccgggaggtggagcttgcagtgagccgagatggcgccactgcactctagcctgggcgacaaagtgagactcagtctcaaaaaaaaaaaaagagttgatagtccttgagttgaaagaacaaatctgtatggagaaagagatacaaccaaaagaaacccagaagatttagaagcatctccagaatgtttattctcaaaagctgttttttaattaaacttctttctgaaactatacgtaggagtgtctcttgtgtgtttccccatttttccacctgaaggttaaagacttagaaacctgctaaggcccctctttccagcatgtagcattctagggggataatcagggcaacacagtgggtgcccatctaaaattttatattttaatattttgctttttgataacttaatgccttcagactggaggattttttctttcttttttttaatttttttaaaattatactttaagttctagggtacatatgcacaacgtgcaggtttgttacatatgtatacatgtgccatgttggtgtgctgcacccattaacttgtcatttacattaggtatatctcctaatgctatccctccccactcaccccaccccacaacaggccccggtgtgtgatctcccccttcctgtgtccaagtgttctcattgttcaattcccacctatgagtgagaacatgtggtgtttggttttttgtccttgcgatagtttgctgagaatgatggtttccagcttcatccatgtccctacaaaggacatgaactcattcttttttatggctgcatagtatcccatggtgtatatgtgccacattttcttaatccagtctatcattgttggacgtttgggttggttccaagtctttgctattgtaagtagtgctgcaataaacatacatgtgcatgtgtctttatagcagcatgatttatattcctttgggtatatacccagtaatgggatggctgggtcaaatggtatttctagttctagatccctgaggaatcgccacactgacttccacaatggttgagctagtttacagtcccaccaacagtgtaaaagtgttcctgtttctccacatcttctccagcacctgttgtttcctgactttttaatgatcaccattctaactgctgtgagaagatgtctcattgtagttttgatttgcatttctctgatggccagtgatgatgagcattttttcatgtgttttttgtctgcataaatgtcttcttttgagaagtgtctgttcatatccttcacccactttttgatggggttgtttgtttttttcttgtaaatttgtttgagttctttgtagattctggatattagccctttgtcagatgagtaggttgcaaaaattttctcccattctgtaggttgcctgttcactctgatggtagtttcttttgctgtgcagaagctctttagttaaattagatcccatttgtcaattttggcttttgttgccattgcttttggtgttttagacatgaagtccttgcccatgcctatgtcctgaatggtattgcctaggttttcttctagggtttttatggttttaggtctaacatttaagtctttaatccatcttgaattaatttttgtataaggtgtaaggaagggatccagtttcagctttctacatatggctagccagttttcccagcaccatttgttaagtagggaatcctttccccatttcttgtttttgtcaggtttgtcaaagatcagatagttgtagatgtgtggtattatttctgagggctctgttctgttccattgatctatatctctgttttggtaccagtaccatgctgttttggttactgtagccttgtagtatagtttgaagtcaggtagcgtgatgcctccagctttgttctttttgcttaggactgacttggcaatgcaggctcttttttggttccatatgaactttaaagtagttttttccaattccatgaagaaagtcattggtagcttgatggggatggcattgaatctataaattaccttgggcagtatggccattttcacaatattgattcttcctatccatgagcatggaatgttcttccatttgtttgtgtcctcttttatttcattgagcagtggtttgtagttctccttgaagaggtccttcacatcccttgtaagttggattcctaggtattttgttctctttgaagcaattgtgaatgggagttcactcatgatttggctctctgtttgtctgttattggtgtataagaatgcttgtgatttttgcacattgattttgtatcttgagactttgctgaagttgcttatcagcttaaggagattttgggctgagacgatggggttttctgaatatacaatcatgtcatctgcaaacagggacaatttgacttcctcttttcctaattgaataccctttatttctttctgctgcctaattgccctggccagaacttccaacactatgttgaataggagtggtgagagagggcatccctgtcttgtgccagttttcaaagggaatgcttccagtttttgcccattcagtatgatattggctgtgggtttgtcataaatagctcttattattttgggatacgtcccatcaatatctattgagagtttttagcatgaagagctgttgaatcttgtcaaaggccttttctgcatctattgagataatcatgtggtttttgtctttggttctgtttatatgctggattacgtttattgatttgcgaggacttttttctttgttaaaatgttgctctgctttcagcattttctcccttgtagtattaccataatgtatttaagattgagcacttaattctgaagtcactttaagtatacctcaaccaaagggaaattaatatattatttctaatgagtgtatttaatataggtaagtagtttgtacacttgtgaaattcttggcattaattgatgtccagaagctgaaagctactctctggtacattaaaaaaaaattgtgtgtgtaattacaagaaagtttgatgtcacagttgcaaaggagttgtgcaaaacaaattgcctttttccagtaaagataattcagcaagttcatcttgagtgtagtgtgtggtttcgtttttaatatgtcctcagcagtagtcatagattttatcttcatcatttaagctttattttctggcccacttgcacagatttaagaaaaatctcactggggttagtgtgcagtcattcagacagcaaatacagcaaaagtaggtgaaaatgtaaaagtcattaaaagaagaattgtgaaattgctcatctcgcaaccacatcaagcaggagcaaagacaactacacagaatcttggtgtaacatacactcattaccacttggactttctcctacagtattttgcagtttgttttttggattctttagtgttatataatatttcaaagtaatatgtgactgggaaatattggaataggtatcagaagactgtagaatttattttgccatttaaatgcttatgtccttgaacaaaaaatgtaaacatctttgaccttcaatttcttgttctattaattgcctgctttttaggtctgatgagaaaggaagagaatataatttgcaaataaaaagaagcaaaaaaaaaaagcagtagttttattgcaaggggctagatggtgatcaagttaggatatagaaaacaattacttgttcttacatgttattctggagaaagatgagatggatacccatagttacagcagaagcgtaaaaagaattctgtttatgcatcatctgtttatgtgttgactttcacctgtatgttttcaagtttatatagggctatgtgctaagattcccaattttcccctttcataccacttattataccagttgcaattaaatacatatataattattaataacttttttaaaaacctttttgttttgagagaattgcatattcagaggaagttgcaaaaaactttacagggaagtccttgtgtacccttcagactgcctgcctcaatggtaacaacttggataactgtggtacgatattaaaactgggaaattgacattgatacaattcacagagtatatttccatttcaccaactttataaggactcatttgtgtgtgtacacaggtctatgtgtagcttcttataactaccgtaatcaagataaagaattattccatcaccacaaggctcccttatgctgcctccttatagtcagtctatcttgtcccagccctatccctaacccgtggcaaccactgctctatctctataattttgtcatttcaaggatattgtgtagatggactcataccgtatgtaactttttgagatccatccaaattgtgtgtatctgtcatgcatttctttatttattgctgagtagtattccatgggatggctatgctacagtttgtttaaccattcattcattgaagaacatttgggttacactattataaatagagcttctatgaacttttgtctgaagatttttgagtgaacatacatttttccccctctgggataaatgcccaagagtacaattgctaagtcatatggtaagtgtatgtttagtgaattaatacttctttagcttgttgatatggtgagttacattgattttaaaatgttgaacacaactggtataaatctcacttggttaaagtatataattatatatttccatattctatttgctaatattttgttaaggtataggtagagaggtgtgagaggttaaggtataggtatgagagatgtgttgtagttttttgcttgtttgttttgtactgcctttgtcaggctttggtagggtaatagtattctacatggtttttagtgataacccttgtttcattattgctactgtattagtaatttgtgtcattttatctttttcagtgatgatttgctggttatagtgacctttttcaaagaactcgctctttatttcatctttgtctatttttatatttttaatgtcattgatttctgctcttatatttattattttcttccttctcactttaggtttattttgcttcttgtctagtgctgtgattattagtttaaggtctttctttgtttctaacgtaagcatttattgctataatttccctcttggcattgcttttgttgcatctcacaaattttgctgtcttgtattttcatttctatccagttctatatagtttaaatttttccttagaaatttgcttgacccatgaaaatatttgggagtgtgtcatttagtttccaagtgtttggtgatttacctgttgtttttctgttgttgatttctagtttttttccacaatgatcagaaaacataagctgtataatttttaatttttaagtttcttttatgactgagggtatggtgtatcttggtggatgttccatgtatgcttgaaaagaatgtgtattctgttattattggttgcagtgttctatacatgtcagttatgtcctgttcattgatggtggtgttctgttcttctgtgtcttcttgatcgtctaatagttattttcgttgctgaagatcccaactataattatggatgtctctgtttttcctttgagctctgttggttttggcttcatgttaaatatctgttgtttggtgcatatacatttaagatgttttcttgatgaattaatccttgtatctttgtacaataattttctttgctctgaagtctacttaactgatggcagtgtagccatcactacttaaaaaaagtagttagtatggcatatcttttccatacttctgttttcaacctaccaatgtcattatgttttagtgaatttcttatagacgctatatgcttgggtcttttaaaaaagaaacttctctgccaatctctgtcttttaactagtatagttatatcatttacacttaaaagtaattgctgtgttagggcttaagccagccattttattatttgttttctgtttatttcctgtttttcatatctgttcctcttttctggtctttctgtaggttgcttgaatattttcagaattctatttgacatgtttatagtgtttttgagtatctggcttagttaaccttttttagtgtgctttgggtataacaatagatgtaacaacttatcacaagggatacttttattgccttttgccaattgaagtttagagacctttcttccatgtaggtcctttctccttttccctttttaaaatttaatatttgtattttctctatacaccttgaacaccacatcaaatgttgttataacgtttacttcaactatcaaatatgatttaagaaactcataagatgaagaatagttcattttatatttaccatgactattacccgttccagtgttcttcctttactcaaattaaaccttattgatacatcatttcctttttgtttgaggaacttttttttaggagaacctcctaaagatatgtctgttagtgacaaattagtttccgtcatctgagaatgttgttcccctttgttcctgaagggtggttttgtcctatatggaatttggccttgacagttctttttctttaacatttgaaaaatgtgccatttctttctggcttccatgatttctgatgagaaatctgatggcattcaaattattgttccccttaaaggtaatgtgccatttctctttggctgcttttgagatttttttctttgtttttaattttctaaacttgacttatgatgtatcttttatttttattttttcccacttagggtttttctcagcttcttgactctgtagatttatgtcttttgtcaaattgtgaagttttcagctattatatctttatttttttcagcgccatactttcttctcttcctctaaaactctgattggatgaatgttaggtcatttgttattgtcctacaagtccctgatgcctttcttgtttctttgtctgtttttctgtgttcagactaagtaaattctgttgatctgttttcaagttcactgatcctgttctctgtcaattccactccactattgagcccatccagcaagtttttaattttaattagtattttttctattttgtaattatttttggttcttactttttaaaacatttcatccttcaaggagagctactttcaatatacatggaatttcttggaaaaactagtaacagttttaggttatttgtatatatgaactaatgttactcaagattttaaacctctgcagagttatctctgtaattagcagatgaagcatgaacatacataatttttttctctttttgtctcaggtaattccttgttacaggccctaataaaagggaaatggggaaggaaatggagaagagaatttaggccttggcaaattgaaaattgtctgtagtatctcactgacaggtaaagtaggaattttgaaattagagaaaaggaaccaggaatgaagatgaaatgaaaaatttatatttacttcactaaaacttttaaagttgtcatatagtttcagatttaaaaagctatttcttccagcctaggcaacatggtgaaaccccttctctaccaaaaatacaaaaagttagccaggcatggtggtgtgtgcctatagtctcagctacttgtggggcggaggctggaggatcacttgagcccagaaggttgaggctgcagtgagcgaagattgtgcccctgtattccagcctgggtgacaaagtgagatcctatctcaaaaataataataaaaataaataaaaaatcaaaaagttctttctcctttccttcatttcccttgaagaatactgaagattttacatagatgacaaattaggtaaatctaagaaaaaacaaaaattaagtagaacaggtaactttcagtggccatacttgagatttaggttatattgactgctgaggtttatcagtttgattcctatccctacaatataattaaaaataaaccatggaccccccccccccattgtcagactcactgacagtataacattgtgattaaaaagctctttctcagtaagtatgaaaagttaatgcatgaaaaataatatatgttaatttagtgggggaaaagatggtttctgtattacagtggtattaacacaagtagctttccatctgaaagaaaataaagttggatccttatataatggattaaaggtttagaagtagagactaataaaaattaaaatagacatctgggaaacaatatgtaaaatatggaaacccagaaaagagttagtatctgcattatacaaagttttcttacagactgataagaaaaagataactcacttggaacctagacaaatgatatgaagagacaatttacagaaaagatagtctaaaaagctaacaaacatgaaaaaatgcttaaacacacttgtagtcagtgaaatgcaaattaaagagtaaggtattttatatccaaagactgtaagacttacaaagtgtggtatcacttagtgatgatagggttgcagagggaaagataccattctacatcgctaaaagaattacattctttttttgagaataatctggcaacatctattaaaattcaaccagtaatttcacacttggcaatctggcctataaaaacaaaagcactggtagatatgaatgtatgtgagaacataggtatttaagggtacttattgcagcattgttctgaaaaaactgggaactaattgagtgcttggcaccagggagatggtcatataacttatggtatatccacattatggaaccattaaaaatgaattacttatataaactctttgacttggcaggatatccatatgttattaagtatgaaagcaaaatgcatagaagtatatataatatgctactatttgtcaaacactggcaactcattcatgaaaaaatacataaatgcttaacatatatttgtgtataattatagaagaatatggaagactatactaagttaataacatgggtttgggagagatatggatggtaaggaggagaggtagagtggaggcatgatgcaaaaggttaaaaaattgtttagaaaaatcacagcatgcattatatctcatttatccatataagtgaaattatatatatgcatataagtagaattttaaaaataaagaacatgagctctggaatctttcagacatttctggattcaaattctgactctgccactttacaacttactagctgtgtgacttaggcaaattgcgtaatgtctttgaatcaattttctcacatattttcttggggtgggaggatgaaataatagtacccatctatagggttgtcatcaggattaaatttagatagcatctgttaagtgcttagcacagtacctggcttacagaaagcactctcagttattagttcttactgttgccttggttcttacgctcttggacatttgttaatatctatttttaaaactttatcaccatcctgccactttcttgaaacactcctcactggcttacattactttacatgtcttagttaatgcctgtttctaattgttcctttttattttgctgatatcttttttccttacctatggatattgctcccaaaatatagcaggggttgccaaagaagcttttgaattagggtgactgggagaatattagtccatatatggcagcagagaagtcatgatgtagggtttatagggttgatttttaaaacaagatgattttgatacttgctctgcagaagttttatgcatcaatgaggcacccagatgaaaatgctcaatagctggaaaaacttgacaggaacttgagaagtagatataaaggattctctcacttggctaattctcgaagtggatgtaatctccaggggagagcatatagagaagggaatccagggcagaaactttggggacagggaataggagaggaaaaggttcccattgaggactgggaggtggcatagaagccaaaatagagaatttctttaagaagctgctggagaaactgtatgtctactttgttctctcttgagctttagttctgtggctcacattgtcttctggccttgttccttattttcttgaaacttaaactacatttgtaactaatcccagcttcctttcctcccactaaattcccttcttttacatttccccctatatgtatgtgaggagtgctttcattcccctcatctttggcatcaaaatctgtcatctctgcccctttcccttccctggttctccatatcattaccaagactctcattcactcctttttcattcccactcttgcctacatttgattgattattatcaaaataatctaaacaggatattttgaaataatctaaacaagattattttgatagctgccaaactctagtgtaatcttgtgttttttctgtctttcatagtcctcttaaaagaactagtttaggccaggtgaggtggctcatacctgtaatcccagcactttgggaggccgagaggggtggatcacgaggtcaggagatcgagaccgtcctggctaacacagtgaaaccccatctctactaaaaatacaaaaaattagccaggcatggtggcaggcgcctgtcgtcccagctactcgggaggctgaggcaggagaatggcgtgaaccccgggggcagagcttgctttgagccgagatcgcgccactgcactccagcctgggcgacagagcaagactcatctcaaaaaacaaaaaaaaaaaactagtttaatccagttaatccagtccctctgccttttaaatccaccagattatctttcctccaacatcttcccaaactgttctgaggaaggagatgaggtattaatgagagagattagtaggatcaccattaatgaaatatagtcaaatcagtttttagaaggttgagtccgggcgcggccgctcacgcctgtaatcccagcactttgggaggccgagatgggcggatcacgaggtcaggagatcgacaccatcctggctaacacggtgaaaccccgtctctactaaaaatacaaaaaaattagccggccgtggtggcgggcgcctgtagtcccagctactcgggaggctgaggcaggagaatggcgtgaacccgggaggtggagcttgcagtgagccgagatcgcgccactgcagtccagcctgggcgagagagcgggactccgtctcaaaaaaaaaaaaaaaagaaggtcgaatacctttttggcaccagggacccattttgtggaagtcaatttttccacaaatggtggggagtggggagtgatggttttgggatgaaactgttccatctcagatcactgggcgttagtttctcatagggagcatacaacctagatccttcgcatgcacagttcacaatagggtttgcgttcctgtgagaatttaatgcctccactgatctaacatgaggcggagctcaggcagtaatgcttgcttgccgcttatctcctgctatgtggcctggttcctaaccagttccagaccatggcccagggattgtggacccctgttgtatactatgtccccctctaaagcattctcagttcttatcggtgtgctttgaaaaagttcctcagaagtaaagcttatgtgcctttgtgtttaacttaactttgcagattgtgttttccaaagatggccacaatagtaactcccataccacatgttctttttacaatatgactttgacacttcttctactgacccctctcagtagaaatgtcacagtcatattgtacaaagaacatgctgtctttgaatattgatgggcttctgtctaacatggaagtgatgctatgtgacttttgagggtaggtcataaaaggtgatacaactttaatctggtactcttgagacatttgctcttggaaccaagccaccattttctgaagaagcttaagtagcccatattggcaggccaaatggagaaggcacatgcaggtgttccaggccaacagcctatgtgacaacagcatcagtcaccaagcatatgaacaaagatacttccagatgactcctgcctccagtgatcagatcacacccagttcttgagttttctcagctaaggccccagactttggatcagagataggctatctttgttgtgccctttctgaattcctgacccacagaatccataagcatagtaaatggttgtcttaagccactaagttttaaagtaatattttagatagcgagagtaactggaacacccaatgtttcctgagaacactttattttcttaagtatggtaactggtagcttgtgatacatgttccttggaaaacctgtttgtggaatttctggttttctaattttttagcttgccattcaaggccttcatagtgaacagtaggacagcttcggtattggcctatacatatccagcaaatcagtctcctccctgaatggtattttatttatagtttctgtatcagtattcttttactcttctagaaagcccttatgtttattcgctgatagtctcttttgtgaagtgcctgttcaaatatcatttttctattgagttgtctcttactgatttgtaaaagttctttgtaaattctggatatgtgcatgttgggacaaaaatctatttttatatcctgtgtgtatatatatatttcctaacaacaggctcgttttcagaatactatacatatgtgtatatatgtgtgtgtgtatatgtatagtgttctcccactctgtgacttgccttctgactctcttaatagtgtcttttgctaaatccaagttcttaattctaatggaggatggaatttgaaagtcttttcctttttttttgagatgaactctcactctgctgccaggctggagtgcagtggtgcgatctcggctcactgcaacctccgactccctggttcaagtaattcttctgcctcagcctcctgagtagctgggattacaggcacgcgccaccaagcgcagctaattttttttttttttgtatttctagtagagatggggtttcacgatgttggccaggatggtcttgatctcctgaccttgtgatccacctgcctcggcctcctaaagtgctgggattacaggtgtgagccaccacgcctggcagtcttttcctttatggctcatgtttactattaccttgtttacgaaacctttggccaccctaagctcataaaggtatgttccaatgttatcttttggaagctttattgttcacgtttcacatttagatctataatatacctagtactatattttgtctgtggtgtgagaaaggagtcaagattcatttattttccacatggatatccagttgaaccagcatcatttatttgaaagaccttgttttccttactcctctgcatgaacgccattgtcatgaatcatgaagatatatctttggatttgtttctggattccctgttcttgtccactgttttgtctatgttgtcttcaataatggtatatttttattaaacctggatatagggtaaagtcctccaactttgtggttgttcttcaaacttgtcttggctattctttttttttttttttttgagacggagtctctctctatcgcgcaggctggagtgcagtggcatgatctctgctcactgcaagctccgcctcccaagcgattctcctgcctcagcctcctgagtagctgggattatagacgcccgccaccacgcccggctaatttttttgtattcttagtggagatggggtttcaccgtgttagccaggatggtctctatcttctgacctcgtgatccgcccgcctcggcctcccaaagtgctgggattacaggcgtgtgagccaccgcgcccggccttgtcttgttattcttgactttttacacttccacatacatattagaattagcttaacaatttccatttttaaaaaaaggaaagggaaaagacctgatttggattggaattttacaaatctaagaattaatttggagtttatactagtgagacttccagttcacgaatacagtttgtcccctcgttatttaatttctctcagtaatatccagcaaaccacgtagctttctgtgtagaggtcttgcacatcatttgttagatttattcctaagtatttgatttttttgatgctgttataagtggtctcttttatgttttattttcaaattgtttgttgctggtatgtagaaatatatttgattttcatatattgaccttttagctaatgaccatgttgcattcacttattaattcaaataatatatgtaagggtttttttttttttgcattttctatgtatgtcatcatgtttgtgaataatcacactttcttcctatccaatctaaatatatttatatctttttttgttttcttattgcattggctgagacctcaagtatagaagtgttgatagcagacctccatatcttgatcccaaactcagagagggtttcaatattttacccttagtaaacatttactgaagatttttaatacttgtattatatgaaaaaaatgaatttcatatttatattttataaaagatttctttatttctcacttgttaagaattttttcatgactattggattttatgaaatattttctgtatcaattgagatgattatataagttttctttattctgttaatgtggtaacttaaactgattaaattttgaatatttaaacaacttctcatttctgatatatacacaatttagttgtcatctattacccttttgtatagcactagatttggtctgctaatattttgaatagtttttgcatctatctcaaccttaattataatgtacattttaaagtaaaaattacaaagaattgctgattgcataaaatgagttgggaagtgtccctctttttctattctctggacaactgtatgtaaaattggtattattccttccttaggtgttaatttcatctggaccaagaattttgtcttaaaatataagtttattaagagtcttctagtctgttttctttttgtatctgttgggtttggtttttttgtttgtttgtttgttttggaatttgcccatgtcaagtttattggcatacatttcttcatatttgtttattattttttgatgtctgtagaatctggagtgatatccttttttcacttctgatattgattgattgtaccatctcttttcttgagaagtcaagggtttacttatttataggtgttttcaaagtaaaaacttttgggtttgctaatcctctctaatgtaaactttttttcctatttcattaatatctactcttcattattatcttttttctattttctttatttggattcatttattttttttctaattccttaggccaaatggctaagtcctttatttgcagccttgttttctaatatatgcatttcaaaactttgaattttcctgcattcgtatctttatctgcatttcatacattttgtgtcctattttctattctctattgcttctctgctttctgcttatttctatattaattattttctatattttattaatttgttatacagtcttataaattctttcagtggttatggattttttttaacatttttaaaaaggttttctggcttttctaattgttctcaatggaagattatttgggatgtacagatcaccagcatgtttatgttggcttctaggccaattttaaaaaatgactaaagtaaaacttctgttaccaattaaaaattttgtttttctgccctgggcctttaaaagtcaaacctgcacttgaccagtcaccatatattttccaagtaggtttaatactagtgcctaggaatagcactaatgaaggttcagacacatgcaaagtatatgctctgctctgtgtcatcgtggcacaataacagagtccacagaatggtccacatttaatattattatgtttaaagtttttggcatttgaggaagttttagaagcttcctgttcatcttacatatgtaataaataatgtaagttatgactggatattgttggtactttaacttggaaagaaaaccatcttattacctctttttcaagtttttttgaaagactgtctggacatttaattgaaaactatttggacattgcaacacaaaccttaaaaaagttgttatcatctacagttcttacatgaataaagcagtattaccaagtagccaaagtaaaatgcagacattttactgtttgctgaagctgattaagatgtattatttataactccactttcaaatattttatttattagtacagtcttactgttctcaatggctaactttataataaataaatattatatttacatagaatcacttaatgtatactaagtatatatttaaacatataaataaatcagcccatgactttatatgtttgtattataaatagtataacaaatattataaatttgaacctctaaaatttatactagtcaaattatctaggtttgtatgagatttaattggaaaaaaccctcttactaaataaaattagaagcccattaagcaaattaaaacctatatttaagaaaataggcttgcctaagttacacagattgtatgcacgcttggtttttatccagcacaagtcttactgcttatgaaaattgattttattaaagattgcttatgggctgaggctgaaggcgtgccattatcctttaccagtatataattacaacgtactctcctttgttaatctgacagttatttgcagaactgaactaccttggattcttaggtagggaagagttttaattctcgtgcctcagattttccattgctgcttttacgtgggtgtgtgagattcagaaatacgagagtgaagtaaaataaacgatgctttataaatacatggaattaggtgcctacaggggaagctatacagcagctagccagcattttaattccatgtttctcagcttattttatttgaggtgttagagttgtacttttttgttttccaatgtttatagactgagcttgattttcatatctagttgaattctcactaattttgtggctaatcaagctcccacaatgtcatttacttgaagttaagtattgatatttatgatttgaatatatttaacaactttatagttaataactttaaattctcttctggtgaaggtattcagtttggccagtgtcttctcagtcagtgctctaatttaatatagtgtttagtgctaaatctaatattgtttctaacacattataaaggtcagaacttacataaatatactgtagtttgtgatagttttggagaatgggctacagtggcatttattagtgaagtaaaaattcagtccataagaaaatatgaagtgatactttatttagtccatatatttttaatggacagtggtctccactttctaagtggggatttttcatttttctaagtattcttaagagaatcagttttggacttttggttaaacatagaggttagaataaatatgtttatttcttcctaaattcactaaattaacagaataaacaataaaggaataaacaaagagaatgaaagaggcaatataacatcaggctagagaagtgaaattttagaaatgttagaaaagaaatgcataaattataaccaacttagagcagttttgatggaacataatatttgatcattatattgagttacaatttatttaattattccttaatatcgagtcatatatataatttttttagtgtctgataatgggttatcataattaagcattcatctatccatgaccatttagttttttcagcttttcactgttataattagcattccatgcatcagtcttaaaatattttaggtttttttcagaattgaatgactgaatcaaagtttataccttttatgagtattgatccatgctgccagattgctttgcaaagccatttttatgattaccatcaatgtgtggaatttcccatttcactacaacctagccaacattgcatttgccttaggatgttcaatctgggcagggacacatagcccttgcatcagttgcttgtctgtggtgctgtgggaaagtgtggcatgacatgacaaattttaccaggtgaagcttagctgtgtgcctttaccactgccaccttataataaagacagatgctgtgagtttagaggaagaggtgatttcctttgtttacctggggtgctcaaggaaggcttcatgtaacaaatagaatttgagctgtgtataatgagggaaagatttataaagaaaaatttgcacagacacatgagagatatatcagtctggatcaaatcagaagacagaagccacatagtaactaaaattgttagtttaacttaaagaattattagggtatgataagagaaaaactatgaagtcactctataaggagaactccaaaagttaccctagggctgaggaaaagtacccaatgaaggacggaattgaaatgaggttcagacctcattgaaagtgtggctatagcccattggatggtagagaaatttgctgcgttgtctgagccaacgctggtgcacaatcacagtgtgagcaggtgagttaagactggtaggagagcatgcagagggaatcagggcagtgcggcagggccacagtaacaacccttggggtgcaagtgagttgaggttggctagttagtagaaggagttggagcaccactttagataccactggaattgcaagttggagaggcctccctgtgtagcaatctagagcactgctgtttacagcttggggcaggacagtataccaagctgctgtgtggaacaaaggtcaggtggctggctggccaagccggtgcatatggtttgaggagaggggctggggagtagccacctggtctggggctcctggctatagtgctgctgctgcctgagtagagagctggagaaagaaagcacacagccgctagccagatgctggagaaagctttcccctgcaggcacctagtactacagcagtgttgtttttcagccttggcattattgaccttcagggctggataattatttgttgtggggagctgtcctgtgtattgtaggatatttggcagtatccttggcctctattcactgtatctcagtagttccccaagttatgacaatggaaaataatctccaaatattgccatatgtcctctgagggcaaattgtctctagttgtgaaccactgcaatagagaaatctcacagcagtggaacagtggaggggtaaaatataagctctccagaaacctgctgagaaaactccttccctccctttccagtgcactgtattgacagagcttagcatcatgtcatactggcaaatgaaaaatattttaaaggcccagatccacttttccagataagacaatgaagaatgaatttggagtagagaggtaataaactgatagctgtacaaagtacagttatgggattaaatatggttggagaattaaatatgagcaaagttatagaagcagaaaagcgtaggggcactagggaaattcaaggacaagaagactaaagtgcaaggctgatgtaaagtggtaagaggagaataagctagaagggccctttgaatcttaactctggagtgctttgagtgagtggaagagaggggaagagaaagacagaaagaccaatgaaggtttgagatttggtgctgtcagtagatgaggaaggcagaggcagaggtggaggagtgatagaaataattgggacctacatttttgcacataactaattactcaggaaatggttcatgatagtatatcctgggttttttcccacctatccatttcataatttaatgtagtgctttaatacataaaatatgcttattggggctggatgtgatggctcatgcctgtaatcccagcactttgggaggccgaggtgggtggattatctgagatcaggggttcaagaccggcctggccaacatggcaaaaccccatctctactaaaaatacaaaaattagccaggcgtggtggtacgtgcctgtagtcccagctactcaggaggctgaggcaggagaattgcttgaacctgggaggcagagtttgcagtgagccaagatcatgccactgaactccagcctgggcaacgtatatatgtatatatatatacatgtatattgtgtgtgtatatagatagatagatatagtatgtgtggatatgtatgtatatgtatatatacatatatatacacacatattcatacatacacacacacacacacacatacacacacacacacacacacacacacatagaatttgggagaagagaagagtaatatgaggaaataagagaccatagggagttcattgtccctcttactcttctatggagtgaatgcaagggcaagccagaacctctgcactttctcaccaggtgaaggtaggggaacctgtctcatggtaatgcacagagctaaaagagaattctagcagagggaatttgtggaagttacggttttgactcaaacccctctatagtctttcatttttccaaggatatgtctcctcctttctaagtactttcgtggcttgttttacgtgtcttgcaatcgtataatccagcatcactgaatagtcttatagtttcccagatgtccttgtggcatttccttctaggtatattgaaacttgcccttttttattcttgaattttgtctttggctcaaggttttacattttactgactcttcatactacttttctccccttatttagaaatggactcagaactcaaggaagaaattcctgtgcatgaggaattcattttgtgtggtggagccgaaacccaggttctaaaatgtgggccctggacagacctctttcatgatcaaagtgtcaaaaggcctaagctgcttattttcattattcctggtgagcgtaaaagtctgggtgaggagactttttgtagatactcataactatgtctgattttaaagtatagagaatttggtaaatatggaaaaccttggagaaggaattaaaatcgcttgacccattgttaacaaccacccttaatattttgacgtctggattttgtgtttttcttctatgtatttacattatgttgtctgttgtgtgtgtgtgtgtgtgtgtttgtgtcacagttggaagtatgtactatatatgcagttttgtaatgtggtttttaaagcatttcttaatatttaaaacttcatcaatatttttgccagttttctaaactttttctgcctcatttcaacatgattatatgtttattatagaatatttggccaggtgcaatggctcacgcctataatcccagcactttgggaggctgaggtgggtggatcacaaggtcaggagatcaagaccatcctggctaacatggtgaaaccccatctctactaaaaaacaaaaaattagctgggcgtggtggcacatgcctatagtcccagctactcgggaggctgaggcaggagaattgattgaacctgggaggcagaggttgcattgcccccagatcacaccaccgtactccagcctggggggcagagcgagactccgtctcaaaaaaatatttaaaaaaataaaaaataaaaaaataaaaattaaaaattagaatattctgatatttggcagctgagtcacttgtaacttttgctagatcattgtcaatagaattagggacagatgcttgagcgattgcaggtattcaaaatgcattttaaattgtgagtttgaacatacatgtttattcttattctgtgaattgccagttcgaaacccttgcccatttttcaattgtgttttcaatgttttccttattgattttcagttgattcttacacaactgtaaaattgtgttatatctgtcatacgtgacaagaatctttcctggtttgtcttttgacatcatttacaatgtttatttggttgtatagaaagtatctttgttatgtggccaaaatgctaagtctcttcctttaagacttcagggttttatgagtttcttagagagggctttcctactccaagattataaaacaattctgccatgtcttctagtatttttacaatttcatttgtgatctttaagttgatgcatctagattttaagggcaggcactgaggaagggatctacttttcttctccctctcctttggatggcttattacatggtccacaaccatttattgtatcatctgcctttctcctactgccttgcaatgctaactgtattgtaaagtagattatcctgtggccaggagtttctttccatgtttttcgcctcttcatgtgttcttcatgttttttaataaatgcagttttatgatacttttacatattttttggaacttgttcatttttattcttttccagaatattctttagcttcttttcttttggctgcagaatatattttttggcttcattaggaggaaaaaaaaagcttaaatgatctttaaagtcaactttcctaaaattgatctcgtaaaggcagagtataatgatagatactaaaggctgggaagggtgcagggctgggaggagggatgaagagagaggtaaacaggtacaaacatgcaagttagatgaaaggtgtaagttctattgttggaacttatttataccaacagaattggcatagtcggcagagtagactgactatagttaacagtagtgtattgtattggtataaagtagctagaagagaggccttggatttttctcaacacatagaaatgatgaatactcaaagtgaatgtactaaaacaccctgacatgatcattacacgttctatacaggtaacgaaatatcacatgtaccccatgaatatataacataaatatcaatatctttaaaaaaaataaataataaccaaaaaatcagcttttctagttccaacagatgttctcagaggcaaccacttttaacactggtatattcctgtgatatttattccacattcttttttgtttgtttgtttgtttagacagagtctcactctcttgcccagactggagtgcagtggtatgatctcagctcactgcaaccctccacctcctgggttcaagagattctcctgtatcagcctcatcagtagctgggattacaggtgtctgccaccatgcctggctaatttttgtagtcttagtagagacagggcttcaccatgttggccaggcgtgtgtcgaactcctggcctcaagtgatctgcccaccccagcctcccaaagtgctgggattataggcatgagccaccatgcctggcctttactcgtttctaaatgaaatacttatatttcttcttcttcagttgtcttttgttttgttttgagatggagtctctctctgttgcttaggttggagtgcagtggtgtgatctcggctcactgcaacctccgcctcccgggttcaagcaattctcctgagtttttaatattagatgttatctattgtcttcctccatgaaagaaaaagattagctttcttatactttcccttctccatgcacaatcatatacccctccttctccatctattttcctagtatgggaatatttcagttttttgttaggtcaatattcagtgcttttattattatgactatgtattatattatattatgtatattatattatattatattaattatattatacatagctaagcctatagggaattgcgcatgcatttcctttcttatatatttttgtttgttttccctgggttaatgatgttctgttatctttttgcttagttttttgtgctttaatcactcatttatcctagaactattctctagaagtgaaaagaatcctttcaatgcatttgagtcatcagtcagttttcagaatgctctgtcctttggctccagtctggactcattgctccccaggcctgctgcacagttgccatcctggggacttctgtcactttcttctggcttggatccctcgtttctcagatcccacatttttatcttagtttattctcttgtttttggtagagcatatcttctagtagcttccttagaagaggtacatgagaagtaacacagcatgctgcaaaatgtcttagactctaggttggaaataatttttctttaggaggaaaatggagggcgttaatggagggcattaatcattgttttccaacactcagagctgcttataagaagtattggtatcatttctgattttcgccttttgtatgtgaagattctctacccacattttcgagaccttttctttgttctgagattctgaaattttacagtgaagcaccttggtgtgactgttttttcatacaaggtacttgggttttggtgggcccttttaagccagaaactcatttcattctaatagcgctttgtttttcttttcttttttgtagtctcatgtttaatggatgcaatatcattttcttttcttttcttttttgtttttgcatttgcaagaattttcactgtgttccttttttcatttgcattagtctttagttttcctcaaatgtctggcaatccttgactatccattcatgtttaagaggaagacaaaaaacaaattggaagctttgcactcagagctggggcttatccagaggtgtgtctagggtgattagccatcctagcttgcctaggactgagaggttttctaggacataagactttcagtactaaaaccatgacagtctcgggcaaaacagaggagttggtcgccctaggtgggcctcatcctaaggtgattgagtagggacccagcatttcattgacggatttccagctttcagtgtctgaagctctttcttttattgttcagttttcctggggaggaatcttccaggctcctgtttgaagagtggaaacctgtctgttaatgttcaaagaggaacaggggaaaggaggtggtagtttcagtgtttggttatgcctagtccagcctcttctcagtatggtactttcattctcagctggactaagattcctgatcgagaatttctctttgttttaaccactaatgggaataaactattcttctgccaggatgtaacagtctttgtggaagtcagtccgttcagcatctattaacataaaaatacatgtacttttccagtagtgaaggagagtttgaaattatagtcatggcaagtgctgtttgatggagcagagatttggaatagcttatagcataggatagagaaaataagtagaaacattatcttaaactcgagaagggatatccttctaaggctagaaagaaggaggtgaaattggttactaaaatggaaaagtataaaggcgtatcagagggaagtgaagtctcctgcttcctgactactgttttttctgttgagagttgagaccatgttttgaatgctaatcatttccagctcatgaaaagatactaggcctgtggttcttaaagttggtgtcaggatcagaagtattgcttgagaactttaaaaatgcagttcctgggctctatccctgaccttctgaaccagaaagtctgggggttgggcaatcagtgttttaacaagccctgcagggaactgtgatacgcatatctgatccagggtgtagtcatgggaatgaattgcttaagtttaatgtaggtgaagttctttggatttcatcataataatgaattatgggacaaagtttttggctcagtcagtccaactggattttgaaatgtcctgacatgacatgacaagtgaaactgtcatttaagggtcaaggctttcagagaaagtgtgagtgactaaaaagttgatagatggaaatagatggcttgagtcttaaagaagaagaggttgttgtaatagtgaggtgaaatagtaagtgggacagacaacccacccacttccccacctggagatagtatttattccctcactcttttatcccaggtgctaggaatactgtgttgcattaagtctttgctctcattgagttatatgtggtgttagagaagagtgactgaggcctctgctgaagaggattgaaaggaagagagcccattacaggggagagccagatttcagatatggtgaggagataaagggagtattcagtgaagacactgagaatggagggaagcataaaacatttgtagtttgatagtctcattgtttatagtgctttgacattttcagatcatatttcatttcctagtgttcttttatgtttgccctgctcattagtttgtgggatttagaattgtattttgtgtgtgtgtgtgtgtgtgtgtgtgtgtgtgtgtgtgtggcaggtttcgggggagctaatctatttacactgtggtaataatcaggataacagtatttcaaggattgtgaagccactatggacaccatgttatgtccgtctctgatagactgacataacatttcattttaaatcacattgcttttgcagctagcaaaattaattcttcacttctaagttagtaatgataattgtgagttttcttttcttttttgtagtctgatgtttaatggatgcaatatcattttcttttcttttcttttttttgcatttgtaagaatttttactgtgttccttttttgatcagaatccacagattgaagaacttttaatttagtttcattttttctgatgaaccttagatcttggatttctgtaaagtaacattgtccttggactttctttaactagtgagatgaacaaagggaatcagattgagaactcaccatagagtacactgaatcataattcttaggaggtcatatggagataacagaaccatgtgaagtatcaagtgctgtgagcacagtggttggagatatagcagataaggctccatgaatgagtccaataggtctgtctacatggcaacctattatatagatactgtgccatattaacttgatatgtggcagttttcgttcctctccctacaaaattaactggaaggtataagtctatacttgcagcattgtatagttggagattattagcagtcagggcctagagatgatcactacaacttctgttatacattgcatgggtatttgactgatttgactgttatgagcatgttcaagtgtgtgtttataacacatttttatgtaaacttttgattaaatattttacttgcatgtctgcattggaatgttttccaacatccttacacctggacctctcccatacccctccgtgtgtgtgtcttttttagttgcataagtgtaggccttttaattttctttgtggtttcttaacaaggaggtttaaatggtgaagtatgaagtactgtatgcaatggtatttaagcattttgcattgcattttccacttctgtctctgttataagttagacctttgtgatacttgctatgcgttcagtttgaaaggatttattgtatgtgagtgccatgtacccaatctagtgctgcttggtgccactggatacagagaactatagcaagtgatggctacttttaaagaagttaaactttcaagtttggtacgttatacatgctacaatgttaagtatatttctgacaggataaaacttccatttttttctgcatctgttgaggatcgtatggtttttcttttacggttggttaatgtggtggatgatgttaatttttgaatgttaaaccaatccagcattcctgtgataaatcccacttggtcatgatgtattatgcttttaacattttgatggactcagtttgctaaaattttgtttagaatttttccatctttgttcacgaggtatagtggtctgtagttttttctttttctttttgcaatgtctttatgtggttttggtatgagggtgatgctggcctcatagaatgagttagaatatatttctttcttgatatggtttggctgtgtccccacccaaatctcttcttgaattgtaactcccacaatttccacgtgttgtgggaggggctcagtgggaggtaattgaatcacgggagcaggtctttctcatgctgttcttgtgatagtgaataagtcttatgaaatctgatggttttataaagaggagttcccctgcacacactccctttctttttgcctgctgccatccatgtaagatgtgacttgctactccttgccttccaccatgattgtgaagtgtcctcagccatgtggaactgtgagtccatgaaacctcttctttgtgtgtgagttgcccagtttcgggtatgtctttatcagcagcatgaaaacagactaatacatttctcttctattttctgaaagagtttttatacactgggcatttttcttccttaaatgtttgatagaattcaccagtgaagctgtgtgggcctggattttctttgtgggaagatttttaacttaaattctaattaatccaatcaatttagggctatttaggttatctgtttcttcttgagtgaactttgatagtttctgtctttctaaaagtttattttatctaagttgctaaatgtattgctatgaaaattttcatatttttcctaattactcttttaagatagaagactttttttaaatttaaatctgattatgccttaaccctgctcaatctcttttaatgttacttagattaaaagccaaattacttatcatggcccaaaaggtatcacatgattgtatttctcttcctcttcaacctgatctcatacaagatttgatatctcttgttatgctttagccacactgatagattagatgcaaagggaagaaccaaggattatggactgtcttccatttcttcaagagctaagatctttatttcttgagggcctttgaattagctcttcaagagctaagatctttatttcttgagggccttctccctccttagtatttattctcttccctcaaattttcacaaggcttatttcttgtcattttggggtcttagctaaatgtcacctcctcagacctttttttcactctattctcttcccttctctatcatgtgaccctgtttattccttttataggagttctcacactctttatctcacctatttagttatgtgttgtatattctcccactagtacataaattccaaaaaggccctcatctgtcttttgcctgacatagtgactttcatacagtaagtgctcaataaataattgagggctaaaagaagctgtaattctgaatagaattaatgaacataagtaattggcatcatcatttacttgatgatgataaaattgtggatcagaaagcttaagaactcagacttaatcccagagatagggagaaaactttgttttatttatttatttattcttcctcatttaaaaaaatatgttaagttctgggatacatgtgcagaatgtgcacgtttgttacataggtatacatgtgccatggtggtttgctgcacctgtcaacccatcatctaggttttaatgcctgcatgcattaagtatccattatctagtactcactgtttttcatatatcgtgtcattgtaacttacatctaaatcatggggttatctttagtgtctccttaatgttacaccagtttttaattgttataatagctgtggtattaatagctgccatttattcagcccctaccatgtgccaagttttgtgcaagtggctatccattcgttatttctaatgaaaatgccaactactttatagagatattgtaagactaactaaaacaaggaaggcagaagatcctacaccggattactgatgttttttaaaaattcagtattatgattttcttttgtatatactttcagtcatcaaatatttatttagcacttaccatatatgtgatgttggctaagttatttaacctctctgtactcagtttcctcatccataaaatggaagtaatgatagtgctacctcatatgataattaaataatatatgtaaagcacctaaacactgcctggcatgtagtaagttatagtacctaaaaatattagctattattattttctagccatatgaagaaatctatgagcaacgtaagacatgtgaatatgaggtataacatattcctagaaggttatactcagtaatataaaaatataaaatttttgtaaagtaatatattaatgagatgaaattttagtcacaatcccaaagagatttttaagaattgaaactagtgaaaataaccctaaagtttatgagaacagcctagaaaatttagaaaaagaaaaagggaagggatttgccctacctgttaacacttaaaaaaaaatgtagtaattaagacagtatggtcctggcagaggagaaaaggaaaaataaactgaattatttggtatcagaattagcaagtgaatgtaaaaatgtagtattgggtctgaagatatttcaaatcaatgcagaaagaatggattatataataaatggtcttggaacaattggccagtcacttggaaaaaagttggattgctacttagtattttatactaaaaagtattctaaacttactgaagacttaaatgcataaaacatgaaacagtgccacccacagcttccatagatgttatagcccctgtgctggtatgcccttcctcccttctttcttccttagctatacagtggccaataaactgaccaaagaatatatttctgcatttgaggaagttttcatcctatttgacaaagaagccaaaagcaccatcacaaaaaggaatttggaacttgggtcactaggtcagaatgcaacagaagcaaaataatatggatgctacggccgttgtatattaccgttatagctagacgttgttgtacaagtttgaatacctaacatttatataatacttgctgtgtttcaggcagtgttacaatgctttgtacattgattcacttagtcttcaaatgaggtagtaccattattacacattttgtggatgaggaaaccaaggcagagggaggttaaatagcttggccaaagctcacacagttggtaagtggcaaagccaagattccaacccaggtagtctggcttcagagtctatgctcttaaccactttactacactgcttatctagcaaactgaaagatataaaaatggagtagaaatcagtgaaattcgacaaggatgacagtggttatttacatcagtgctccagagccatgtcatgtaattgcagagaccagaaagcctaacaacatgaagaaatagataaactgatcagagaaatagatattgatggaaatggactagtagctgtgaagactttatatagatgatgattacaagatgaaaatcccatttcgttgtaatttcccccctacagatctatcagattgaatgtttttaaaaagatcgtttatttattgtttctttatagcaaactcatgtcaaaaataccttctgtacacacataagaaaaatctacatgtacttgtagacgtttgtttccccaaaagatcaagctgtacacctgtttacaattataagtgctagtgataagtgacaaggaaacagtagactccttaaagctctccctgtgcatgcttcttacactattttggctggcttgtttttctggttttcatgcatcttgttaactgagcatgaccaaatcttgaagtgccttatatgcagtattactgattttagacttcttccagatgactttatctggaagacactgaagggtgtttaaatagggtactgctgtgattttaatggaagtttgaagataatctctcttgggtactctgaagaattcagaggaaagtgtgaaaagaaacagacccatcttttctagcctgcgtgtcatcttatgcctgtttattactttgattaatctaaggtctgtgtttcttttcttaggtaacccaggtttttctgccttttatgtgccatttgcaaaggctttatactctttgacaaacagacgctttccagtttggactatcagtcatgctgggcatgcgttggctcccaaagacaagaagattcttacaacatcagagggtatgtccttgttaatatctactttcctttagagtgagtgcagggtcatgtttctagcaagcttgctaaggttaagagttacaccagtggaaacctctgcttgtggcattaggcccatggtgccatattttggtaaacttaggatttttagagacattttaactcttcatgtaattttctgtaagaatatgggtagataaaacaatctatgacttgccttctttatttaccaattagtaatcaactgtgtgttttttgatcatgtattatttttccagggttgttctaggaggaatggtggggaaaaagcagtccccaaccattttggcctctgggaaccagttttgtggaagacaatttttccacagactggggaggggtggatggtttcgggatgaaactgttccacctcagattaacaggtgtgcaacctagatctggcatgcacagttcacagtagggtactcctatgagaatccattgctgccgctgatctgacaggaggcagagctcaggcggtaatgctcactcgcccgtcgcacaccttcatctgtgtggccgggttcctgacaggccacagacaggggttgggaaccccttttataaaccatgttctttactttaaagaagctttttctctcatatttagagaataattaagtgataaaccgtggcctgctaatcatatagacacctaaggggtaaacaaaggagaaaacacagtgtgggttaggagagactttgtggagtaggcatgtgtcttagtcagtttgggctgctatagcaaaataccatagactaagtagcttttaaaaatggaaattgatttctcatagtttcttgagactggacgtccagtccagtctgcactggcagattcgatgtctgatgaaaacctacttcccgattcacaggtggcattcttgctgtcctctcgtggtggacacaggaggcaagccctcttgggactctcgcgggctctaccctcatgaccccatctgatcctaattacttcccaaagacccctctccacctcttaatagcatttgggcatagggtttcacctatggatttgggggccatataagcattcagaccattacagctggttttcacaattgaataaaatttggatttagggcatggaggtgggtgcagaggtacaacagacagaaagagtagcacagaagggagcaagatttaatagcgatgttactgctaagcagggccagtttgagagggactttgagagctggagagagagccaggactccatgctggaaggtttctaaatggaagaagtaataccatggagatgcaaactacctcctttaaatctgtgagaattctagcatgttcactgttccaaaaaataaaaaatgagagaaaaaataacttaaatataagtttataaaacataaacataactttataaaagtacagcatatccaagagttgaaggacactttcaaaaggtgtaacaattggaatgctctataggcattccattcaagggcgttttgtcctagggggtttcctttagttaatttgaggtgagatcgaggtggctgtgacttcattgcccagtttgcttctggttcttgtacgtctctctagtggtatgagcatctttttgtgcttattgagcttctcagttttaaagatattttacaataaagttacattttacatctatagtcttcgttattatatatgcatgattcttttagacattgatgtacaaggttgaacatacaaaagcctgtactctttgaaggctagttttgattatatttatttttaattgtaatctctgacctcagcctctgatcctcatatcagatacaattttttgtttctattttaaaatttgaatgtggtggcaataaatatggctgcatatgtgaactcctctgaatactttctgaaaaacattagtttactaatctgttattaatttgtgtaaatgttgcacgtcagataaacagtatcaatttatctagttttatctaattgttaaccttgtattttgcaactgaccctttagctgcagggagtatgttgtataattttctatttattttcaaaatggattaccttcctttattgtatttttagattaaaaagttatatgtgcttattaaacaatttagtatggaaaactgaataagaaaataaaaaatcggtgtcctgtaagttaaaggttgaaaagaaatactaaaacttcataatggtttaattatgcttaaacattttcagcctaaagcctaacaaacgttagcaccttggcactaagagatgagatttttcaatgaataatactttgtgtaatagctcagatattttctaggctgaagtaagcatctaggaatagcagcacaagggaccatatttttagtgctttttcccctatgtcaatatcgtgatgaagtgtgtatcttaaatgttagtgaaatagttacatttagattttcagggtattttttttcaacatttatttgcttattacctgttcaaaacttgtatttggcatatgttatacattaagaaaatatttagcatagaatttttttaaaaataaatagtggacttccagtttcagctctgacatgtagaacttggagtttgtcacttctctcctcgcaataagaaaaaagctgaggctaagtgtggtatctcatgcctgtaatcccagcactttgggaggccaaggcaggcagatcatgtgaggccaggaagttgagaccagcttggccaacatggcaaaactgcatctctactaaaagtacaaaaattagccaggcgtggtggtgcttgcctgtaatcccagctactcgggagactaagacatgagaattgcttgaaccttggaggcagaggttgcagtgagccaagattgtgccactgcactccagcctaggtgacagaatgagactgtgtctcaaaaaagaaagaaaaaaagaaaagaaaaaagctgaacaaaactaaaaatcatttttcttagacctttcagagaattgaggtcacaggacaaattgtcacctaaaatctagagagacaaggaaatacaatgaagattgtagaagacactagtgccgtttatgtagaatacactacataagtgtagaatacataaatggtgattttgatgaattgctgggggtaaagtacagactattttaaaagtaacaaacttctgcaagcctattcttgggggacttcttcactttcataggtattacttctaggaaccttatcaggtacttttgtgaaaatttgagaaatgtcctctatggttttttgttaggagtggaagagaagtaagcattttgcagtatgtccagaatattctcaataacatggcttactttccaagggaaaaagagttccagagctttatccaacctggggggaagggcagttagccaactccgtcttcccctagccttcatgtctcacatgctggaggagaaaaaaagatgacaaaaacttttgaagatcacagcacaggcattcaggcccactgaaagactgaggtttaatcattacattataggatgtttccctcctcattttaccaccatgtctacaggcctctaccttaataatagttcattataactataggagctacaagacacaaactctatttaagaaggagttcttagggaaaaccaaaggcaatggaggaaaaaaaaacaagaacattagaggaaactgaagtttctgatacctatagctacagaaaacattaagcatagccctggccaggcgtggtggctcatgcctgtaatcccagcactttgggaggctgaggcgagcagattgcttgaggttaggagtgcttgaccagcctggccaacgtgatgaaaccccatctctactaaaaatacaaaaattagccgggcatggtggtgcaagcctgtactcccagctactcgggaggttgaggcaggagaattgcttgaacccgggaggcagaggttgcagtgagccgagatagtgccactgcactccagcctgggcgacagagtgagaccctatcttaaaatacaaacaaacaaaaaaagcatagcccagcttctagtggcattaacatatagcctcacataaaaggtctatttacctcattcctattacttaatacatcatgtccagctttaagcaaaaagtaaaattagaaggcattgtaaaaggtaagaaaaaacagtctgaagagacaaagcaagcatcagaaccagagtcagatatatacttattaccaattttagaaatatcagatcgggaatttaaagtaaccatgattactacgttgagaactctaatggaagaagcagcatgcaagaacagatgggtaatgcaagcagacagtagggaactcttaagaaagaatcaaaaggaaatattagaaaacaccgtaacaaaaatgaaaaatgcctttgatggactcaccagcaggctggatgaagctgaggaaaaaatcagtgggctggaaaaataggttaatagaaattttcctaactgaaatgcaaagagaaaaaaataatttataaaagtacagcacatccaagagttgtgggacaatttcaaaaggtgtaacatatgcataattggaataccagatcaagaagaaagagaaaatggagaagataagagttgaagtacttaatgccagatgacaaaacacaggtctaggaatctcagagcacactaagcaggatcaatactaaggctctacacctacatatgtcattcttaagttgcagaaagccaaagacaaaatcttgaaaataggcagaggaaaaagtgccttacctgtagaagaacgaagatgagaattacagggaacttcttgtcagaaatcattcaacaaagaggagaatggagtgaaatatttagtgtcgaatgaaaaataacacttacctggatttctctatctagtgaaatcatccttcaaaagtaaaggagaaagaaagactttttcagaccaacagcagctgaggaaattagttgctggaaacatcctatgcaagaaatattaaaagaagttctttaggggaagggaaagcgatagagattagaaactcaaatctgtataaagaagagcatcggagaaggaataaaggtttaaaaagtttatttttcttgttccaaattgatctggtagatagctgtttattcaaagtaataaaagtaacagtatgttgggtaattacaacatggataaatgaaatgaatgtcaatcatgttataaaggatggaagagaggaattgggaatactcagttgtaacatacctggactaacggtgaaatggtatagtgttacttcagatgaacttgtgtttttttgttttttttgttttttttgagacagggtctcactctctcgcccaggctggagtacattggtacaatcttggcccactgcagcctcaacctgccaggatcaggtgatcctcccacctcagcctcccaagtagctgggactacagacgtgtgccactacacctggctaatttttggatttttagtagatgcagggtttcaccatattgcccaggctggtcttggaactccttgggctcaagcgatctgcccgcctcagcttcccaaagtgctgggattacaggcatgagccactgtgcccagccaaaaaaaaatttttttaataagtataattattatgagaagaagagagaatgttagatcatttaaaatgctcaattaaagctaggaatagagagtaggattttaaaaagaaagaacaagtataacaaagaagaaacatttataaatatgatagctattaattcaactatatcagtaatcactttatttatttatttagagatacagtctcactctgtcacccaggctggagtgcagtggtgccaacgagactaactgtagcctgaaactcccaggcttaagtgatcattcccacctcagcctcctgagtagctgagaccacaagtgtgtgccagcatgcctggctaatttttatattttttatagggacaggattttgccatgttgcctgggctagtcttgaactcctgggctcaagtgatctacctgccctggcctcctaaagtgctgggattacaggcatgagccaccatgcccagcctcagtaatcactttaaatgtgaatggtctaaatataccaattaaaatacacagattgttggagtggtagggggagatccaactatatgttgtctacaagaaaccactttaggaccaggcacagttatacacgcccgtaattccagcactttgggaggacgaggtcaacagattgcttgagcctaggagtttgagaccagcctgggcaacatggtgaaactccaactctacagaaaaatacaaaaattagtcaggcgtgctggcacgcacctgtggttcagcctactcaggaggctgaggtgggcagatcacttgaactcgggaggttgaggctgcagtgagccgagatcatgccactgcactctagtctgggcgacagagtgagatcttgtctttaaaacaaacaaataaacattttaaaacaaacaaacaaaaactttaagtataaagacacagatatgttgcaagtaaagggatatacagagatataccatggtagcactagtcaaaagaaagctggagtagctattttaattttagacaaagcaggcttcagaaaaagaaaatgtcagggataaagaggagcattacataatgataatagaaccagttcttcaaggaaacataacaatccttaacaaatatgtacctaacaacaaaggtcagaatgcaggaggcaaaactgatagactgcactattataagtggaaacatcagcaatcctttttctgtaatgaatagatccagcaaacagaaaggcagtaaagatatagttgaactgaattgcaccttcagtcaactttatttaattgacatttatagactacttcatctaacaacatagtcttctcaagcacacatggagcattcaccaagatagactacattccgggccataaaacataccttaagaaacttaaaattgagtataaattatacaaggtatgctcttagaccacagtggaattaaactagaaatcaacaacagaaacatagctaggaaatcccaatatatttagaagttaaacaacacacttttaaataacacatgggtcagtgaagtctgaagagtaacataaaaatactttgagcaaaataaaagtggaaatacaacttataaaaattggtaggatatagcaaaactagtgcttagaaggaaatttatagcattgactgcatgtattagagaagaaggaagatataaagttaattacctaagtttctgccttaggacaccagagaaagaacaatttaagcctaaagcaaagagaagaaaagatgataaaaatgggaacacaaatcaatgaagttgaaaacaagaaattattagaaaaaaaatcaacaaaccaaaagctagttatttaaaagactaataaaattaataagcctgtagccaggctaaccaaggggggagaaagagaagacgcaaattacaagtattcagaaagaaaagaagattcattgctgctgatctcttagataataaaaggacaataaacttaacttagataaaagggaccaatttattgaaagatacaagctcccaaaactcacacaaggaaaaatagatgatcagaatagactgtatctgttaaagaaattaaaccaccaaagctgaataaggacaaaacaagaaaagtataggtcaatatccttgagggacatacatgcaaaaattctcaatagaataccagcaaactgaattcaacatcacattaaaaggatatggtcatgatcaagtgagctatcttaagtcatactatagacagaagcgaacatttgaagagaacatgaatggcaactttgaaagttgaaaacagactcagaggatcacccttgatcaggtgttctcaaactttggcatgcatcaaaatcacctggagggtttattaaaacacaggtggctacctctgagttgttgatttagtagatctggggtgggacctgagaatttgcatttctaacaagttcccaggtaatattggtgctgctggtcctgggaccacattttcgggaccacattttcagaaccactgccctagatgttcacaataaacactgatacggaaaaccagtagaaaatatctgtcatgtgtctgaatttttaggaaacagctttaattcttattgtaaattgacatcttattatttataactttactttgaatatgtttatctctagttggcctgcttgtgtactattgagttaataacttagtaattagtctgggttctttgctacctaatgagaatagtgccatctagaggcattagcccaaagggccaccatagcgccaaaggaagctgtggtttctggagagggtgagagggcaactcattatcatcaaggacttattgacaacctactaggttattaactgtcatgctacaagggtatacaaagagttagaattgcttgccagtctccaccttttaggtttgtgactttctgtatctgagtagctcaaaagttctgtgaaggctaagtagggctctgggccttggaccagccccccattcagctagaacagttctgctctcatctgttgtacacattggaggttatgtttgcaaatgtatgctatagtggctttggataggcaacacagatatattatttgctgtccaagattgtcctaaggtactgattttctggcatgcaaaataatggcgtgaaaaatatgtaatcattgagaaaaagggcataagctattaccacacatcaaatgttgaaagtatgttttccttcatattagcacatgttaaaattatgaacagttggaaataatattctagtagaccacattatcacaatcataagttgaatataattggaagaacagatgttcaccaatgtcagaaggggatgattcgaggggaaaaaaagtgtgaaaagaaaatttgaggagttaggagtataaactgttttctggatttgatttgctatagagtcagcacacatgatgggaaattcattatcaactatttcaagtcattgtttagaaagtatgaaatgaaagctagaaatcatgctggttttgtattagcagataaaaacattacctaaaaaagttatacaatcttgcaactaatgatgaatttgagtcatgcttatccaaagaaacaataaactactctcactgcagtcccccaaataggaagaaagagagaaaacccagtggagctttctcttgccaggactgggagtggcagggcaacaaggaggtaagatggaatgactagatgagcccaaggcaggaacaaccaatcaatcaactctcagggctcacagtccctagaaatgaaagcacgtaaatctgtgggtcagaagagcaaaaaaccaaagtgcagagcaagagaagaagttaggaatcaagcaaattgttaagagtcccagggcagacagaagtagggagagtgagcattgcagttaacgtccataacacagaccagattgtgcgctcctctcttggcaatctataggtatcttctcattgatcacagaaccgagtccagactccttggtgtgaagttcagtttcctacttcatttatacccaactttcctttttaaccttatgcttcacctttccatataaccacacatagccacagaactcatggctttttccaagtaacagccatggaaacatggctgtttccaaaatatcactttacaataaaaagtaacacactttttatgcctttttcttttattgtttgctaagtctataacattatgttctccttgctgaatctctctgctgtttcctgctaaggactgttgaagtccttagcagataattggttttagtcaagtggaaagcataatttgatgactgtggttttcaccgtttggagaataataattaaaaattattttataaaacatatgcttggggtttacaaattttgaaatttgttttctaaataagatagcagtgttaaatagaataattatctcccatctccttcactgtaatgcatactttaagagctaacagagttgtaccagtgtttagatacagggagcttacagaatacttagggagggagctggggtttgatgagagtgtactcccacttcagcctagtaacctcaggacagttgtgaaaggaaggccttatggatcgatgaagtaggtaagcctacagaattagggaccacagttctcattgagccaattcactgatattcagtatcaacccacaacatctttgggggcttctgtattccatgtgagaaagaaatcaatggtgattttccctacaaaataggtgtaagatatctaggaacaaccgcatgtcaatgcattcttttttttaaatttattttgagaaatttttaaaaacgtagcaaaatagagttatataacaatcaaagtttctattactcacaattgacagttaacattgccatatttacataaatattttttgttaacaaaataagtgaaataaaacaatacagaaaaaggtttgttttttgtatcccatctctagttctatcatgaatttagagtaaatatttcatgtctctttttatgtttgtagttatatatatttatatatatgtatagcatggtgaacaacatattatttttttgtgtatttgaaagaaattaaggaggaaactttttattttattttttcttaaaaaaaaaggtatacatgagcagaatgtacacgtttgttacataggtatacgtgtgctatggtggtttgctgcacctattgacctgtcctgtaagttccctcccctcaccgccccacccctcaacagccctagtatgtgttgttcccctctctgtgtccatgtgttctcaatgttcacctcccacttatgggtgagaacatgcttcacaaggaaactgtattttcatcttgatcaaagaattctttaaaatatgaaatattattcttagcctttcaatttttacatgcaagttgtttagttattaagatacagctttggagtaatgactgggggcaggatggaagggtttagtagctgagcaaattctggtgtgagatgtagttactgtctgcagactcagtcctaccaaaggcatgtgtagtgctaatctccagtcttgtctgttccatggtcagagatgaccaataaatactgtttgtatgaaaataaatagttgaacttatacatttatattcagtatatagccatatatatatatatatatatgaatggcagttaaatatgtagttaaatttaaactgttttgcttggattcagatacatagttaaatgtatacatttatagtaatatacatgtaataaagaatatcttctagttatttatcttgggtagagtgggaaaaggtacagtactttttatgaatcaaagggccgttacccttctattgtgatccaataaactgtgttcttttctcacacaaatgcttgagatacttaactttggcatttaatgattgtgtttttatctatgtctgtttcctgttagtagattatgatctcctgaaaggcaaaggtagtatattttatttatgtctgtactttcaataataccaagggccaattagtcactgttttctgtcagagtagtcaattcagttcatgtaaaatgaagaaaataataatcatcagatttatctgtgttctgaggctataagggaatttaaaattgaaagcaattttaatgactgcttaataactttaataactggagcagcaaatttgaacgattagacaaaaagttaatgcgaagtactgatattatttaatttctctactaactatttcagaacaagttgtgtgtaccttttgaaataaactctagaaccgttaggtgagctgtgaagtgatatctaatagagatgggtctaagaaataggctcaggttctaagagaaaattgtcaatatgatattggggctggggttacagattaacagcatctcaaggcagaagaatttttcttagtacagaacaaaatggagtttcttatgtcttcctctttctgcatagatacaataacagtctgatctctctttctttcccccacaatttattggtaacaatatggtggattggattgtcatccaccaattcgggcagttctcaatttagaaatctcaatttagattatgttccaaatgtgcttcattgattataacttggagtacattttccttatagaaagaatggtataaatgatttccatattagcattcttctggttttgatacaattgaatgtaattttttctacattttttggagagtaagttaataatttctagcattttctcagaatatattactattaaaataataggaatgaaaatatataatcaagtatatagtcttttaacatttcattttctgctagtaaaataatatctagaattttatttactagtaaaatgaaaaaagataggctgggaatggtggtttacgcctgtaatcccagcacttcaggaggccgaggtgggtggatcacctgaggtcagaagtttgagaccagcctggccaacatggtgaaacctcatctctacaaaaattcaccaggcctggtggtgcacgcctgtaatcccagctacttgggagtcatgagaattgcttgaacccgggaggcggaggttgcagtgagctgagattgtgctactgcattccagcctgggcgacagagtgagactccatctcaaaaataaataaataaaaataaattttaaaagatagcacatttaaattttcagtcattgtacatttttagaaagtactttccccattaatcttaccactttggcaaacactagcaagtactgtgttcttgaaaatctactgaatagttcccagaggtaaagctagatctacctctgaaatattctgatttataatgtcctttaaagtttatctgaaatacaatgttttaggaccttatttatgatgtcagtgaaattttagaatatttagcccattttctttgctctaaccatgtaaatgttcttggtatatatttggaggaggacttaaataacaggaattgaaatgatgacaatcatagcttttatttatctgcttatgccagacacttaaacaacagccattggaggctagcattattatctctattttgtgtatgaggaaactgaagcctaggttaaaggatttgctcaagtcacacagttagggagatgctgagctgagatttaaacccagatgtatctcatctccagagcccgtttatctttgtactgcacctactgtcccaacagaaggaaaacttggatatttccaaatgctgcatattttgaaaaagaacttgggatgcaaatattaacattattgtggttttttatatcaaagaatgatatgatcacttctgggtagagtgattagagaagcaaggtataaactcttcaaacctaaatataatatttcatgcataaaaaggtggatttggagccattagaagtcctaccaaagtcaggttccagattctctctcttcccaattctgtttcatgctgaacttccttgttaagtggagaatggattgtaagctgacctgggaaaaagagtgagagcataacatgtttaacctgggagattaatagtactatggaaatagggaagtaagcctcattgagtcaagaaaaagcttttcaataactgtatgctggactttggggagcagtgataagcaagacctgaattgtaaagtaggagtgaattaggagtagtatagtgagataaataaacagggatgttgtggaaactgaaaagagagccactttactcctcacatcatgaatcataaaaaggtctctcagaggagataacgcttgtttcaagtttgtaggataaacaggacttagactaaaaggggagatgagcacacacacacacaaaaaaaaccatatacaaacaaaacagaagagtagtttttctgagtttggggtgcctcttgaatgagccataccgactgtaattcccatcaatgccttgcaagtcatgagagcaagaaattcagtgttcagtcactcaaattttaggaaacagttgactgtcttgtgatattttgaaatattacaccctgtcattgggttatatatatgttcatagggaaaacctattcaagttttctacactcgtagaatattagagtggccagcatcctcagagatcatctagtcagttccagttttcattcagccataacatttgctgtgtactagtcacaggacacatgaaaagatggaccttgccttcaaggaactcacagcctaagagaggaaataaacatacaaacagacaatgtgcaagtttgataaagtgctataataaaagaggtactgattaagcacagaagagagctcattaatttttcttgaggattagctaggtaaagttttaattaggtcttgaagaacctagaagagcagttcatttgtgacagggagggaggatatttcaggtcaggactgctgattatttaaaagggacagtttttaacatttctacctaagtttttcgatctggattctttaaataaataaagattatctaaaataattaagtcatgtcatggactttcttagttgtctattagtaatataaattagcctaagcagctggttctcaatgtgtggtactgggacccagtgcatcaacatctcctggaaacttggaaatgcaacttctcaggccccagcctagacctactgaaacagaaaccctggggtgtggagcccagcaatatgttttaacaagcctttaaggggattctgatgtatgctcaagtttgagaaccactggcctaagctaacagtaatacacagaattattgaaagttcatggactttgaggatttggagacctgaatttgaatctcacctctcccacttaataagtttgtgactattaatctgtcacctaatatctatgagcattgggattttcacctatcaagtgaaggttataatgtttccttcccaaaattgttgtgaaaattagttaatataatgaatgcctaatattatcactggcacactgtaggctttcgataaatggtaactgctttttatcatgattgttatctttttcttgatcttttttcagtgattacttttacttaatgaaaacgtgctcatatttttgcttttagattcaaacgctcaagaaattaaggacatttatggactaaatggacaaatagagcacaaactagctttcctgagaactcatgtgccaaaggacatgaaacttgtgctcattggccattcaataggcagctatttcacacttcagatgctgaagcgagtccctgagctcccggtaagtaggtctccagaggtaactgtgggtgctggactgtgtgcctgcacaaatcctcctcacctttcctatgttcttttgtctcttgttcagttgataaatagaacagagagagggatatttgctttctgcctttatccttatctccatattacgatgggcttatgtgaatgtatgttcataatgtttcaaagaataatgctgagggagataagaagtttctgaaagaatgcctttgaatctagggttatcggagttcttatgttacacattacttgctgttttttataaagaaatatttaagagcggtcactaggtaagacctagacaagaatctgtcttttgtgggaaggtattttgtaaatattcttgcctttttcagaaggaagaaatgtatcatcatcatcactgataggcaaacagctgtctttatggaacactacatctttattaattcataagttcagattcttacctattctgtatcttggcagcctttttgagacacatattcacaaatgcttgcaaatatttgttggataccactgtgtgccagatattaagtgaggcgctagagacgcaaagacctatttaaagtgcccaggaaagcaagtgaactataagagatataaaacaaaacaaaaaaattgtactttcactagcatataccattgaaataactcactgaatggatgcaattcacaagataattcatttctttattcaacaaacatatattaagccctttccatgtgtcagatcctgtgctatgttttgaggacatcccagagagtaagacagtctttgaagtaggagagcctggagtctgcttgaggagacagtctaaccaatagatgtgatacctactgtcttgtttcagttcagggggtgtgggagcatggagtgctggtaaacctagtaatctgaagccaagataggacgtgatcgcttcatggctgctttgtgctaggattttgactgtttctcactccgtgggataaaatatcttcagtggggtctcagagctcactaagcactcgctccttttcttgccagcttcacctgcttgcttcttattcgtaattgcccttgggaaatgtacaactatagcctccctcgctgtggtttttgatactaaatggaggttttaaattattattgggtataagaaaatatgtttttcatttctaagtgtgaattcaataaattcaagattgtactctgttctctgtattattgtctactgtgttgggtgttttttccctaaataaggtgtcttaatcagaatgcaggctttatttttccttttagcattttgcacagcttctaatctcttttgtgccttcgaagtctcctctagtactgtgtcatgtggttgccatctttatggtgtccagctctgcctcttagtggttctacttgcacagttgctgtgagttctggcagtagaatcaggacacctaggttccaatatttattgtccttttttttttttagtctgtctgatcttagacaagttattgagtctctactttagttttgagtctcaacctcagtttcctcatttgtaaaatggggataatatgttcttcaaagtatttttgtgaggaattatataaagcatcaagaatggtatctgtaactttaaagttccaaataagtattagctattattattattagggaaataactctagagtcattgtctcagtcattaggttaactattgtattaggtatctattgctgtgtatcaaattgccccaaaacttagcagtgtaaaacaatacacatttcttcactcgtagtttctggtcagaagtctggccacagcttagctggattctctgcttcagggtctctcccaagattttaaccaacatgtcttccagggctacagttttatctgaaggctttagttgagatggatctgcatccaggctcactcttgtggtttttgacaggatcccattccttgagagttgttggacagagagccttcattcagcagtggcatttggggggaggccaccttctttaacgtgtcggcctgtctagctgacttcattagagcacacctggaagaagagtcaaggaggcagacagcctgctagcagatgaaaatcacaggctgtaacccagttacaaagtgacatcccatcacgtttcctgtattcttgttagaatcaagtcactaggtctagcccacactcaaggagagataattacacaagggcatgaatactaggaggtgaaagtcactgggagctgcctcagagctgcataccccatcattctaaaattaggatttcacttgtgtgttgtgcagtcaagaacatggacataggatgtacataaattgttgcatttatttactggtgtaggcaatgacttggacctgtcaaataaaatgtagcaaactgacatgaaatgtagttatttgttgttagttgttccaggtgtcttaaacactttaaaaacattaaaaaggatacttgcatatttgaaataatagcattactgttctataaacataggaaagaaaatattcattttggagcccatcacagactattattaacttaatcacagatctgttttggtttttgtgtttgcttcagatctgttctgcatgtgatgtgtggtttctcttttgtgtgtttgaaaatgattgttcaatacattgtcttgaacctttctctctttttgggcccatattcacaatgtctgttgggaaagaagtagaatgcatctcaaggttaatgtgctttcttatagctttttcagcatcataactttctaattattgtcctgccttcaggtgtccttgcttttgcaggaatagtggtgaaaaggggaaacaaagatgaaacgtgaacttaacctactctatttgtggagacacaactcaaactgattatagagttttcagaaagatatgtgaagctgtgttttatcttcttaaaaagggtgtaagctagaaaataatgtgtgcaataaattgtccaaagggtgtaagctagaaaataatgtgtgcaataaattgtccaaaaggtcacctcttttggggggtaggaggggcagtgaacatctgtatgatttttaaattattattcagaagctttatctggtttcaattaactacattgttgaaattccctaccccatccccagcccccattaaacacctgggtcagtgaatattggtggtgtgatccctgccaaagtgttgaaatttcagtgtctctgggctactctaagacaccgcagtgcctgcatgcctgaagttagcatgacatgctccatttaagatgcatttgacaaatatgtttgtgtaagccagaatgttacaatccttaatcattttgccaaaaataagttagctattatgttttataacatatgaagtgtgataataagaaacttgtgtttccatctcttctgttattttttactggaatatttgactcttgtaagattttgaggacatatgtgtagtttagtagctagctggtttatttagttttattttggttcagctctttgtaatattttcataactaattataggcaacttggtcttaaatcattttaagagacttattgtatatgtcagatatactgtctgacctgtattttaatatactaaaaaaaagttgcccctttaaaaaaatctggcatttaaagttgtttatctaaacaaattccatacatagaattagagatattcttcatatattttgaaattagtgctcagtatagggaatttaaagagaaacttgagcaaataggtaattgaaagactgttaaatagtagctatcatgacttacaataataaacataattgtttttagattcatagaatcttagaactgagataggctttagagacaatctggccccatctttcattttatcagtgggaagtgagagaaaggtcccttgccagtattcagccttggctctgcctgaatctggggtggggcatactggtattagctgtgagtataaaaagaatccaagaaggtattgatggctccttcaacctgtggatgatagcagagcctatagctattacagtgtgccctgcagtgtacacaactgctaagttcgtgtgactcattgtgttggtgctccaagagtaggaaaccccgtgaatgctctagcaatttcaggattgtgtgttggggtggggggagaataatacagaagcaaaaaagtagtaatcttatctccactatctagaatcttctttctcttatcaaccctctatatgttaaaaatgtgtcacctgattttgccagtaaatctttttcataaagttcaagtttgggagttgagttgaaagcccttgattcttcactgagtcttggggtgaactttaattaatataactttaattttcctctaagaatttatataacctttaatgataacatgttctcctcttcgaaggatatcagatccttcacaaacttaattttttatattatttggccttctgtgcataataacacagagtttcctttgtcttctggttagcaaaaatgtcttctctctgaatgaaatttctggattacttaaactcactctcttaagtaccagactattttacccaactggataaaaatttgtctaaaatatattacttacttatctgccttcagcaatgcatattgactatagaggaattttttcttagtgatttaagggcagtggtaataacactattattttgatagtgttatgctagaataaaatgtaatcaaaaggaatgtgcctgtgtcctgaaatttcttaggtgataatgctttttcattttttaaaaaaaatgtttcatgtatgtctattttagtttttctatctcctctctcagtgttaagtacttcttctcttccctacttctaatttattgctactaatttgctgtgggcagagaaaaccagtaactacattataatttttttcagtaggaatgaacaggtcctaaatagataaaggagtaaaattgacagcattaaatgtgtggacattgttatcactcagcctttttttctcttcttttgagatcctcaaaaaggatgttttggggcattttaagtactcaaaattttagagactcaacatacaactatagctgagaagtttgcaaaactttactaaaagaattagaataacatgttagatcatatatgttttgattcaggaatatacctcatccatactaaggaaaaaatagcttcagtgttctccaacaatgagattattgagactgtggtttacttacactattctgctgagccttcatgtctgctgtcaaagtaagacatgcttgtaagaagcattcatattatgtcactcagctatgtttaacagttgagataatctggagggagggagaagaataggaaataactcatttgtcgtagtaaattttgtcagaatcctatccctagattcaagtgacaagtgacaagacacggaaggcaaaatgaggcagtactgtaaggctcagaaagttttgtggagagggttgtcttctacctgggaagctcagaaaaagcttcctggaagagcttcagggccactgaaggatgagttgtatctggaagtagaggattttatatggtggctagggggtactgtgcattctaggcaagggagacagcatgaagagaaatggttttcatcactgggcacggggagagggcagtgggtggtgtgactgggttgcggcagagtgtgcgtggaggggtcgatcgggcatgagattcaaggttgatagagatggacaaaaagctgggctagggagcatgggctcattttctggacagcagaaagccattgaaggatctctgatgatagcagtcatgcatcaggtaaattaatctctcagagaaaaggaaaatgagatggagatagaaaaagtgcagcataaaaagtgaagatccaggtgacaggaaagtttactagtccaaataagaaataatgaagacagtgtaagggataaaattgcccagggaaattgttgagaaaagagagaggccatagatgtgtatcagcggaatgatttcatttgccataaaggagtgttacaggatctttggggtgttgctgttctggccagaaacctgtggttggcggaatctttgcctgagttttgctcgggcccactgggctcgttccaccgactctgcctgacaggctatgctcagctcatgctgccggcctggatcctatgcctccaagggagactagagtcaggcgtggagtgatgaggggtgtgtgtgagcgagtatggggtccagccactgcacagtcagacatgctggctgctgccatggggcaggcagctccaggtgccagcatgggtgtcagctctctgtgaggctgcagctggaccaggcacactgtaagcagcttccccagctggcaccagggaatgcggtggcacccagaagcttagagactccaggaaccacaaggccccaaagagggagtcacagctctggctcagggagctcccaggtctgggctccctgaagtgctgcagattttctctccttctcttcactcgcaacatggcgagcagggggcatgtttcagctttgtttgtgttacagcagctcttttagcctcgccactcatcaggtcctgagttcttgttctgcgaccaggaagaatgaggtttgcagacatgcagagggtgagcaagacagagaggagctttattgagcaataaaacagctcagagaagacccgcagtggacagctcctctgtgtagccagggtgtcccagtgagtgttcagctcctagcagagagggtagctcctctctgcagctggtcatcccatcctgcagctctcagcagagaggaggccctgtaggtggcttctctgtgcaggcaagtcatccctttgtctggatctcttggcagagatagtagctcctttctgcagcaggtcatcccattgtctctctgtcctctgctctgctctggctgagcccagggcttttatgggcctcagagagaaggaagtgcccactgattggtccatgggcagccaggggtaggcccagaaagggcaccacaagtcccctactctggtccctgggactggcagcctggcccctagccttcaaaccctccctggcctgcaggtggggcctcaccggagatcctccctcttctgcccagtggcccatctgcctcctgccagcatctaaggcacccaggttgcttgtgccaaggggcacctgcaggccagtgctgagccgccctcaacacaccccctcaatttcccctcatgcttgtcagcacccgaagtccagaggggactgaggtggcagggagctggcatgtcagtgctcctcaagtgtgtgcacacccagccgggctgtgacagtgaccaggcttggccccaaccctactccaagatcagagcgggcaccaggagcagggagaggtcatggagtggagcaggcctctccaagccttcaagggcaagggaggggggacttcccaggcccccaagggcacagagaggcctgggtccacagccttgtcttgggctgctgcctgtttctggctctagtggctccatggagcatgaagcccagctgcaccccctcacagcctggggcaggggctctaggtacttgctgggcccaggccagtgtcagggtaggggcaacatctccatgagctcccccagtggccctggcattcaggggcagctgggagctccccctcgcccagattgtggccctgcccagtgcgcacctccaggaatggattgcaggccctggtctggccgtcaggagtgtcaggcctggtggtcaccctgatgcagggcagaccctggggacagagccctgggcggccctgcgcagagccccctcctgaggcacagaaaccctccactgctggccggtccccgaagcaggcgtcacagtcagctgcctcaaggacgtggggcacaggggacccaccaccgccattgcagctcctgtagccacttctgctgccaccgtctatgcctccccactgtggatagccccctgctgccatcaggaggggaaagaggtggaagtcacagaaagaggcagaagatataataattttccaaactattggctgcaatccattaatggatcccaaaatcacttcagtgggttgcaaccagtggatcagtcaagacagtagactgtgctataataacacaatgtcagtggcttttaacaacaaaggtttgtttcttactcatgatacaaatcctttgagggtaggctgcccctatgaagatctctctatgcaagctttctccagaatccagattgatggagtagcctctgcctggaatattcaagtcccatggcagaggatataaagtgaatagtgaaccacacctacattttaaaacctctgcctggaagtgaaaattttcactcctcaaattttattggacagagcaaatcatatgaccaagtcagccatcaatgaggctgtgaagtacagtcctccccagagaatggaagcgtctgtttgtgaccaatgaaacagtgtttttaaacaatgtataataaaatcaagtaaaatagaatagaataaaaatatattgcagtaaaggcatgtattatgaaacttttgtttcactttgtgtgtgtgttgataacatagtagattataatgtcgaatgtatatcttactgtgagttaaggtaaaaaaaaaaaaaagtttgaaaaccattcatctggactagagtacaccacagcagctaagaacagagcaagaatgtcaagaaaggggtagatatatggaggattacagatggccacagatttttttgtcattcctctcaagaaatgaaacctgtttcccttcccctttaaatttaggccaagcatgtgacttactttcaccaataagatacagtggaagtaatgtacttctggtagcttcaagtccaggccttaagaggactaggagcttctatttcctccctctcagaagccagctgctgtgtaagaaagccgactgccctgagaccacgaggctgagagaagcccaagctagctacgtaggaggatcatgaggcaccaggcctgagtgaaaccttctcgggtcttccagcccatctcagcccagcccatccgccactgaatgcagcccaatgagtgaccccagcccacaccacatggagcaaaagaaccatccaactgagccctatttgaattcctgacccacagaattgtgagaaagcaaaatcattgtgattttaaaccataagtctagagatgctatgttatatagcagtagataatttaaacaaggtaacagggttgaatgtaacaaatgttgaaggcttcaggcttctagagtaaaaggttcttggtgtcctcgaagacagacttttagtgaaataatgggacaagggggttgcaggaagttaggtgataaatggatagtgattccactggccagtgaaggagaagaacacataataatttaaggaagaagctggtcaagggaactttttttcctgtaagtaggggagaatttaacatatgctgagaggaacagcccaagcgtagagagatgtcgaaaatgaaagacaaataggaacttttgttggaacaggtttccttccatttgtcttttagtctacatacttgaaaacttggaaaatggaatttttcttaatatttatgtctttgcaaaagtggtttaccccttccctggggtgtagggggaacatatattacatatttggttctccttttccatctagaaaaagtctagctcaatttttaaaattgatgttattgtcattactaacagtgattatacctaacattcatttgaaatttataaaacgtgttcacatgtaacaaggtattttaacaatctgatttttcccatcttaaagatgagaccgaagtgccaaggagccatgtgtccaacccatatgtcaactagtagaaagtagcagagctgggactctgtattctgttttctaactttcccactacctgttttctaggtgagttagagaggtgatgattacagatggttagactaagttgctttcacaaatcaccaaactatttggcctaaacttaagatttctatttttgcttttttaatatttgagttcttcaaacacacagtgagtgttttagtaggaagcaggtgaatgcattgggaggagttcagagagaactgagagaaatgacagcatgtgtgagtgttctggagcataggagataaagagactgttgaggcctgggccaagggcagaaattaaactgaaaagatagtaaatcagagtcctagaattgagctgggaacagaaggactatgaaggaaattggaggattctgcaaacatagtgcatagtagtttgacagttacctctatgtgacccattaataaatcctgctgcgtgaaaaacacaggcttagacaatcagcacctaactactctgatttctgaaagattttccatttcagaaaaccgtaagtctcttactctaagtttgtattgtagatgatgaaatgctatttttccaatcacttatgcatttatttaagtatatatgtatctgcatatttgtgcgcacacacacacattatcttttctgagttacccagaataccttgctaaaaactagacacatggacagtttcaacttttcaacttcagccatttttagttatctgtgtatttttttaaatcctgaaattgctttcaaagtggaaaaattgtgtgggcttttttcatcttttcataactcaaaaacgacttaatatgtttttctcaaactttgcaaaaaaaaaaaaatcacctttgggctgaaaccaagcatggaaaatttcaccacaaagggctaattttttggaaagctgcaagaaagtgaaaacgggtttataatagaacattcttcatgcatgttaatacttagtactttatctaatgcatttcatctgagaatttctgaacacttttcagatttaaatattgagccattttaatatttgtgtaccaatgatatattgtcagatatcgaaaagttcccccatcctctcagatgtctaatagcttgggaattagtgagatgtgtttaaaatgacaggtggggcaaatgaagttaagtggctgctagccagagaaagctgtatatttactgcccaacacattttatcactacctcttcttggcccaggagtactgtagttgtaagtaaaatataatagatgacactgggcactaatttgaataagccaacatgtctcaaagtagtatcaacagcacctgtgatcttgttagaaatgcaaattcttccccctcttcaccccaaggggtggggctcaccaaccagcatttaactagcactgcaggtgattctggtacatgcttaagtttgagaaccacctacctaagctttccaaaagcttggaacagaatgcattgaaatgctgtggacagttaaatctgtccttggtctttctgtgatgtcagctctgtcttctcatatcccttggaagcaggaggaatatgaatcaaattctctgaaggaaaggtcttctgtgttaatgtgctctagttctttccacctatgacgttgtccataaacacagagactcccttgagtaaatgtgctgatatcagcttgttcagggtaacagcactaccaagatgtattttctcatttccttgaattattagggtcaaaactgaaatgggactataaatttctttcttatttctttggaatcttttaagttctaagatggtatcagatgtgtcagtggaagttgattgaagctctttggtgtgtaagttctcaatctgacgctttgcagtagacctctgcatttcagcaaactccatggtctgtatttttgtgtcttcaggcacggaaatagttgtttacgtggcattgtaacaagttttgaaaatattaccctggtgatggaagtcactagtctgtagtatgtgggcctttagctaatccttttagcttaggttaatttcttacaataaataatttgtagaaattcataaaaaggacagcaagttctcaaagatgcaaaggatgtgaacagataattcactgaagaactaatatatcaaaaagtgtgtgcctaccacaatgtgtgatagtgtttaatgaattagtatatagtagtatacttaatgatgtctgtttatattgagtatggtagtatttgctaatgttcatttgatgaatgaacctcaacagttatcaaaattaactattactattacatagtctaaaagaaaagttgtgttgtgtatgtgtgtacttcgatatccattttaaataagtttgaacaggtaaataccaggtggcttatagtagttttctctggtggttaggggtaaaggatgtattggagtgaaaactctacattgtttctgcttttctttataatgaccatgtattatcagaaaaaaataatttccattaaaaaagtattcataccctttgaacctactaattcttttttttggaatttatattaagaaaacagacaaagatagaaaaaatcatgtgcaaaactattatctattataacaaaaaattggaaacatcctaatgtccaaccttaaaggcaaggttaggtagagtatggaaagtacagccattaaaattatatttgcaaaagacattataatacataaaagttaattatagaatattaaggatgtcagaatacatagagaatgtgtgaatacaactgtataaaaatcacacatggaaaagcttgataattataaaatgaatttagtggttgtatttaagtggtgagtttgggttttttttttctattttttatttttgaattttctgtaatgacatatatttattcactattatagacatttaatggtcatgcatttttctctctctttttttttcttttaaggtgatttgttcatgttactttagagcagaaagttgttccaggatagatcttttttaaaaatttaattttggattcatagggtacatgtacatgtttattacatgagtatattatgtaatgggggggattgggcttccagtgtaccagttacccaaatagtgaacattgtacccagtaggtataaattatgtttgctttgtatattgtcaagttcagtgcagtccttcttagggctcaagttatcctacagggcccatattaaataccaaccttcttaagtccttctgggtacaagatagtttataaatagacaaaagaacaaataagtcattagccaaatgtcacttcctgcatgaaaactttgctgattgctccgatagaatataacttctgctacttttgggccaatgatattgtctcctgtagcttttctgttgtggcttgtagcttaagtgtaatttttttttatagccacaagaacaagagctggcttgttttctttgtacccttgcaagttctagcatagggtcttacacatcccaaaaggaagacatccattttttttttcatttaattaaattaaactatatgaaagttacatcagcagcttctgctggtaaaattctcacttggttcataagtgccactgacttcttctgttcatacagattaaccactgcattgaccttaaggaaacagttgtcttgttcgacagtgaaagagaatacagatcagcagcaagagttagcagctatatacatccaaaggagcaatactaattcagcttctataagatagaattgaagaatattattatggtctcggaatagttgaagatttcttaaattggatagcacaaatgtttgtacaaaatactgctgtaagtgaaaggaaagagcttaggggtgtggcggacagactttagggtgggtggcaccccatgatcctcacctcctaatgttcattcctacacgtaatcccctccataagtggatatgactgatgacttgcatctaaccaacaaaatatgataaaggtgacagacaggaagcacatgattatgtgtatgtgatttacatacctaagattgtaaggcctgtcttgcagaagtctctctcccatgctggctttaaaagcaaactgccatgttgtgggttgtctatgttgggcggcctatatggcaaggagttgcaaggggccactagaagctgaaagctgccttccgtcaacatccaacaaaaaaactgaaatccttgatgctacactacaaagaactgaatcctctccacaaccttagtgatttgtatccttccccagtcaagcctcagatgagactgcagccctagctgacaccttgattgcagtctggtaagatgctaagcagagaacccagctaagctaggcctggactcctgatgtgcagaaactgtgcaatatcaagttcgtattgttctaagctgcaaagttttagtaatttattacatagcaatagataacaaatcaagaagaaagtaaaagggtaatagcaactccttgttttctttgcaggaaaacccacctctaagaccagtagtggccctaagttagtatcagcattgtagcagtagcagctagcctagccttttcccctgtcacttttccctgcttttacactatcttacccactcttcctactccactcaattacctagacttttggtcttccttgcaatttttttattaacattacttctctccccacctcaaaaaaaagataatttgggttgttgataagcatgtcttttgatagcttgcctggtgattatttgatgtaataacaaaatcacaggttgggattcattagcatcattcatcctactctaggttgaagcagatcttatttgaaagtattgccatattcaaatctcatctgaccaagaggttaatagtggtaggatattgagaggccctgtggtatgagagagtggcccatgctaaggcagaggtgatacatttgtgaattcccttgcatttgtgtggatataggtctgaaaaatgtcgcttgtacctggccacactgaagccttgttcatagaagagcacattcatagagcctcagtggacagactataactatcagagaagacataacagggaggggagtggaaacagatgaacaacattctgtgaaattgcctctttttggcttttgtttagttcagatagaagcttctttctaggtctgtttgtggagatgagaagtatgattgtgatctttaagaaaggaaaaagctctctaatatggttaaccagcatgtatgaggttgttttacgctcacttccagcttgtatggaaaatctgtgaacaatatgcaatgtaggccacaaaaaatttcctgaaatggaaaaagcctagcaggcactaaatgaaagctaggcactaaatgaaagatgcttcacaagaataaaatgtggttgctttgagatctcacattccaggccatttcagactaattgtatttgtttgggaagaagcaagattgtcaggtatcaggaaggtgtattgatacataaaagatggaagccagcgtcatactgcaaacctctccctaggaagccagacagtaaatcattttccagggtcagtcatatagagaccagagggagcatgcatgaatgaagacacagtctagaaactccatttcaacaaatagtttctcccctcaccagtactgttatgggagcttctgcaaaaagccaaattgagtgttagagattcagccttttcccctttcataatctactacccttaggaagatgctgaggagcttcttataacctcttacaaaggagaaagtctctgagagcttcagtaatattatattaatgtcaatagacattttttcagaagagatttcataaaaacttaaggacatattctggttatctgggtaccaggagggttctccttaaggcccttgtttccttccgttcatagttgctgtgtttgccttacagtccctgcacttagggctccatcctgactttataatttctcattgtctagatatatattttcctatctatgtgcctttgttgagctacttcctttctgctttgtcccacaccatctaactgatgcctcctgttcttctggaaaatcatctcaaacatgagctcctgtgtgaactctttcctgattcttcccagtcatttttactctgtccttcctttggtaacactttttctcataattcttctatattctaccctatattataggcattgcatatttctttgatttttcctgttagatgtttcagctttccttttaactagagcataatctgcatacagtaactcttttgtttgtctccctgcctcgttctagatatttcttctgacttaacattctacttcactaatcctcacttgagctatgtataaacacctttaaactcatctgttacatcctcaattttagttattctattttttgcctataaaatttccattttattgttataattactaattcctgcaaatctccatcttgtcatttaatatcttgatcatattatagttattttaaactccctatctgactttattctcctttgtaccatcaacaatttttaaaattatcattacttttataaaagttcagagatcatatatttgacatgaaaataaataaagattgtgtctgataattccaacatctaagtctcatgtggttgcattcctacttcagctttttcctttgctttggttatattatcttgtctatccgtatgcttgtgtattagtccaggtttgccagagaaacaaccaatgggatgtatgcacatggaaagaggtttattataaggaattggctcacatgtttatgggggttgacaaatcccaagatctgtagtcagcaaactgcagacctaggaaagccaatgatgtaattgtagtttcagtccaaaggtctgagagccagaatttctgatggtttaattccagtccaaaggctggcagcctcaggacccaggaagagctgatgtttcattttgagtctgaagacagaaaaaaaaaaaagtcctagcttgaaggtggtcaggcagaaggaattctcttttattaaaccttttggttctagtcagaccttcaactgattggatgaggctcactcacattagggagggcaatatgctttactcagtgtaccattcaaatgttaatctcagccagaaacaccctcacacatccaaattgtttgaccaaatatctgggcaccctgtggcccagtcaagctgacatgtaaaattgaccatcacagcttggcaagtattttttttaactgaatacctgacattatatgtgaaaaattagtaaaacaatattagaatcttatcttcctccagggaggatttacctttgtttttgcaattattcttagggtaggtcactttgatgccattgggaattgggttgaatcaaagctatctttggaggggctggcctatttccagttcatcgttacttctagggtatagtcctttaatagtttccactgaaagcctagagtgccttctcttttatgggcacacaattcccaggtttttccttcaagctcacaagatttttcagaaactctcttcagcttcttggcttcttagctactgcttgcaaatcagcaaataacaaagaaaagctacttcagcactcctctctgaagttcctttttccctagcattttagccttcaaatctcctctgcctctgatgccttcaaggggactttaaaaaactttcccaacttttctaattgttcttggcaaggagattgctctccaacaagatagcctgccatcttcacctcctatcaacaccattagcagctggtgctgagctttaagttcttccagctctgctattgagaagtatgtcatttcaagtttttaattatttttgtgaactgttttcttcctctggaaagttttagaatattcactttattgtcagtattatattttctgatgatattccttggactatttatcctttttaatccagaaactggcatacttacacactgaaaactcttgtatttttttctctacttgttttctcattatttgtgtgttatactttcagaaaagattttcttgatttattttcttttccattatccatttctttcaatttttagttttttgcaatgagaaataggggatattttccctactttatcttccaattcatctaattaaacttttgattttggcatctatgcaaatagtttctaaggaatttcttgttcttttcttcctttttgtaatatcctttttatttttacttcatgggtctctctttctctctctctcaggaaaacattttttagagtttttgggctcctgcattgtctgtattcattctgaattcctttcttcatgcttttaaaaaaagtactgatctgtctcttgtaagtgaagctttcctcaaatgtctagtgcttattcattatccactcatatttaagaatgaggcaccaggctgggcacggtggctctcacctgtaatcccagcactttggaaggccgaggtgggtggatcacctgaggtcaggagttcgagaccagcctgaccaatatggtgaaaccccgtctctactaaaaatacaaaaattagctgggcatggtggcgcacacttgtaatcctggctacttgggaggctgagacaggagaattgcttgaacctgggaggcagaggaggttgcccggagccaagaccgcgccactacactctagcctgggtgacagagtgagactccgtctcaaaaaaaaaagaaaaaaagaatgaggcaccaaaactatcaggaggttttgtatgggagtgggtttggtcagctggtcagctgtactacagggtaatttggacaggtatccaactttttttggtgtggtattctccagtgtacatattttttctggagccattaagtctcttcagaaaaacattttcaaaccacttatctaacacacagcatcctgaagcaaacagctcaaggagctggagtttgcatgggagaatgtcttagcatttagtattttggctttcacttatattgtttttatgatgttccttttcccctgcctttttctgtgccctgtgtctccagatcaggagcctctttcttctatttctacacagaataaacctccaggccatgatggggttatggagaagttgcttgagggtattggatgaggcaagtgtcccaggggactggctgcctctcagccagcctttcattcatcaagtctgctctgtgccctgcactgttactggcacctgttatggtcttggatccatctgtgaacaaaataggaaaagaaacaaaaaacaaactgcttatgcagaatttacagtttactaaggagagatggtaataagcataaaaatgagtaaattaatatgttcaaaggtgatactgccttgatataaagagtggagcaagataaaggggattggaagcaccatggctgggggatagagggcagtggtggactgcaagtgatttttaaaactttttatttggaaataatttcaaacttagagaagagttgtaagactaagaatagtgcaacaacatgagatacacttttaccagatttacctgttgttaatattttacctcatttgctttatttgctcccctacacacacacacacacacacacacacacacacacacaaacacagacacacaatatttcttcttgaaccgtttgaggataaattgaatatattattgccccttatccctaaagacctccttaagatgttcttaagaataagaatattctcttaatcaaccacagtacagttatcaatgtcagtaaatgtaatattgatgtaatactttaatctaccttgcatattcccattttgtcatttggcccactaatgtccttgatagcattttccctcttccactatggtctggagaatcaggtattgccttgaattttcatgttcctttattctcctttagtatgaaacatctcaagcatattcctttgttttttcataaaactgacattttgaagaatataattcctttttaaaaagagattatcctgattttgtatttgtctcatgtttccttttgactagattaaggttttgcattcttagctgtaaaataatacctcataggtgatgctatgtccttctcagagtaggtcacctgcaggcacatgacatccagctgctcatcattggtgatattaatttcaatcacctaatcgagatgttatgcagaatttctccactgcatgctttactttttcttttcttttcctttttttttttttttttttttgtggcgagggtagttggagtcttgctctgtcacccagactggagtgcagtagcatgatctcagctcactgcaaactccacctcctgggttcaagcagttctcctccctcagcctcccgagtagctgggattacaggcacttgctgccaggcctggctaatttttttttatttttttagtagagacgggtttcaccgtgttgcccaggctggtttcaaactcctgagctcagacaatctgcctgcctcagcttctcagagtgctaggattataggcatgagccaccgcgcccagcctgcgtactttactttttcttagcaatgaataaagagtctatggggaggcacttttttttcatgtcaatatcctcctcttcaacgaaattttctcctagattcaacatccattatttatccttgcctgatccaatctttaccaagattttctaactgtagtactttcttcacataaacccattagaactcaatattcttttataagcaagaaccttccttcttatgtatgtttaatttgtatatatgtatttatcagcatggacttatgaatttcggatttattaaaggtatatgattcattaccatattgattttggtgataaaattattccatatttggccactgggagccacttaagtcgggctcctgttgtaactgcaattttaagcaagatgtttattaggcatcatagaagtgacctgctggaggtagagttagccacatggctatctagggtacaagggttctaaacagcagaatagttattacaaaggctttaaggccgtgagtatgcctgtttgagaaacagcaaggccagtgtgactggagcaaagtgactaaggtgtgaagtaataagacagggaaactttcattgcatttgccctccccacactcttctatatcctgtggtccagaagaaacattaaatacacccttatacccaccaacaaacgaagaagtaaaaactgccattaagccaacttcttgaatttattttgtatgttgtaaaatccagatagctacatatagatgtgtactttttgaaaatgtatcccatcagccagtgatagttgtatttccatggagattattccagtcgcctgtatttgaacaattatacaggatctgactgtaattagaaaaaggagatgggcccaagtcaacctagtacaagtttggatttcacattttaaatcattggttaaataaaaacaaagtgaagatgaaaatgtttcttttgttaaaaaagataagaaaatataaaattggagcttttattaatttatacatgtctcagagaaataatagtcacagagaagtagcagacagtggcatgcacttattagcttctcacattattatattacactggaaacatgggctgttactgtacagtgaaactagagtttaaggtggagaaccagattgacctgatgcatgtgtttatgagtttcacattgaaggtgcctggtttttgttgttgctgttgttgttgttgttgttgttgtcgttgttttctctccaaagaatacagcttagaatgagtgaggcaagctcaaatcatgtagctgtaactgtcaacttggtgaatttctgagttatcagaaagtgagactctgggcatgatgaggccataagtcagggaatatcagcaaccatcagaagctggaagaagcaaggaatggattctcccctagagcttcttgacacagtgcagccagggcatctttatttcagcccagtgatactgatttggcctccaaaactgccagagagtaaatttttgttatttgaagccacccatttgtagcaatttgttacagcagctgctggaaactactacattgccattgacacttgatcgctatttcagtacgaagacctgtgtatctgtcttgttcagtgatactgatttggcctccaaaactgccagagtgtaaatttttgttatttgaaaccacccatttgtagcaatttgttacagcagctgctggaaactaatacattgccattgacacttgatggctatttcagtaggaagacctgtgtatccgtcttgttcagtttgggggaaactttcatgcattatttctgtcatgttcccttccctccctccctgtcttttctttctagaactcacttgataggacattagttttcctgggttgggtgtctgattttctttccacctgtttatctctatgctttcagtggaatttttttccactcagtctttttcactgatatttttaaattgaagtataaatttttttttttaaatactactgtcttgaccaggcacagtggctcatccccgtaatcctagcactttgggaagccaaagtggaagaatttcttgaagtcaggagttcaagaccagcctgggcaacatagtgagaccctgtctctacaaaaaatacaaaaattagcctggtgtggtggcgcacacctgtagttccagctacttaggaggctgagacaggaggatcacttgagcccaggaggttgaagctgctgtgagctgttatcattgccactgcactctagcttgggcaacagagcaagaacttgtctctataaaactaaataaatttaaaaataaaaaaagaataccactttgtttactgcgtgtttcttttatatcccactcatcattgatacagtattttctcttagctctaagcaaattacaatttcgtctgattcttcattgtcttttcctctgagttttatatttgttgtgctgtctttcatgttagaggctttacctaatatctgtcaatctgttgtttctttatagtaaggaagtttttccccctgaaatcaatggatgaatgggaattatatttttaagttattagaataagttaaaaatgtgtaaatagaataaatgcatttgcagggcatttactctcataagactgagggagagcatatgtgtgtattgtggcttattgttacaactatctcctagattcattgaagatagaagttacgtttgtttcatagtctcctcattggcttgtagcaatttttcaaaagaaggaaggaaacatttttaccttacaataaaagtctgaaaccacatattttatggtgatctataggaggactaactggaaccagtcacagggtactgtccctaacagaatgtgcatctttcatgcagtaattatattttactagtggaaactacattccaggaaacctttacataaaggttttacaatgttgaaaataaaagatatgctttttacctttaaaaagaaaggtggaacttaattgagaatattatagaattatttcaaaatcagactgcttttaaaaaaacttcaacttttattttagataccgggggtacatgtgcaggtttgtcaaacgggaatattgcatgatgttgaggtttgcgatacagatcctgtgacccaggtagtgagcatagtacccaataggtagtttttcaatccccccatcctcaagtggtccatagtgtttattgttcccatatttatgtccatatgtgctcaatgtttaacttccttttgcaggtgagaacatgcagcatttggttttctgttcctgcattaatttggttaggataatggcctccagctccatccatgttgctgcaaaggacatgatttcattcttttttatggctgcatagtagtccatggagtatatgtaccatattttctttatccagtctaccactgatgggcatgtgggttgtttccatgcctttgttattgtgaatagcacaacaatgaacataagtgcatgtgtctttttggtagaatgacaaagttagtctttgatttaatggtgacaaatgtgcttaattacttaatgcaaactttgctgtatgcatttgaaaagcgtcagttagttctatcaattggaaatattagctgtacttactgaacaactgtctagagccattgagttaggtgaatttcttggttactgactaacacagagtatatgatcctcagtttcatcatagagcatattcagataccgtggaggcacttttgatggacaaaggctatcagcaatgctatccagtcccattagggaagttaagagtctccccagagtctgttgtcctttctctgagctctgcagaagctgagacctcagaagtttagtaaggcagcccgggcacagtggctcacgcctgtaatcccaacactttgggaggctgaggcaggtggatcacctgaggtcaggagttcgaaaccagcctagcctatgtggtgaaaccccgtctctactaaaagtacaaaaatcagctgggtgtgatggcatgtgcctgcaatcccagctactacggaggatgaggtggaagaattgcctgaacccaggaggtggtggttgcagtgagctgagattgcaccatggcactccagtctgggcgacagaatgagactttgtttcaaaaaaaaaaaaaaaaaaaagtttagtaaggcagacgtaaaaatcaggaactaaatttcggttattgctgagtctgggagataccatggtaccaccaggagggatgctacccttatgaacctgttctgtctgggagtaaatgggaggaggaaacccccttcagagacctgtgaggaagaaataaacatcagatatgtcttctttcctgaactaagcaggacagatcctaacctgttctgttatcaaagctgatatggggacttatacacttcagccatttgggcctaaccttttctctgtgagttaactgcttatattcccaaggtttagtctctatctcatggggtcttagctgccctaactgatggatttgcttcttaccacataaaattgaacaagaaagctgtactctttgccttccagttgacttcctagacgctgagagtgtcctggggcagcttctgtggcagaaatcccttgtggctggggctgtgctgtgtgccctatacatgcctctggctatgggcctttgcattatattattcatccttggcctgaaaccctgtcacggatacctttgcctcatcttagtactggtataaaatggcattttagtatatggaactgaagtatacatgtttcacaatatcttttagtaaagttaaatagggaataatttttttactggtttcactgaataaccctgtattctatcatcagcactttgcttgtgtactcagtgtttgtcaagaaaatttctttctgagctgcttttcaaaggttccttgacccttatagagaagaaattttgagtgcctatttagtatgtttctattttactcttcatttcccatgtcctgatacctctctaaatatctctcccactagactttatgatctctgaaggcagggactttgtcttgtcacccctgtgtctccagcactcagcacagcacctggcatactgtaggtactcagtatatcttcatgaatgaacaaatgaacaaatgaatgaacaaccagtagatctaaggaatggctccccctcccagtcatgctaggcctgcgcttttaaatattggggtttttaacttagaacagtcccagtgccattgccaaagatagtggtggggtgtgtgtgtgcttcctgacccatacatagcactccagctccaactttatgccaagtagcagtttcttgatcagcagagccatcctatcacattctgtgtagctttacctctaggaaccatgagaaaggcctgttattgccaaaggccatagtagtcatgtgagaattttgtagctatagaccttaaggtttgctattcactattcactgaattctgaggctacctggagaacactgtttaattcaaaataacaggtgcttcctaagagatagttgtactgcagagcagcaggtaaagaataatttgcagtgagcctgtgagcatcattgttttctgaatgagctgtcagtgattctaaatcagaagagcccaaaacgaagtggtttccacaagatttcaagctgaggagaacagcattttgcatccaaaataaaataagtgcagagaatataaaatgataaaagcttgagaagaatgggctataggaagatattgaagctaagtttcaggtgtttgtgcagttataagttatgtaaagacctctgcaaatatgcaaacattccttattattaacaaccgtgacatgaagattaaaagtattaaatggctttttttttcacattcaggtaattaaagtgtagaaaaatctctgccccagaggtctgaatataattcacatgaatggaaaatggcaaaagtggttagtttcttgagtaccatcttaactgaaacatactaaaatggcataattttgtttcagtaatcagtagttgaaagatctcatgctttacttcttaggatatggatttaattatttctggagctaaatgatttgagacacttgtaaagattagcccatatctaacaataatagtagtaattggttcaaccataagaaaattgcctccaaacaataacaattacaaataacttattttgtacgtaaatatatagtatatataaaggttaatggcatggattcagaaatcatcctgctttaattcatatctctgtcactttgtggctgaacctcagttttctcttcagtggaatgagggaacttcataaggtttttatgtgtattaaatgaaacaatatatataaagtgcataagtgtagtacctagaaaatagtaagctatcactactactgttaatccaagtacttccctgcgaggcatattcttatctttctgacatatgaagtttttaagacagagtagaaaatctcaaaaagcaaactcttgattaaaatataatggcatttgcagtttataaactgcatacttagtaaataagcttactaagcttgtgtttccagtgtgatcctaaggagaagaacacatggccttatgggaagaggagataaactaaactaggattacttctagacctatgttttgacagctagcaagtttatctttgaaggctgtctggttgacattgcatgttggctaagacatgccttacaaatattgcagtcacataaaaagagaaactgtgtgctatttttttgtttgttttctgcttgtacggtggagaagcaccctgccataaatacattgggtgggttaaactaataaacaaataggcagggtggcagtgataatgtttttttgaagatgttgaagtactatttgtcgcagcttcacttagtcataacacataggcaccattgctgctctcccagaaaaatggatgcatctgtaataagctatataaacaggtgaagtctttcaaggattttgaagatttactgtttttttaaagcctatttaatgaaacaggttgtgcacaatccacacctaagcaccatacttcttaccttgtggccatacctcaaattgtttcttagctccttttctaaaaaatgattacaacaataataataaattcaagaaaaataagcatcaaaatactttcctctaacccctgcaaatgtatccagtataaaaattcccagtgtgcatatttaccttcctgtactgttcaagaaaacacggttgtgcttcattatcaaaagttcattctggtagataacagaagagaatgtgaaatatgcgaaaatgttttcttaggatagaatgaattggctaacatgggagttctttttttaatgagatagtaacataagaaaatgtttggtcgtgtacacagatttggaaaccttcaccacacagctgtgttatcaaattaggcatacttccttgacttaggtgatttttttttttaccaatatgaagaatgaaaaatttttattactgtgatttatcaaatttggactgcaaatttcattgaaattatcattacaatatctaggaaaagtgtcacccagcaggtaataattgttgttctccaaaggcaagagaggaaaaccagtctcatcaactaagtattagttgtgataaggtctttggtcttcttatatttttacaaggcagtgacgcattcaatgtacatattagaacttccttattgttttggtccattcccattatttcagactgcattttaattctcaatttgttattgatatagatcaatcaaatataaccctgtggttgcttatatatttttagagtttcccttacatgcagttttgcttaacatgggtcacagtaaaggatcgtttataaaagtaatggattgtttcctgtttctgccagctgatttgatcaatctgaagttccttatgtactatgggttacataaccagtctggaatctgtgtggtacattcttctagtttggtattaactgaattaatcatttatattctttaaatcattgaggacattttagtaaacacttgaactgctctcttcttcaagtactctgctccagcaatactgttcacctggctcttactcaaacacaccactttagctttctatggcctctgcacatgctcttccctctccccacaaaatttatttttccaagcatctcttagctcaccccctaactgcctttgcacaaatgtcacctttcatcaaagcctttcctgaacaccctatttaaaactatcccaccacccctagcaatttctagtcctcttttattattttatctgccccgtcataggacttgtgacttactaccatcatacatatttgattcaattattatttattgcttaaattgttatgatcatttattataaatcatgtattacagctaattaacatacatatgctcagtcatttacttgattagttattagcctcaattatatcttattttttaatatatatttttatttgacaaatagaaagtatatagattggtacaatatgatgtttggaaataagcatatattgtggaatgactaaatcaagctaagtaacttatgcagtaccttacatgcttatcttttgttgtgataagaacacttgaaatctattctactgtcttagaaatttaaaaatgggcaaaggacttgaatagacatttcttcaaaaaaaatgcaaatgaccaacaggtatatgaaaaggtgctcaacatcactaattatcagagaaatgcaaatcaaaaccacaatgatatatcacctaacacctgttaagatgtctattagaaaaacaaaatgtaacaagtgttgataaggatatggagaaatagaaatctttgtgtgccttgtacactgttgcaagagcattagtagaactactttggaaaactctttgtaattatctactaaagatgaatatatgcctactatatgacccagtgtttctactttgaagtgatacagccaacagaagtacatgcatacatgcaccaaaagacatatacagaaatattattaggacttctggtttccagttccacatgtagggagcttagaagttgccactccaaccctaacaagtaaaaagctaagcaaactgagaaatcaattcttatcggacccaggataggggaggacacagggaaaaccactgtccccaaaagactagagagacagactggcaaataccgagagccacaagttactagagcatgcagtcacaaacagaaacccccacaggaagcagtgccatggtagaaaaacctgagctgtaattgatgaattataggaggttcagtatgaacaactctgaaagttttaaactccaggaggacccactcatggggaaacaccacaattttgttagacttacctacatgagctcaattagattctccaagtaaatattgcagaaaaatccctatgtgcttctggcagggggaaggtgaaatgaaccattttgaaatatgccagagcactgtgctcttcttaacaaggtctgcccccaggagaaattagttagctaaatcctaacctgctggggtattattagagcctgacccaagggaagggaaatacctaactcttgtcagctctaaccttctgcatcagagaagggaaatactaaactccagacaactctagccatcctgtcctaccaaagaggggagaagaatactgaggaaacacttagaagtttgtacaccagaggcatatgcttactaaaagactgagacttaatcataggatgatagaatgtctcccctcccctttcccccacctaactgctacattgctaaaagctgatttataaaagttccttttacctggtacatcatgtccagctaccaagaaaaaattaccaggcataccaaaaggcaaaaaaaaaaaaaaaaaaatctgaggagaatagagcaagcttcagacccagacagatagggattctggaattatcagatgaggaatttaaatccactatgattaatatactaatggctataacagataaagaaggcatcattcaagaataggtagacaatgtaagaagagagatggaaatcctaaggaaaaagcaaagagaaatgctagagagtaaaaacaccgtaaaataaaaatggctttgatgggcttatcagtagattgaacatggctgaagaaagagtctctgagcctgagaatgtctcaacataaacctccaaaattggaaagcaaagaaaaagactgggaaaagaaaaaaaaagaataaggactgcaggacaactacaaaaggtgaaacatatgcataaggggaatactagatggaaaagaacgagagaaagaaacaagaaatatttcaaacaataatgacagagacatttcttaaattaatgtcagacatcaaacttcagatccaggaaactcagaaagaaaataataggggtttgaaactcagatctccataaagaaaagaagagcatcagagagggaataaacaaagactaaaatgttcatttttcttattcttaattgatctaactgataagtttgttcaaaataataatagcaacagtgctttcgattttgtatgtttatatgttatatgtatgcttacatataagtgaaatgaatgacaacaacacaaggagcaggagggaagacttaggattattttgtttttgtatgatacactacttataaagtggtatagtgttatttaaaagtggacttgggggtgcagcgcaccagcatggcacatgtatacatatgtaactaacctgcacaatgtgcacatgtaccctaaaacttaaagtataataaaaaaaaaaaaaaaagtggacttggactagttgtaaatggatattgcaaaatctagggcaaccactagaagaattttttttttttaagtataactgacatgctaagaaaggagagaaaatggaatcacataaaatgctcaattaaaaccacaaaaggcagaaaatatgtggaagatgaaaatagaaaataatgacaaatgtggtctatattaatttaactaccagtaatcactttgaacatcagtggtctaagtgcaccaaataggcctggtgtggtggctcacacctgtaatcccagcactttggcaggctgaggcaggaagatcacttgggcccaggagtttgagaccagcctgcacaacatagggagacagaccatctctacaaaaaatttgaaaaattagccaggcgtggtggtgtgtgcctgtagccccagctactcagaaggctgaagtgggaggatctccttgagcctgggaggtcaaggctgctgtgacagagtgagaccctgtctcaaaaaaaaaaaaaaaaaaggaaaaagaaaagaaaaagaaaagcactaattaaaagattgttagagtggatcaaaaaacaagactcaactgtatgttgtttacaagaaccccactttaaatataaagacacatgtaaatgaaaagtaaatggatggagaaaaatataccaagctaacactaatcaaaagaaaacaggagtagctatatttcagacaaggccgacttttcaaagcaaagaaagttatccagaataaaaaaggtaattacgtaatgataaagaggtcagtcctccaagaagacataacagtcctttacatgcatgtgcctagcagcaaagcatcaaactatgtgaggcaaaaactgatagaactacaagcataaatatatgcatccactatcatagttggagatttcaacacccctttatcagaaatggacagatccagcaggcagtaaatgggtaaagacctagttgaattcaacaacaccatcaatcaacttgatataattgacgtctatagactacttcatccaacaagagcagaatacacattcttctcaagatcacgtggaacattcaccaagatagaccacattatggtccataaagcacaccttaacaaatttagaatagaaattatataatgcctgctctcagaccacagtggaattttactagaaaccaataaaggaaagataactggaaagtcccaaaatacatggagattaaacatggattagaaaagaaattccaagataaattgagaaataattttgaactaaatgaaaatgaaaacacaacttatcaaaatttataggatgctgcaatgagccaggatcgtgccataaaataaaattaatatatcagagatgtatgtactccatgtccattgaaacacccttcacaatagcaaagttaacagaatcaacctaagtgtccatcagcagatgaatggataaagaaaatgtgtatgcactcaatggaatactgctcagtcttaaaaaagaagttttgtcatttgcaacaatgtagatgggcctggagaatattatggtaagtgaaataaaccagacacaggaagacaaatactgcatgtcctcacttatatgtggaatctgaaacaacagaacttataaagtggggagtagaatggtggttactagagtctggggtggtgggcagtgggagaatgaggagaggaatgttagagggtacaaagcctcaaatagacagaagtaataacgttttttcctttgggatatattgcacagtgcagtgagtatagcaaaaacagcctttataacaaatgatgctggaacaactgaacgtccatgtgcaagaaaatgaatctagacacagaccttatacttaccacaaaaaccaactcaaaatggattatagctctaaatatgaaacacaactataaaatgactagaagataacataggagaaaacctagatgaccttggatatgatgatgactttttagatacaaaccaaaggtacagtccctgaaagaaataacagataagctgaacttcattaaaattaaaaacttctacagaaagcagggtcaagagaataaaaagataagtcatagactgagagaaaatctttgaaaagacacatctgataaaagactaatccaaaatatacaaggaactcagaaaactcaaaataagaaaaatataaaacctattttaaaatgggccaaaaaccttaacagatacctcaccaaagaagatatacagatgacaaataaacatatgagaagatgctccacatcatatggcatcaaagaaatgtaaattaaaatgacagtgagataacgccacacctgttagaatggccaaaattcagaacactgacaataaatgctgaaaaggatatagaaacagcaggatatggagcacctctcattcattactggtgggaatcaaaatagtacaaccaccttggaagacagtttggtgatttcatacaaagctaaacatattcttaccatgtgatccagcaattgtgctcgtaggtatctacccaaagaagttgaaaacttagtgcacatgggcatttatagcagctttattcataattgccaaaacttacaagcaaccagtatttccttcagtaggtgaatgaataaatacactacggtacattcagatgataggatattttttagcattaaaaagaaatgagggggcctggacatggtgggtcacgtgtgtaatcccagcactttgggaggccaaggcaggagaatcatttgatcccaggagatcaagaccagcctgggcaacacagggagaccctctctctacaaaaatataaaaaatgagccaggcatggtggtgcacacctgtagtcccagttacttgggaggccgaggtgggaggatcacttgcactcaggatgaggctgcagtgagctgtgattttgcctagttataggctgagagggtggtgagtggtggttcttctcactctgaagagatctctagtcattctaaaacccattcatttgtcattactatatagaagagacaataagtaatggacctatcctttaagaaaacctctcatcaaagtatgcttctttattgcaggtaattcgtgcctttctgctctttccaacaattgaacgaatgtctgagtcacccaatggcagaattgccactccacttttgtgctggtttcgatatgttctctatgttactggctacttattattgaaaccgtgtcctgagacaatcaagtcct

SEQ ID NO: 15659 - DNA, 34222 bp, Homo sapiens
gaggggggcacttccggtctcgtgccgccttcccaggaccctcagggagagcgggcagccttccaggtggacaggtgaggtacagcttgccgagctcagggtgactgcccaaaggaaggacgggtgggcaggcacgcgggatctggcgccccttcttctctatggttcctcgcagagcccctgttgccctgggccagatggcccgtagcagcaaaaataatactgttccgacagctcgcgagttcggagccacttggcctgggagtcccttgagttgcaggccgggcagtcgctcacccgagcgcggtaatgcagcatttgaacccctaagtgtagcccacctgtagggagtcttatggtgcccccgcggaggagtagaggccaaaaagttgggcagctggccgggaagaactcgctaggaggggtcaaactctgggccgggagtgttctttgcccccggcgtttagtgctcacgccgccttttattcacgctgaagaccttaaccgtaaaccctcatccttgggtcttagtttggttttgttccccacgcaagacagaatgcagattggaacactttattccttggttaattcgtatcttccctcgcaagtagttaccggacacctgctttgtgtcctgtgtaccaaacacaagagttgatagtcctggccgggcgccgtggctcacgcctgtaatcccagcactttgggaccccgaggcgggcggatcaggaggtcaggagatcgagaccatcctggctaacacggtgaaaccccatctttactaaaaatacaaaaataaatacataaataaataaattagccgggcgtggtggcgggcgcctgtagtcccagctactcgggagactgaagcaggagaatggcgtgaacccgggaggtggagcttgcagtgagccgagatggcgccactgcactctagcctgggcgacaaagtgagactcagtctcaaaaaaaaaaaaagagttgatagtccttgagttgaaagaacaaatctgtatggagaaagagatacaaccaaaagaaacccagaagatttagaagcatctccagaatgtttattctcaaaagctgttttttaattaaacttctttctgaaactatacgtaggagtgtctcttgtgtgtttccccatttttccacctgaaggttaaagacttagaaacctgctaaggcccctctttccagcatgtagcattctagggggataatcagggcaacacagtgggtgcccatctaaaattttatattttaatattttgctttttgataacttaatgccttcagactggaggattttttctttcttttttttaatttttttaaaattatactttaagttctagggtacatatgcacaacgtgcaggtttgttacatatgtatacatgtgccatgttggtgtgctgcacccattaacttgtcatttacattaggtatatctcctaatgctatccctccccactcaccccaccccacaacaggccccggtgtgtgatctcccccttcctgtgtccaagtgttctcattgttcaattcccacctatgagtgagaacatgtggtgtttggttttttgtccttgcgatagtttgctgagaatgatggtttccagcttcatccatgtccctacaaaggacatgaactcattcttttttatggctgcatagtatcccatggtgtatatgtgccacattttcttaatccagtctatcattgttggacgtttgggttggttccaagtctttgctattgtaagtagtgctgcaataaacatacatgtgcatgtgtctttatagcagcatgatttatattcctttgggtatatacccagtaatgggatggctgggtcaaatggtatttctagttctagatccctgaggaatcgccacactgacttccacaatggttgagctagtttacagtcccaccaacagtgtaaaagtgttcctgtttctccacatcttctccagcacctgttgtttcctgactttttaatgatcaccattctaactgctgtgagaagatgtctcattgtagttttgatttgcatttctctgatggccagtgatgatgagcattttttcatgtgttttttgtctgcataaatgtcttcttttgagaagtgtctgttcatatccttcacccactttttgatggggttgtttgtttttttcttgtaaatttgtttgagttctttgtagattctggatattagccctttgtcagatgagtaggttgcaaaaattttctcccattctgtaggttgcctgttcactctgatggtagtttcttttgctgtgcagaagctctttagttaaattagatcccatttgtcaattttggcttttgttgccattgcttttggtgttttagacatgaagtccttgcccatgcctatgtcctgaatggtattgcctaggttttcttctagggtttttatggttttaggtctaacatttaagtctttaatccatcttgaattaatttttgtataaggtgtaaggaagggatccagtttcagctttctacatatggctagccagttttcccagcaccatttgttaagtagggaatcctttccccatttcttgtttttgtcaggtttgtcaaagatcagatagttgtagatgtgtggtattatttctgagggctctgttctgttccattgatctatatctctgttttggtaccagtaccatgctgttttggttactgtagccttgtagtatagtttgaagtcaggtagcgtgatgcctccagctttgttctttttgcttaggactgacttggcaatgcaggctcttttttggttccatatgaactttaaagtagttttttccaattccatgaagaaagtcattggtagcttgatggggatggcattgaatctataaattaccttgggcagtatggccattttcacaatattgattcttcctatccatgagcatggaatgttcttccatttgtttgtgtcctcttttatttcattgagcagtggtttgtagttctccttgaagaggtccttcacatcccttgtaagttggattcctaggtattttgttctctttgaagcaattgtgaatgggagttcactcatgatttggctctctgtttgtctgttattggtgtataagaatgcttgtgatttttgcacattgattttgtatcttgagactttgctgaagttgcttatcagcttaaggagattttgggctgagacgatggggttttctgaatatacaatcatgtcatctgcaaacagggacaatttgacttcctcttttcctaattgaataccctttatttctttctgctgcctaattgccctggccagaacttccaacactatgttgaataggagtggtgagagagggcatccctgtcttgtgccagttttcaaagggaatgcttccagtttttgcccattcagtatgatattggctgtgggtttgtcataaatagctcttattattttgggatacgtcccatcaatatctattgagagtttttagcatgaagagctgttgaatcttgtcaaaggccttttctgcatctattgagataatcatgtggtttttgtctttggttctgtttatatgctggattacgtttattgatttgcgaggacttttttctttgttaaaatgttgctctgctttcagcattttctcccttgtagtattaccataatgtatttaagattgagcacttaattctgaagtcactttaagtatacctcaaccaaagggaaattaatatattatttctaatgagtgtatttaatataggtaagtagtttgtacacttgtgaaattcttggcattaattgatgtccagaagctgaaagctactctctggtacattaaaaaaaaattgtgtgtgtaattacaagaaagtttgatgtcacagttgcaaaggagttgtgcaaaacaaattgcctttttccagtaaagataattcagcaagttcatcttgagtgtagtgtgtggtttcgtttttaatatgtcctcagcagtagtcatagattttatcttcatcatttaagctttattttctggcccacttgcacagatttaagaaaaatctcactggggttagtgtgcagtcattcagacagcaaatacagcaaaagtaggtgaaaatgtaaaagtcattaaaagaagaattgtgaaattgctcatctcgcaaccacatcaagcaggagcaaagacaactacacagaatcttggtgtaacatacactcattaccacttggactttctcctacagtattttgcagtttgttttttggattctttagtgttatataatatttcaaagtaatatgtgactgggaaatattggaataggtatcagaagactgtagaatttattttgccatttaaatgcttatgtccttgaacaaaaaatgtaaacatctttgaccttcaatttcttgttctattaattgcctgctttttaggtctgatgagaaaggaagagaatataatttgcaaataaaaagaagcaaaaaaaaaaagcagtagttttattgcaaggggctagatggtgatcaagttaggatatagaaaacaattacttgttcttacatgttattctggagaaagatgagatggatacccatagttacagcagaagcgtaaaaagaattctgtttatgcatcatctgtttatgtgttgactttcacctgtatgttttcaagtttatatagggctatgtgctaagattcccaattttcccctttcataccacttattataccagttgcaattaaatacatatataattattaataacttttttaaaaacctttttgttttgagagaattgcatattcagaggaagttgcaaaaaactttacagggaagtccttgtgtacccttcagactgcctgcctcaatggtaacaacttggataactgtggtacgatattaaaactgggaaattgacattgatacaattcacagagtatatttccatttcaccaactttataaggactcatttgtgtgtgtacacaggtctatgtgtagcttcttataactaccgtaatcaagataaagaattattccatcaccacaaggctcccttatgctgcctccttatagtcagtctatcttgtcccagccctatccctaacccgtggcaaccactgctctatctctataattttgtcatttcaaggatattgtgtagatggactcataccgtatgtaactttttgagatccatccaaattgtgtgtatctgtcatgcatttctttatttattgctgagtagtattccatgggatggctatgctacagtttgtttaaccattcattcattgaagaacatttgggttacactattataaatagagcttctatgaacttttgtctgaagatttttgagtgaacatacatttttccccctctgggataaatgcccaagagtacaattgctaagtcatatggtaagtgtatgtttagtgaattaatacttctttagcttgttgatatggtgagttacattgattttaaaatgttgaacacaactggtataaatctcacttggttaaagtatataattatatatttccatattctatttgctaatattttgttaaggtataggtagagaggtgtgagaggttaaggtataggtatgagagatgtgttgtagttttttgcttgtttgttttgtactgcctttgtcaggctttggtagggtaatagtattctacatggtttttagtgataacccttgtttcattattgctactgtattagtaatttgtgtcattttatctttttcagtgatgatttgctggttatagtgacctttttcaaagaactcgctctttatttcatctttgtctatttttatatttttaatgtcattgatttctgctcttatatttattattttcttccttctcactttaggtttattttgcttcttgtctagtgctgtgattattagtttaaggtctttctttgtttctaacgtaagcatttattgctataatttccctcttggcattgcttttgttgcatctcacaaattttgctgtcttgtattttcatttctatccagttctatatagtttaaatttttccttagaaatttgcttgacccatgaaaatatttgggagtgtgtcatttagtttccaagtgtttggtgatttacctgttgtttttctgttgttgatttctagtttttttccacaatgatcagaaaacataagctgtataatttttaatttttaagtttcttttatgactgagggtatggtgtatcttggtggatgttccatgtatgcttgaaaagaatgtgtattctgttattattggttgcagtgttctatacatgtcagttatgtcctgttcattgatggtggtgttctgttcttctgtgtcttcttgatcgtctaatagttattttcgttgctgaagatcccaactataattatggatgtctctgtttttcctttgagctctgttggttttggcttcatgttaaatatctgttgtttggtgcatatacatttaagatgttttcttgatgaattaatccttgtatctttgtacaataattttctttgctctgaagtctacttaactgatggcagtgtagccatcactacttaaaaaaagtagttagtatggcatatcttttccatacttctgttttcaacctaccaatgtcattatgttttagtgaatttcttatagacgctatatgcttgggtcttttaaaaaagaaacttctctgccaatctctgtcttttaactagtatagttatatcatttacacttaaaagtaattgctgtgttagggcttaagccagccattttattatttgttttctgtttatttcctgtttttcatatctgttcctcttttctggtctttctgtaggttgcttgaatattttcagaattctatttgacatgtttatagtgtttttgagtatctggcttagttaaccttttttagtgtgctttgggtataacaatagatgtaacaacttatcacaagggatacttttattgccttttgccaattgaagtttagagacctttcttccatgtaggtcctttctccttttccctttttaaaatttaatatttgtattttctctatacaccttgaacaccacatcaaatgttgttataacgtttacttcaactatcaaatatgatttaagaaactcataagatgaagaatagttcattttatatttaccatgactattacccgttccagtgttcttcctttactcaaattaaaccttattgatacatcatttcctttttgtttgaggaacttttttttaggagaacctcctaaagatatgtctgttagtgacaaattagtttccgtcatctgagaatgttgttcccctttgttcctgaagggtggttttgtcctatatggaatttggccttgacagttctttttctttaacatttgaaaaatgtgccatttctttctggcttccatgatttctgatgagaaatctgatggcattcaaattattgttccccttaaaggtaatgtgccatttctctttggctgcttttgagatttttttctttgtttttaattttctaaacttgacttatgatgtatcttttatttttattttttcccacttagggtttttctcagcttcttgactctgtagatttatgtcttttgtcaaattgtgaagttttcagctattatatctttatttttttcagcgccatactttcttctcttcctctaaaactctgattggatgaatgttaggtcatttgttattgtcctacaagtccctgatgcctttcttgtttctttgtctgtttttctgtgttcagactaagtaaattctgttgatctgttttcaagttcactgatcctgttctctgtcaattccactccactattgagcccatccagcaagtttttaattttaattagtattttttctattttgtaattatttttggttcttactttttaaaacatttcatccttcaaggagagctactttcaatatacatggaatttcttggaaaaactagtaacagttttaggttatttgtatatatgaactaatgttactcaagattttaaacctctgcagagttatctctgtaattagcagatgaagcatgaacatacataatttttttctctttttgtctcaggtaattccttgttacaggccctaataaaagggaaatggggaaggaaatggagaagagaatttaggccttggcaaattgaaaattgtctgtagtatctcactgacaggtaaagtaggaattttgaaattagagaaaaggaaccaggaatgaagatgaaatgaaaaatttatatttacttcactaaaacttttaaagttgtcatatagtttcagatttaaaaagctatttcttccagcctaggcaacatggtgaaaccccttctctaccaaaaatacaaaaagttagccaggcatggtggtgtgtgcctatagtctcagctacttgtggggcggaggctggaggatcacttgagcccagaaggttgaggctgcagtgagcgaagattgtgcccctgtattccagcctgggtgacaaagtgagatcctatctcaaaaataataataaaaataaataaaaaatcaaaaagttctttctcctttccttcatttcccttgaagaatactgaagattttacatagatgacaaattaggtaaatctaagaaaaaacaaaaattaagtagaacaggtaactttcagtggccatacttgagatttaggttatattgactgctgaggtttatcagtttgattcctatccctacaatataattaaaaataaaccatggaccccccccccccattgtcagactcactgacagtataacattgtgattaaaaagctctttctcagtaagtatgaaaagttaatgcatgaaaaataatatatgttaatttagtgggggaaaagatggtttctgtattacagtggtattaacacaagtagctttccatctgaaagaaaataaagttggatccttatataatggattaaaggtttagaagtagagactaataaaaattaaaatagacatctgggaaacaatatgtaaaatatggaaacccagaaaagagttagtatctgcattatacaaagttttcttacagactgataagaaaaagataactcacttggaacctagacaaatgatatgaagagacaatttacagaaaagatagtctaaaaagctaacaaacatgaaaaaatgcttaaacacacttgtagtcagtgaaatgcaaattaaagagtaaggtattttatatccaaagactgtaagacttacaaagtgtggtatcacttagtgatgatagggttgcagagggaaagataccattctacatcgctaaaagaattacattctttttttgagaataatctggcaacatctattaaaattcaaccagtaatttcacacttggcaatctggcctataaaaacaaaagcactggtagatatgaatgtatgtgagaacataggtatttaagggtacttattgcagcattgttctgaaaaaactgggaactaattgagtgcttggcaccagggagatggtcatataacttatggtatatccacattatggaaccattaaaaatgaattacttatataaactctttgacttggcaggatatccatatgttattaagtatgaaagcaaaatgcatagaagtatatataatatgctactatttgtcaaacactggcaactcattcatgaaaaaatacataaatgcttaacatatatttgtgtataattatagaagaatatggaagactatactaagttaataacatgggtttgggagagatatggatggtaaggaggagaggtagagtggaggcatgatgcaaaaggttaaaaaattgtttagaaaaatcacagcatgcattatatctcatttatccatataagtgaaattatatatatgcatataagtagaattttaaaaataaagaacatgagctctggaatctttcagacatttctggattcaaattctgactctgccactttacaacttactagctgtgtgacttaggcaaattgcgtaatgtctttgaatcaattttctcacatattttcttggggtgggaggatgaaataatagtacccatctatagggttgtcatcaggattaaatttagatagcatctgttaagtgcttagcacagtacctggcttacagaaagcactctcagttattagttcttactgttgccttggttcttacgctcttggacatttgttaatatctatttttaaaactttatcaccatcctgccactttcttgaaacactcctcactggcttacattactttacatgtcttagttaatgcctgtttctaattgttcctttttattttgctgatatcttttttccttacctatggatattgctcccaaaatatagcaggggttgccaaagaagcttttgaattagggtgactgggagaatattagtccatatatggcagcagagaagtcatgatgtagggtttatagggttgatttttaaaacaagatgattttgatacttgctctgcagaagttttatgcatcaatgaggcacccagatgaaaatgctcaatagctggaaaaacttgacaggaacttgagaagtagatataaaggattctctcacttggctaattctcgaagtggatgtaatctccaggggagagcatatagagaagggaatccagggcagaaactttggggacagggaataggagaggaaaaggttcccattgaggactgggaggtggcatagaagccaaaatagagaatttctttaagaagctgctggagaaactgtatgtctactttgttctctcttgagctttagttctgtggctcacattgtcttctggccttgttccttattttcttgaaacttaaactacatttgtaactaatcccagcttcctttcctcccactaaattcccttcttttacatttccccctatatgtatgtgaggagtgctttcattcccctcatctttggcatcaaaatctgtcatctctgcccctttcccttccctggttctccatatcattaccaagactctcattcactcctttttcattcccactcttgcctacatttgattgattattatcaaaataatctaaacaggatattttgaaataatctaaacaagattattttgatagctgccaaactctagtgtaatcttgtgttttttctgtctttcatagtcctcttaaaagaactagtttaggccaggtgaggtggctcatacctgtaatcccagcactttgggaggccgagaggggtggatcacgaggtcaggagatcgagaccgtcctggctaacacagtgaaaccccatctctactaaaaatacaaaaaattagccaggcatggtggcaggcgcctgtcgtcccagctactcgggaggctgaggcaggagaatggcgtgaaccccgggggcagagcttgctttgagccgagatcgcgccactgcactccagcctgggcgacagagcaagactcatctcaaaaaacaaaaaaaaaaaactagtttaatccagttaatccagtccctctgccttttaaatccaccagattatctttcctccaacatcttcccaaactgttctgaggaaggagatgaggtattaatgagagagattagtaggatcaccattaatgaaatatagtcaaatcagtttttagaaggttgagtccgggcgcggccgctcacgcctgtaatcccagcactttgggaggccgagatgggcggatcacgaggtcaggagatcgacaccatcctggctaacacggtgaaaccccgtctctactaaaaatacaaaaaaattagccggccgtggtggcgggcgcctgtagtcccagctactcgggaggctgaggcaggagaatggcgtgaacccgggaggtggagcttgcagtgagccgagatcgcgccactgcagtccagcctgggcgagagagcgggactccgtctcaaaaaaaaaaaaaaaagaaggtcgaatacctttttggcaccagggacccattttgtggaagtcaatttttccacaaatggtggggagtggggagtgatggttttgggatgaaactgttccatctcagatcactgggcgttagtttctcatagggagcatacaacctagatccttcgcatgcacagttcacaatagggtttgcgttcctgtgagaatttaatgcctccactgatctaacatgaggcggagctcaggcagtaatgcttgcttgccgcttatctcctgctatgtggcctggttcctaaccagttccagaccatggcccagggattgtggacccctgttgtatactatgtccccctctaaagcattctcagttcttatcggtgtgctttgaaaaagttcctcagaagtaaagcttatgtgcctttgtgtttaacttaactttgcagattgtgttttccaaagatggccacaatagtaactcccataccacatgttctttttacaatatgactttgacacttcttctactgacccctctcagtagaaatgtcacagtcatattgtacaaagaacatgctgtctttgaatattgatgggcttctgtctaacatggaagtgatgctatgtgacttttgagggtaggtcataaaaggtgatacaactttaatctggtactcttgagacatttgctcttggaaccaagccaccattttctgaagaagcttaagtagcccatattggcaggccaaatggagaaggcacatgcaggtgttccaggccaacagcctatgtgacaacagcatcagtcaccaagcatatgaacaaagatacttccagatgactcctgcctccagtgatcagatcacacccagttcttgagttttctcagctaaggccccagactttggatcagagataggctatctttgttgtgccctttctgaattcctgacccacagaatccataagcatagtaaatggttgtcttaagccactaagttttaaagtaatattttagatagcgagagtaactggaacacccaatgtttcctgagaacactttattttcttaagtatggtaactggtagcttgtgatacatgttccttggaaaacctgtttgtggaatttctggttttctaattttttagcttgccattcaaggccttcatagtgaacagtaggacagcttcggtattggcctatacatatccagcaaatcagtctcctccctgaatggtattttatttatagtttctgtatcagtattcttttactcttctagaaagcccttatgtttattcgctgatagtctcttttgtgaagtgcctgttcaaatatcatttttctattgagttgtctcttactgatttgtaaaagttctttgtaaattctggatatgtgcatgttgggacaaaaatctatttttatatcctgtgtgtatatatatatttcctaacaacaggctcgttttcagaatactatacatatgtgtatatatgtgtgtgtgtatatgtatagtgttctcccactctgtgacttgccttctgactctcttaatagtgtcttttgctaaatccaagttcttaattctaatggaggatggaatttgaaagtcttttcctttttttttgagatgaactctcactctgctgccaggctggagtgcagtggtgcgatctcggctcactgcaacctccgactccctggttcaagtaattcttctgcctcagcctcctgagtagctgggattacaggcacgcgccaccaagcgcagctaattttttttttttttgtatttctagtagagatggggtttcacgatgttggccaggatggtcttgatctcctgaccttgtgatccacctgcctcggcctcctaaagtgctgggattacaggtgtgagccaccacgcctggcagtcttttcctttatggctcatgtttactattaccttgtttacgaaacctttggccaccctaagctcataaaggtatgttccaatgttatcttttggaagctttattgttcacgtttcacatttagatctataatatacctagtactatattttgtctgtggtgtgagaaaggagtcaagattcatttattttccacatggatatccagttgaaccagcatcatttatttgaaagaccttgttttccttactcctctgcatgaacgccattgtcatgaatcatgaagatatatctttggatttgtttctggattccctgttcttgtccactgttttgtctatgttgtcttcaataatggtatatttttattaaacctggatatagggtaaagtcctccaactttgtggttgttcttcaaacttgtcttggctattctttttttttttttttttgagacggagtctctctctatcgcgcaggctggagtgcagtggcatgatctctgctcactgcaagctccgcctcccaagcgattctcctgcctcagcctcctgagtagctgggattatagacgcccgccaccacgcccggctaatttttttgtattcttagtggagatggggtttcaccgtgttagccaggatggtctctatcttctgacctcgtgatccgcccgcctcggcctcccaaagtgctgggattacaggcgtgtgagccaccgcgcccggccttgtcttgttattcttgactttttacacttccacatacatattagaattagcttaacaatttccatttttaaaaaaaggaaagggaaaagacctgatttggattggaattttacaaatctaagaattaatttggagtttatactagtgagacttccagttcacgaatacagtttgtcccctcgttatttaatttctctcagtaatatccagcaaaccacgtagctttctgtgtagaggtcttgcacatcatttgttagatttattcctaagtatttgatttttttgatgctgttataagtggtctcttttatgttttattttcaaattgtttgttgctggtatgtagaaatatatttgattttcatatattgaccttttagctaatgaccatgttgcattcacttattaattcaaataatatatgtaagggtttttttttttttgcattttctatgtatgtcatcatgtttgtgaataatcacactttcttcctatccaatctaaatatatttatatctttttttgttttcttattgcattggctgagacctcaagtatagaagtgttgatagcagacctccatatcttgatcccaaactcagagagggtttcaatattttacccttagtaaacatttactgaagatttttaatacttgtattatatgaaaaaaatgaatttcatatttatattttataaaagatttctttatttctcacttgttaagaattttttcatgactattggattttatgaaatattttctgtatcaattgagatgattatataagttttctttattctgttaatgtggtaacttaaactgattaaattttgaatatttaaacaacttctcatttctgatatatacacaatttagttgtcatctattacccttttgtatagcactagatttggtctgctaatattttgaatagtttttgcatctatctcaaccttaattataatgtacattttaaagtaaaaattacaaagaattgctgattgcataaaatgagttgggaagtgtccctctttttctattctctggacaactgtatgtaaaattggtattattccttccttaggtgttaatttcatctggaccaagaattttgtcttaaaatataagtttattaagagtcttctagtctgttttctttttgtatctgttgggtttggtttttttgtttgtttgtttgttttggaatttgcccatgtcaagtttattggcatacatttcttcatatttgtttattattttttgatgtctgtagaatctggagtgatatccttttttcacttctgatattgattgattgtaccatctcttttcttgagaagtcaagggtttacttatttataggtgttttcaaagtaaaaacttttgggtttgctaatcctctctaatgtaaactttttttcctatttcattaatatctactcttcattattatcttttttctattttctttatttggattcatttattttttttctaattccttaggccaaatggctaagtcctttatttgcagccttgttttctaatatatgcatttcaaaactttgaattttcctgcattcgtatctttatctgcatttcatacattttgtgtcctattttctattctctattgcttctctgctttctgcttatttctatattaattattttctatattttattaatttgttatacagtcttataaattctttcagtggttatggattttttttaacatttttaaaaaggttttctggcttttctaattgttctcaatggaagattatttgggatgtacagatcaccagcatgtttatgttggcttctaggccaattttaaaaaatgactaaagtaaaacttctgttaccaattaaaaattttgtttttctgccctgggcctttaaaagtcaaacctgcacttgaccagtcaccatatattttccaagtaggtttaatactagtgcctaggaatagcactaatgaaggttcagacacatgcaaagtatatgctctgctctgtgtcatcgtggcacaataacagagtccacagaatggtccacatttaatattattatgtttaaagtttttggcatttgaggaagttttagaagcttcctgttcatcttacatatgtaataaataatgtaagttatgactggatattgttggtactttaacttggaaagaaaaccatcttattacctctttttcaagtttttttgaaagactgtctggacatttaattgaaaactatttggacattgcaacacaaaccttaaaaaagttgttatcatctacagttcttacatgaataaagcagtattaccaagtagccaaagtaaaatgcagacattttactgtttgctgaagctgattaagatgtattatttataactccactttcaaatattttatttattagtacagtcttactgttctcaatggctaactttataataaataaatattatatttacatagaatcacttaatgtatactaagtatatatttaaacatataaataaatcagcccatgactttatatgtttgtattataaatagtataacaaatattataaatttgaacctctaaaatttatactagtcaaattatctaggtttgtatgagatttaattggaaaaaaccctcttactaaataaaattagaagcccattaagcaaattaaaacctatatttaagaaaataggcttgcctaagttacacagattgtatgcacgcttggtttttatccagcacaagtcttactgcttatgaaaattgattttattaaagattgcttatgggctgaggctgaaggcgtgccattatcctttaccagtatataattacaacgtactctcctttgttaatctgacagttatttgcagaactgaactaccttggattcttaggtagggaagagttttaattctcgtgcctcagattttccattgctgcttttacgtgggtgtgtgagattcagaaatacgagagtgaagtaaaataaacgatgctttataaatacatggaattaggtgcctacaggggaagctatacagcagctagccagcattttaattccatgtttctcagcttattttatttgaggtgttagagttgtacttttttgttttccaatgtttatagactgagcttgattttcatatctagttgaattctcactaattttgtggctaatcaagctcccacaatgtcatttacttgaagttaagtattgatatttatgatttgaatatatttaacaactttatagttaataactttaaattctcttctggtgaaggtattcagtttggccagtgtcttctcagtcagtgctctaatttaatatagtgtttagtgctaaatctaatattgtttctaacacattataaaggtcagaacttacataaatatactgtagtttgtgatagttttggagaatgggctacagtggcatttattagtgaagtaaaaattcagtccataagaaaatatgaagtgatactttatttagtccatatatttttaatggacagtggtctccactttctaagtggggatttttcatttttctaagtattcttaagagaatcagttttggacttttggttaaacatagaggttagaataaatatgtttatttcttcctaaattcactaaattaacagaataaacaataaaggaataaacaaagagaatgaaagaggcaatataacatcaggctagagaagtgaaattttagaaatgttagaaaagaaatgcataaattataaccaacttagagcagttttgatggaacataatatttgatcattatattgagttacaatttatttaattattccttaatatcgagtcatatatataatttttttagtgtctgataatgggttatcataattaagcattcatctatccatgaccatttagttttttcagcttttcactgttataattagcattccatgcatcagtcttaaaatattttaggtttttttcagaattgaatgactgaatcaaagtttataccttttatgagtattgatccatgctgccagattgctttgcaaagccatttttatgattaccatcaatgtgtggaatttcccatttcactacaacctagccaacattgcatttgccttaggatgttcaatctgggcagggacacatagcccttgcatcagttgcttgtctgtggtgctgtgggaaagtgtggcatgacatgacaaattttaccaggtgaagcttagctgtgtgcctttaccactgccaccttataataaagacagatgctgtgagtttagaggaagaggtgatttcctttgtttacctggggtgctcaaggaaggcttcatgtaacaaatagaatttgagctgtgtataatgagggaaagatttataaagaaaaatttgcacagacacatgagagatatatcagtctggatcaaatcagaagacagaagccacatagtaactaaaattgttagtttaacttaaagaattattagggtatgataagagaaaaactatgaagtcactctataaggagaactccaaaagttaccctagggctgaggaaaagtacccaatgaaggacggaattgaaatgaggttcagacctcattgaaagtgtggctatagcccattggatggtagagaaatttgctgcgttgtctgagccaacgctggtgcacaatcacagtgtgagcaggtgagttaagactggtaggagagcatgcagagggaatcagggcagtgcggcagggccacagtaacaacccttggggtgcaagtgagttgaggttggctagttagtagaaggagttggagcaccactttagataccactggaattgcaagttggagaggcctccctgtgtagcaatctagagcactgctgtttacagcttggggcaggacagtataccaagctgctgtgtggaacaaaggtcaggtggctggctggccaagccggtgcatatggtttgaggagaggggctggggagtagccacctggtctggggctcctggctatagtgctgctgctgcctgagtagagagctggagaaagaaagcacacagccgctagccagatgctggagaaagctttcccctgcaggcacctagtactacagcagtgttgtttttcagccttggcattattgaccttcagggctggataattatttgttgtggggagctgtcctgtgtattgtaggatatttggcagtatccttggcctctattcactgtatctcagtagttccccaagttatgacaatggaaaataatctccaaatattgccatatgtcctctgagggcaaattgtctctagttgtgaaccactgcaatagagaaatctcacagcagtggaacagtggaggggtaaaatataagctctccagaaacctgctgagaaaactccttccctccctttccagtgcactgtattgacagagcttagcatcatgtcatactggcaaatgaaaaatattttaaaggcccagatccacttttccagataagacaatgaagaatgaatttggagtagagaggtaataaactgatagctgtacaaagtacagttatgggattaaatatggttggagaattaaatatgagcaaagttatagaagcagaaaagcgtaggggcactagggaaattcaaggacaagaagactaaagtgcaaggctgatgtaaagtggtaagaggagaataagctagaagggccctttgaatcttaactctggagtgctttgagtgagtggaagagaggggaagagaaagacagaaagaccaatgaaggtttgagatttggtgctgtcagtagatgaggaaggcagaggcagaggtggaggagtgatagaaataattgggacctacatttttgcacataactaattactcaggaaatggttcatgatagtatatcctgggttttttcccacctatccatttcataatttaatgtagtgctttaatacataaaatatgcttattggggctggatgtgatggctcatgcctgtaatcccagcactttgggaggccgaggtgggtggattatctgagatcaggggttcaagaccggcctggccaacatggcaaaaccccatctctactaaaaatacaaaaattagccaggcgtggtggtacgtgcctgtagtcccagctactcaggaggctgaggcaggagaattgcttgaacctgggaggcagagtttgcagtgagccaagatcatgccactgaactccagcctgggcaacgtatatatgtatatatatatacatgtatattgtgtgtgtatatagatagatagatatagtatgtgtggatatgtatgtatatgtatatatacatatatatacacacatattcatacatacacacacacacacacacatacacacacacacacacacacacacacatagaatttgggagaagagaagagtaatatgaggaaataagagaccatagggagttcattgtccctcttactcttctatggagtgaatgcaagggcaagccagaacctctgcactttctcaccaggtgaaggtaggggaacctgtctcatggtaatgcacagagctaaaagagaattctagcagagggaatttgtggaagttacggttttgactcaaacccctctatagtctttcatttttccaaggatatgtctcctcctttctaagtactttcgtggcttgttttacgtgtcttgcaatcgtataatccagcatcactgaatagtcttatagtttcccagatgtccttgtggcatttccttctaggtatattgaaacttgcccttttttattcttgaattttgtctttggctcaaggttttacattttactgactcttcatactacttttctccccttatttagaaatggactcagaactcaaggaagaaattcctgtgcatgaggaattcattttgtgtggtggagccgaaacccaggttctaaaatgtgggccctggacagacctctttcatgatcaaagtgtcaaaaggcctaagctgcttattttcattattcctggtgagcgtaaaagtctgggtgaggagactttttgtagatactcataactatgtctgattttaaagtatagagaatttggtaaatatggaaaaccttggagaaggaattaaaatcgcttgacccattgttaacaaccacccttaatattttgacgtctggattttgtgtttttcttctatgtatttacattatgttgtctgttgtgtgtgtgtgtgtgtgtgtttgtgtcacagttggaagtatgtactatatatgcagttttgtaatgtggtttttaaagcatttcttaatatttaaaacttcatcaatatttttgccagttttctaaactttttctgcctcatttcaacatgattatatgtttattatagaatatttggccaggtgcaatggctcacgcctataatcccagcactttgggaggctgaggtgggtggatcacaaggtcaggagatcaagaccatcctggctaacatggtgaaaccccatctctactaaaaaacaaaaaattagctgggcgtggtggcacatgcctatagtcccagctactcgggaggctgaggcaggagaattgattgaacctgggaggcagaggttgcattgcccccagatcacaccaccgtactccagcctggggggcagagcgagactccgtctcaaaaaaatatttaaaaaaataaaaaataaaaaaataaaaattaaaaattagaatattctgatatttggcagctgagtcacttgtaacttttgctagatcattgtcaatagaattagggacagatgcttgagcgattgcaggtattcaaaatgcattttaaattgtgagtttgaacatacatgtttattcttattctgtgaattgccagttcgaaacccttgcccatttttcaattgtgttttcaatgttttccttattgattttcagttgattcttacacaactgtaaaattgtgttatatctgtcatacgtgacaagaatctttcctggtttgtcttttgacatcatttacaatgtttatttggttgtatagaaagtatctttgttatgtggccaaaatgctaagtctcttcctttaagacttcagggttttatgagtttcttagagagggctttcctactccaagattataaaacaattctgccatgtcttctagtatttttacaatttcatttgtgatctttaagttgatgcatctagattttaagggcaggcactgaggaagggatctacttttcttctccctctcctttggatggcttattacatggtccacaaccatttattgtatcatctgcctttctcctactgccttgcaatgctaactgtattgtaaagtagattatcctgtggccaggagtttctttccatgtttttcgcctcttcatgtgttcttcatgttttttaataaatgcagttttatgatacttttacatattttttggaacttgttcatttttattcttttccagaatattctttagcttcttttcttttggctgcagaatatattttttggcttcattaggaggaaaaaaaaagcttaaatgatctttaaagtcaactttcctaaaattgatctcgtaaaggcagagtataatgatagatactaaaggctgggaagggtgcagggctgggaggagggatgaagagagaggtaaacaggtacaaacatgcaagttagatgaaaggtgtaagttctattgttggaacttatttataccaacagaattggcatagtcggcagagtagactgactatagttaacagtagtgtattgtattggtataaagtagctagaagagaggccttggatttttctcaacacatagaaatgatgaatactcaaagtgaatgtactaaaacaccctgacatgatcattacacgttctatacaggtaacgaaatatcacatgtaccccatgaatatataacataaatatcaatatctttaaaaaaaataaataataaccaaaaaatcagcttttctagttccaacagatgttctcagaggcaaccacttttaacactggtatattcctgtgatatttattccacattcttttttgtttgtttgtttgtttagacagagtctcactctcttgcccagactggagtgcagtggtatgatctcagctcactgcaaccctccacctcctgggttcaagagattctcctgtatcagcctcatcagtagctgggattacaggtgtctgccaccatgcctggctaatttttgtagtcttagtagagacagggcttcaccatgttggccaggcgtgtgtcgaactcctggcctcaagtgatctgcccaccccagcctcccaaagtgctgggattataggcatgagccaccatgcctggcctttactcgtttctaaatgaaatacttatatttcttcttcttcagttgtcttttgttttgttttgagatggagtctctctctgttgcttaggttggagtgcagtggtgtgatctcggctcactgcaacctccgcctcccgggttcaagcaattctcctgagtttttaatattagatgttatctattgtcttcctccatgaaagaaaaagattagctttcttatactttcccttctccatgcacaatcatatacccctccttctccatctattttcctagtatgggaatatttcagttttttgttaggtcaatattcagtgcttttattattatgactatgtattatattatattatgtatattatattatattatattaattatattatacatagctaagcctatagggaattgcgcatgcatttcctttcttatatatttttgtttgttttccctgggttaatgatgttctgttatctttttgcttagttttttgtgctttaatcactcatttatcctagaactattctctagaagtgaaaagaatcctttcaatgcatttgagtcatcagtcagttttcagaatgctctgtcctttggctccagtctggactcattgctccccaggcctgctgcacagttgccatcctggggacttctgtcactttcttctggcttggatccctcgtttctcagatcccacatttttatcttagtttattctcttgtttttggtagagcatatcttctagtagcttccttagaagaggtacatgagaagtaacacagcatgctgcaaaatgtcttagactctaggttggaaataatttttctttaggaggaaaatggagggcgttaatggagggcattaatcattgttttccaacactcagagctgcttataagaagtattggtatcatttctgattttcgccttttgtatgtgaagattctctacccacattttcgagaccttttctttgttctgagattctgaaattttacagtgaagcaccttggtgtgactgttttttcatacaaggtacttgggttttggtgggcccttttaagccagaaactcatttcattctaatagcgctttgtttttcttttcttttttgtagtctcatgtttaatggatgcaatatcattttcttttcttttcttttttgtttttgcatttgcaagaattttcactgtgttccttttttcatttgcattagtctttagttttcctcaaatgtctggcaatccttgactatccattcatgtttaagaggaagacaaaaaacaaattggaagctttgcactcagagctggggcttatccagaggtgtgtctagggtgattagccatcctagcttgcctaggactgagaggttttctaggacataagactttcagtactaaaaccatgacagtctcgggcaaaacagaggagttggtcgccctaggtgggcctcatcctaaggtgattgagtagggacccagcatttcattgacggatttccagctttcagtgtctgaagctctttcttttattgttcagttttcctggggaggaatcttccaggctcctgtttgaagagtggaaacctgtctgttaatgttcaaagaggaacaggggaaaggaggtggtagtttcagtgtttggttatgcctagtccagcctcttctcagtatggtactttcattctcagctggactaagattcctgatcgagaatttctctttgttttaaccactaatgggaataaactattcttctgccaggatgtaacagtctttgtggaagtcagtccgttcagcatctattaacataaaaatacatgtacttttccagtagtgaaggagagtttgaaattatagtcatggcaagtgctgtttgatggagcagagatttggaatagcttatagcataggatagagaaaataagtagaaacattatcttaaactcgagaagggatatccttctaaggctagaaagaaggaggtgaaattggttactaaaatggaaaagtataaaggcgtatcagagggaagtgaagtctcctgcttcctgactactgttttttctgttgagagttgagaccatgttttgaatgctaatcatttccagctcatgaaaagatactaggcctgtggttcttaaagttggtgtcaggatcagaagtattgcttgagaactttaaaaatgcagttcctgggctctatccctgaccttctgaaccagaaagtctgggggttgggcaatcagtgttttaacaagccctgcagggaactgtgatacgcatatctgatccagggtgtagtcatgggaatgaattgcttaagtttaatgtaggtgaagttctttggatttcatcataataatgaattatgggacaaagtttttggctcagtcagtccaactggattttgaaatgtcctgacatgacatgacaagtgaaactgtcatttaagggtcaaggctttcagagaaagtgtgagtgactaaaaagttgatagatggaaatagatggcttgagtcttaaagaagaagaggttgttgtaatagtgaggtgaaatagtaagtgggacagacaacccacccacttccccacctggagatagtatttattccctcactcttttatcccaggtgctaggaatactgtgttgcattaagtctttgctctcattgagttatatgtggtgttagagaagagtgactgaggcctctgctgaagaggattgaaaggaagagagcccattacaggggagagccagatttcagatatggtgaggagataaagggagtattcagtgaagacactgagaatggagggaagcataaaacatttgtagtttgatagtctcattgtttatagtgctttgacattttcagatcatatttcatttcctagtgttcttttatgtttgccctgctcattagtttgtgggatttagaattgtattttgtgtgtgtgtgtgtgtgtgtgtgtgtgtgtgtgtgtgtggcaggtttcgggggagctaatctatttacactgtggtaataatcaggataacagtatttcaaggattgtgaagccactatggacaccatgttatgtccgtctctgatagactgacataacatttcattttaaatcacattgcttttgcagctagcaaaattaattcttcacttctaagttagtaatgataattgtgagttttcttttcttttttgtagtctgatgtttaatggatgcaatatcattttcttttcttttcttttttttgcatttgtaagaatttttactgtgttccttttttgatcagaatccacagattgaagaacttttaatttagtttcattttttctgatgaaccttagatcttggatttctgtaaagtaacattgtccttggactttctttaactagtgagatgaacaaagggaatcagattgagaactcaccatagagtacactgaatcataattcttaggaggtcatatggagataacagaaccatgtgaagtatcaagtgctgtgagcacagtggttggagatatagcagataaggctccatgaatgagtccaataggtctgtctacatggcaacctattatatagatactgtgccatattaacttgatatgtggcagttttcgttcctctccctacaaaattaactggaaggtataagtctatacttgcagcattgtatagttggagattattagcagtcagggcctagagatgatcactacaacttctgttatacattgcatgggtatttgactgatttgactgttatgagcatgttcaagtgtgtgtttataacacatttttatgtaaacttttgattaaatattttacttgcatgtctgcattggaatgttttccaacatccttacacctggacctctcccatacccctccgtgtgtgtgtcttttttagttgcataagtgtaggccttttaattttctttgtggtttcttaacaaggaggtttaaatggtgaagtatgaagtactgtatgcaatggtatttaagcattttgcattgcattttccacttctgtctctgttataagttagacctttgtgatacttgctatgcgttcagtttgaaaggatttattgtatgtgagtgccatgtacccaatctagtgctgcttggtgccactggatacagagaactatagcaagtgatggctacttttaaagaagttaaactttcaagtttggtacgttatacatgctacaatgttaagtatatttctgacaggataaaacttccatttttttctgcatctgttgaggatcgtatggtttttcttttacggttggttaatgtggtggatgatgttaatttttgaatgttaaaccaatccagcattcctgtgataaatcccacttggtcatgatgtattatgcttttaacattttgatggactcagtttgctaaaattttgtttagaatttttccatctttgttcacgaggtatagtggtctgtagttttttctttttctttttgcaatgtctttatgtggttttggtatgagggtgatgctggcctcatagaatgagttagaatatatttctttcttgatatggtttggctgtgtccccacccaaatctcttcttgaattgtaactcccacaatttccacgtgttgtgggaggggctcagtgggaggtaattgaatcacgggagcaggtctttctcatgctgttcttgtgatagtgaataagtcttatgaaatctgatggttttataaagaggagttcccctgcacacactccctttctttttgcctgctgccatccatgtaagatgtgacttgctactccttgccttccaccatgattgtgaagtgtcctcagccatgtggaactgtgagtccatgaaacctcttctttgtgtgtgagttgcccagtttcgggtatgtctttatcagcagcatgaaaacagactaatacatttctcttctattttctgaaagagtttttatacactgggcatttttcttccttaaatgtttgatagaattcaccagtgaagctgtgtgggcctggattttctttgtgggaagatttttaacttaaattctaattaatccaatcaatttagggctatttaggttatctgtttcttcttgagtgaactttgatagtttctgtctttctaaaagtttattttatctaagttgctaaatgtattgctatgaaaattttcatatttttcctaattactcttttaagatagaagactttttttaaatttaaatctgattatgccttaaccctgctcaatctcttttaatgttacttagattaaaagccaaattacttatcatggcccaaaaggtatcacatgattgtatttctcttcctcttcaacctgatctcatacaagatttgatatctcttgttatgctttagccacactgatagattagatgcaaagggaagaaccaaggattatggactgtcttccatttcttcaagagctaagatctttatttcttgagggcctttgaattagctcttcaagagctaagatctttatttcttgagggccttctccctccttagtatttattctcttccctcaaattttcacaaggcttatttcttgtcattttggggtcttagctaaatgtcacctcctcagacctttttttcactctattctcttcccttctctatcatgtgaccctgtttattccttttataggagttctcacactctttatctcacctatttagttatgtgttgtatattctcccactagtacataaattccaaaaaggccctcatctgtcttttgcctgacatagtgactttcatacagtaagtgctcaataaataattgagggctaaaagaagctgtaattctgaatagaattaatgaacataagtaattggcatcatcatttacttgatgatgataaaattgtggatcagaaagcttaagaactcagacttaatcccagagatagggagaaaactttgttttatttatttatttattcttcctcatttaaaaaaatatgttaagttctgggatacatgtgcagaatgtgcacgtttgttacataggtatacatgtgccatggtggtttgctgcacctgtcaacccatcatctaggttttaatgcctgcatgcattaagtatccattatctagtactcactgtttttcatatatcgtgtcattgtaacttacatctaaatcatggggttatctttagtgtctccttaatgttacaccagtttttaattgttataatagctgtggtattaatagctgccatttattcagcccctaccatgtgccaagttttgtgcaagtggctatccattcgttatttctaatgaaaatgccaactactttatagagatattgtaagactaactaaaacaaggaaggcagaagatcctacaccggattactgatgttttttaaaaattcagtattatgattttcttttgtatatactttcagtcatcaaatatttatttagcacttaccatatatgtgatgttggctaagttatttaacctctctgtactcagtttcctcatccataaaatggaagtaatgatagtgctacctcatatgataattaaataatatatgtaaagcacctaaacactgcctggcatgtagtaagttatagtacctaaaaatattagctattattattttctagccatatgaagaaatctatgagcaacgtaagacatgtgaatatgaggtataacatattcctagaaggttatactcagtaatataaaaatataaaatttttgtaaagtaatatattaatgagatgaaattttagtcacaatcccaaagagatttttaagaattgaaactagtgaaaataaccctaaagtttatgagaacagcctagaaaatttagaaaaagaaaaagggaagggatttgccctacctgttaacacttaaaaaaaaatgtagtaattaagacagtatggtcctggcagaggagaaaaggaaaaataaactgaattatttggtatcagaattagcaagtgaatgtaaaaatgtagtattgggtctgaagatatttcaaatcaatgcagaaagaatggattatataataaatggtcttggaacaattggccagtcacttggaaaaaagttggattgctacttagtattttatactaaaaagtattctaaacttactgaagacttaaatgcataaaacatgaaacagtgccacccacagcttccatagatgttatagcccctgtgctggtatgcccttcctcccttctttcttccttagctatacagtggccaataaactgaccaaagaatatatttctgcatttgaggaagttttcatcctatttgacaaagaagccaaaagcaccatcacaaaaaggaatttggaacttgggtcactaggtcagaatgcaacagaagcaaaataatatggatgctacggccgttgtatattaccgttatagctagacgttgttgtacaagtttgaatacctaacatttatataatacttgctgtgtttcaggcagtgttacaatgctttgtacattgattcacttagtcttcaaatgaggtagtaccattattacacattttgtggatgaggaaaccaaggcagagggaggttaaatagcttggccaaagctcacacagttggtaagtggcaaagccaagattccaacccaggtagtctggcttcagagtctatgctcttaaccactttactacactgcttatctagcaaactgaaagatataaaaatggagtagaaatcagtgaaattcgacaaggatgacagtggttatttacatcagtgctccagagccatgtcatgtaattgcagagaccagaaagcctaacaacatgaagaaatagataaactgatcagagaaatagatattgatggaaatggactagtagctgtgaagactttatatagatgatgattacaagatgaaaatcccatttcgttgtaatttcccccctacagatctatcagattgaatgtttttaaaaagatcgtttatttattgtttctttatagcaaactcatgtcaaaaataccttctgtacacacataagaaaaatctacatgtacttgtagacgtttgtttccccaaaagatcaagctgtacacctgtttacaattataagtgctagtgataagtgacaaggaaacagtagactccttaaagctctccctgtgcatgcttcttacactattttggctggcttgtttttctggttttcatgcatcttgttaactgagcatgaccaaatcttgaagtgccttatatgcagtattactgattttagacttcttccagatgactttatctggaagacactgaagggtgtttaaatagggtactgctgtgattttaatggaagtttgaagataatctctcttgggtactctgaagaattcagaggaaagtgtgaaaagaaacagacccatcttttctagcctgcgtgtcatcttatgcctgtttattactttgattaatctaaggtctgtgtttcttttcttaggtaacccaggtttttctgccttttatgtgccatttgcaaaggctttatactctttgacaaacagacgctttccagtttggactatcagtcatgctgggcatgcgttggctcccaaagacaagaagattcttacaacatcagagggtatgtccttgttaatatctactttcctttagagtgagtgcagggtcatgtttctagcaagcttgctaaggttaagagttacaccagtggaaacctctgcttgtggcattaggcccatggtgccatattttggtaaacttaggatttttagagacattttaactcttcatgtaattttctgtaagaatatgggtagataaaacaatctatgacttgccttctttatttaccaattagtaatcaactgtgtgttttttgatcatgtattatttttccagggttgttctaggaggaatggtggggaaaaagcagtccccaaccattttggcctctgggaaccagttttgtggaagacaatttttccacagactggggaggggtggatggtttcgggatgaaactgttccacctcagattaacaggtgtgcaacctagatctggcatgcacagttcacagtagggtactcctatgagaatccattgctgccgctgatctgacaggaggcagagctcaggcggtaatgctcactcgcccgtcgcacaccttcatctgtgtggccgggttcctgacaggccacagacaggggttgggaaccccttttataaaccatgttctttactttaaagaagctttttctctcatatttagagaataattaagtgataaaccgtggcctgctaatcatatagacacctaaggggtaaacaaaggagaaaacacagtgtgggttaggagagactttgtggagtaggcatgtgtcttagtcagtttgggctgctatagcaaaataccatagactaagtagcttttaaaaatggaaattgatttctcatagtttcttgagactggacgtccagtccagtctgcactggcagattcgatgtctgatgaaaacctacttcccgattcacaggtggcattcttgctgtcctctcgtggtggacacaggaggcaagccctcttgggactctcgcgggctctaccctcatgaccccatctgatcctaattacttcccaaagacccctctccacctcttaatagcatttgggcatagggtttcacctatggatttgggggccatataagcattcagaccattacagctggttttcacaattgaataaaatttggatttagggcatggaggtgggtgcagaggtacaacagacagaaagagtagcacagaagggagcaagatttaatagcgatgttactgctaagcagggccagtttgagagggactttgagagctggagagagagccaggactccatgctggaaggtttctaaatggaagaagtaataccatggagatgcaaactacctcctttaaatctgtgagaattctagcatgttcactgttc

SEQ ID NO: 15660 - DNA, 121527 bp, Homo sapiens
acttccggtctcgtgccgccttcccaggaccctcagggagagcgggcagccttccaggtggacaggtgaggtacagcttgccgagctcagggtgactgcccaaaggaaggacgggtgggcaggcacgcgggatctggcgccccttcttctctatggttcctcgcagagcccctgttgccctgggccagatggcccgtagcagcaaaaataatactgttccgacagctcgcgagttcggagccacttggcctgggagtcccttgagttgcaggccgggcagtcgctcacccgagcgcggtaatgcagcatttgaacccctaagtgtagcccacctgtagggagtcttatggtgcccccgcggaggagtagaggccaaaaagttgggcagctggccgggaagaactcgctaggaggggtcaaactctgggccgggagtgttctttgcccccggcgtttagtgctcacgccgccttttattcacgctgaagaccttaaccgtaaaccctcatccttgggtcttagtttggttttgttccccacgcaagacagaatgcagattggaacactttattccttggttaattcgtatcttccctcgcaagtagttaccggacacctgctttgtgtcctgtgtaccaaacacaagagttgatagtcctggccgggcgccgtggctcacgcctgtaatcccagcactttgggaccccgaggcgggcggatcaggaggtcaggagatcgagaccatcctggctaacacggtgaaaccccatctttactaaaaatacaaaaataaatacataaataaataaattagccgggcgtggtggcgggcgcctgtagtcccagctactcgggagactgaagcaggagaatggcgtgaacccgggaggtggagcttgcagtgagccgagatggcgccactgcactctagcctgggcgacaaagtgagactcagtctcaaaaaaaaaaaaagagttgatagtccttgagttgaaagaacaaatctgtatggagaaagagatacaaccaaaagaaacccagaagatttagaagcatctccagaatgtttattctcaaaagctgttttttaattaaacttctttctgaaactatacgtaggagtgtctcttgtgtgtttccccatttttccacctgaaggttaaagacttagaaacctgctaaggcccctctttccagcatgtagcattctagggggataatcagggcaacacagtgggtgcccatctaaaattttatattttaatattttgctttttgataacttaatgccttcagactggaggattttttctttcttttttttaatttttttaaaattatactttaagttctagggtacatatgcacaacgtgcaggtttgttacatatgtatacatgtgccatgttggtgtgctgcacccattaacttgtcatttacattaggtatatctcctaatgctatccctccccactcaccccaccccacaacaggccccggtgtgtgatctcccccttcctgtgtccaagtgttctcattgttcaattcccacctatgagtgagaacatgtggtgtttggttttttgtccttgcgatagtttgctgagaatgatggtttccagcttcatccatgtccctacaaaggacatgaactcattcttttttatggctgcatagtatcccatggtgtatatgtgccacattttcttaatccagtctatcattgttggacgtttgggttggttccaagtctttgctattgtaagtagtgctgcaataaacatacatgtgcatgtgtctttatagcagcatgatttatattcctttgggtatatacccagtaatgggatggctgggtcaaatggtatttctagttctagatccctgaggaatcgccacactgacttccacaatggttgagctagtttacagtcccaccaacagtgtaaaagtgttcctgtttctccacatcttctccagcacctgttgtttcctgactttttaatgatcaccattctaactgctgtgagaagatgtctcattgtagttttgatttgcatttctctgatggccagtgatgatgagcattttttcatgtgttttttgtctgcataaatgtcttcttttgagaagtgtctgttcatatccttcacccactttttgatggggttgtttgtttttttcttgtaaatttgtttgagttctttgtagattctggatattagccctttgtcagatgagtaggttgcaaaaattttctcccattctgtaggttgcctgttcactctgatggtagtttcttttgctgtgcagaagctctttagttaaattagatcccatttgtcaattttggcttttgttgccattgcttttggtgttttagacatgaagtccttgcccatgcctatgtcctgaatggtattgcctaggttttcttctagggtttttatggttttaggtctaacatttaagtctttaatccatcttgaattaatttttgtataaggtgtaaggaagggatccagtttcagctttctacatatggctagccagttttcccagcaccatttgttaagtagggaatcctttccccatttcttgtttttgtcaggtttgtcaaagatcagatagttgtagatgtgtggtattatttctgagggctctgttctgttccattgatctatatctctgttttggtaccagtaccatgctgttttggttactgtagccttgtagtatagtttgaagtcaggtagcgtgatgcctccagctttgttctttttgcttaggactgacttggcaatgcaggctcttttttggttccatatgaactttaaagtagttttttccaattccatgaagaaagtcattggtagcttgatggggatggcattgaatctataaattaccttgggcagtatggccattttcacaatattgattcttcctatccatgagcatggaatgttcttccatttgtttgtgtcctcttttatttcattgagcagtggtttgtagttctccttgaagaggtccttcacatcccttgtaagttggattcctaggtattttgttctctttgaagcaattgtgaatgggagttcactcatgatttggctctctgtttgtctgttattggtgtataagaatgcttgtgatttttgcacattgattttgtatcttgagactttgctgaagttgcttatcagcttaaggagattttgggctgagacgatggggttttctgaatatacaatcatgtcatctgcaaacagggacaatttgacttcctcttttcctaattgaataccctttatttctttctgctgcctaattgccctggccagaacttccaacactatgttgaataggagtggtgagagagggcatccctgtcttgtgccagttttcaaagggaatgcttccagtttttgcccattcagtatgatattggctgtgggtttgtcataaatagctcttattattttgggatacgtcccatcaatatctattgagagtttttagcatgaagagctgttgaatcttgtcaaaggccttttctgcatctattgagataatcatgtggtttttgtctttggttctgtttatatgctggattacgtttattgatttgcgaggacttttttctttgttaaaatgttgctctgctttcagcattttctcccttgtagtattaccataatgtatttaagattgagcacttaattctgaagtcactttaagtatacctcaaccaaagggaaattaatatattatttctaatgagtgtatttaatataggtaagtagtttgtacacttgtgaaattcttggcattaattgatgtccagaagctgaaagctactctctggtacattaaaaaaaaattgtgtgtgtaattacaagaaagtttgatgtcacagttgcaaaggagttgtgcaaaacaaattgcctttttccagtaaagataattcagcaagttcatcttgagtgtagtgtgtggtttcgtttttaatatgtcctcagcagtagtcatagattttatcttcatcatttaagctttattttctggcccacttgcacagatttaagaaaaatctcactggggttagtgtgcagtcattcagacagcaaatacagcaaaagtaggtgaaaatgtaaaagtcattaaaagaagaattgtgaaattgctcatctcgcaaccacatcaagcaggagcaaagacaactacacagaatcttggtgtaacatacactcattaccacttggactttctcctacagtattttgcagtttgttttttggattctttagtgttatataatatttcaaagtaatatgtgactgggaaatattggaataggtatcagaagactgtagaatttattttgccatttaaatgcttatgtccttgaacaaaaaatgtaaacatctttgaccttcaatttcttgttctattaattgcctgctttttaggtctgatgagaaaggaagagaatataatttgcaaataaaaagaagcaaaaaaaaaaagcagtagttttattgcaaggggctagatggtgatcaagttaggatatagaaaacaattacttgttcttacatgttattctggagaaagatgagatggatacccatagttacagcagaagcgtaaaaagaattctgtttatgcatcatctgtttatgtgttgactttcacctgtatgttttcaagtttatatagggctatgtgctaagattcccaattttcccctttcataccacttattataccagttgcaattaaatacatatataattattaataacttttttaaaaacctttttgttttgagagaattgcatattcagaggaagttgcaaaaaactttacagggaagtccttgtgtacccttcagactgcctgcctcaatggtaacaacttggataactgtggtacgatattaaaactgggaaattgacattgatacaattcacagagtatatttccatttcaccaactttataaggactcatttgtgtgtgtacacaggtctatgtgtagcttcttataactaccgtaatcaagataaagaattattccatcaccacaaggctcccttatgctgcctccttatagtcagtctatcttgtcccagccctatccctaacccgtggcaaccactgctctatctctataattttgtcatttcaaggatattgtgtagatggactcataccgtatgtaactttttgagatccatccaaattgtgtgtatctgtcatgcatttctttatttattgctgagtagtattccatgggatggctatgctacagtttgtttaaccattcattcattgaagaacatttgggttacactattataaatagagcttctatgaacttttgtctgaagatttttgagtgaacatacatttttccccctctgggataaatgcccaagagtacaattgctaagtcatatggtaagtgtatgtttagtgaattaatacttctttagcttgttgatatggtgagttacattgattttaaaatgttgaacacaactggtataaatctcacttggttaaagtatataattatatatttccatattctatttgctaatattttgttaaggtataggtagagaggtgtgagaggttaaggtataggtatgagagatgtgttgtagttttttgcttgtttgttttgtactgcctttgtcaggctttggtagggtaatagtattctacatggtttttagtgataacccttgtttcattattgctactgtattagtaatttgtgtcattttatctttttcagtgatgatttgctggttatagtgacctttttcaaagaactcgctctttatttcatctttgtctatttttatatttttaatgtcattgatttctgctcttatatttattattttcttccttctcactttaggtttattttgcttcttgtctagtgctgtgattattagtttaaggtctttctttgtttctaacgtaagcatttattgctataatttccctcttggcattgcttttgttgcatctcacaaattttgctgtcttgtattttcatttctatccagttctatatagtttaaatttttccttagaaatttgcttgacccatgaaaatatttgggagtgtgtcatttagtttccaagtgtttggtgatttacctgttgtttttctgttgttgatttctagtttttttccacaatgatcagaaaacataagctgtataatttttaatttttaagtttcttttatgactgagggtatggtgtatcttggtggatgttccatgtatgcttgaaaagaatgtgtattctgttattattggttgcagtgttctatacatgtcagttatgtcctgttcattgatggtggtgttctgttcttctgtgtcttcttgatcgtctaatagttattttcgttgctgaagatcccaactataattatggatgtctctgtttttcctttgagctctgttggttttggcttcatgttaaatatctgttgtttggtgcatatacatttaagatgttttcttgatgaattaatccttgtatctttgtacaataattttctttgctctgaagtctacttaactgatggcagtgtagccatcactacttaaaaaaagtagttagtatggcatatcttttccatacttctgttttcaacctaccaatgtcattatgttttagtgaatttcttatagacgctatatgcttgggtcttttaaaaaagaaacttctctgccaatctctgtcttttaactagtatagttatatcatttacacttaaaagtaattgctgtgttagggcttaagccagccattttattatttgttttctgtttatttcctgtttttcatatctgttcctcttttctggtctttctgtaggttgcttgaatattttcagaattctatttgacatgtttatagtgtttttgagtatctggcttagttaaccttttttagtgtgctttgggtataacaatagatgtaacaacttatcacaagggatacttttattgccttttgccaattgaagtttagagacctttcttccatgtaggtcctttctccttttccctttttaaaatttaatatttgtattttctctatacaccttgaacaccacatcaaatgttgttataacgtttacttcaactatcaaatatgatttaagaaactcataagatgaagaatagttcattttatatttaccatgactattacccgttccagtgttcttcctttactcaaattaaaccttattgatacatcatttcctttttgtttgaggaacttttttttaggagaacctcctaaagatatgtctgttagtgacaaattagtttccgtcatctgagaatgttgttcccctttgttcctgaagggtggttttgtcctatatggaatttggccttgacagttctttttctttaacatttgaaaaatgtgccatttctttctggcttccatgatttctgatgagaaatctgatggcattcaaattattgttccccttaaaggtaatgtgccatttctctttggctgcttttgagatttttttctttgtttttaattttctaaacttgacttatgatgtatcttttatttttattttttcccacttagggtttttctcagcttcttgactctgtagatttatgtcttttgtcaaattgtgaagttttcagctattatatctttatttttttcagcgccatactttcttctcttcctctaaaactctgattggatgaatgttaggtcatttgttattgtcctacaagtccctgatgcctttcttgtttctttgtctgtttttctgtgttcagactaagtaaattctgttgatctgttttcaagttcactgatcctgttctctgtcaattccactccactattgagcccatccagcaagtttttaattttaattagtattttttctattttgtaattatttttggttcttactttttaaaacatttcatccttcaaggagagctactttcaatatacatggaatttcttggaaaaactagtaacagttttaggttatttgtatatatgaactaatgttactcaagattttaaacctctgcagagttatctctgtaattagcagatgaagcatgaacatacataatttttttctctttttgtctcaggtaattccttgttacaggccctaataaaagggaaatggggaaggaaatggagaagagaatttaggccttggcaaattgaaaattgtctgtagtatctcactgacaggtaaagtaggaattttgaaattagagaaaaggaaccaggaatgaagatgaaatgaaaaatttatatttacttcactaaaacttttaaagttgtcatatagtttcagatttaaaaagctatttcttccagcctaggcaacatggtgaaaccccttctctaccaaaaatacaaaaagttagccaggcatggtggtgtgtgcctatagtctcagctacttgtggggcggaggctggaggatcacttgagcccagaaggttgaggctgcagtgagcgaagattgtgcccctgtattccagcctgggtgacaaagtgagatcctatctcaaaaataataataaaaataaataaaaaatcaaaaagttctttctcctttccttcatttcccttgaagaatactgaagattttacatagatgacaaattaggtaaatctaagaaaaaacaaaaattaagtagaacaggtaactttcagtggccatacttgagatttaggttatattgactgctgaggtttatcagtttgattcctatccctacaatataattaaaaataaaccatggaccccccccccccattgtcagactcactgacagtataacattgtgattaaaaagctctttctcagtaagtatgaaaagttaatgcatgaaaaataatatatgttaatttagtgggggaaaagatggtttctgtattacagtggtattaacacaagtagctttccatctgaaagaaaataaagttggatccttatataatggattaaaggtttagaagtagagactaataaaaattaaaatagacatctgggaaacaatatgtaaaatatggaaacccagaaaagagttagtatctgcattatacaaagttttcttacagactgataagaaaaagataactcacttggaacctagacaaatgatatgaagagacaatttacagaaaagatagtctaaaaagctaacaaacatgaaaaaatgcttaaacacacttgtagtcagtgaaatgcaaattaaagagtaaggtattttatatccaaagactgtaagacttacaaagtgtggtatcacttagtgatgatagggttgcagagggaaagataccattctacatcgctaaaagaattacattctttttttgagaataatctggcaacatctattaaaattcaaccagtaatttcacacttggcaatctggcctataaaaacaaaagcactggtagatatgaatgtatgtgagaacataggtatttaagggtacttattgcagcattgttctgaaaaaactgggaactaattgagtgcttggcaccagggagatggtcatataacttatggtatatccacattatggaaccattaaaaatgaattacttatataaactctttgacttggcaggatatccatatgttattaagtatgaaagcaaaatgcatagaagtatatataatatgctactatttgtcaaacactggcaactcattcatgaaaaaatacataaatgcttaacatatatttgtgtataattatagaagaatatggaagactatactaagttaataacatgggtttgggagagatatggatggtaaggaggagaggtagagtggaggcatgatgcaaaaggttaaaaaattgtttagaaaaatcacagcatgcattatatctcatttatccatataagtgaaattatatatatgcatataagtagaattttaaaaataaagaacatgagctctggaatctttcagacatttctggattcaaattctgactctgccactttacaacttactagctgtgtgacttaggcaaattgcgtaatgtctttgaatcaattttctcacatattttcttggggtgggaggatgaaataatagtacccatctatagggttgtcatcaggattaaatttagatagcatctgttaagtgcttagcacagtacctggcttacagaaagcactctcagttattagttcttactgttgccttggttcttacgctcttggacatttgttaatatctatttttaaaactttatcaccatcctgccactttcttgaaacactcctcactggcttacattactttacatgtcttagttaatgcctgtttctaattgttcctttttattttgctgatatcttttttccttacctatggatattgctcccaaaatatagcaggggttgccaaagaagcttttgaattagggtgactgggagaatattagtccatatatggcagcagagaagtcatgatgtagggtttatagggttgatttttaaaacaagatgattttgatacttgctctgcagaagttttatgcatcaatgaggcacccagatgaaaatgctcaatagctggaaaaacttgacaggaacttgagaagtagatataaaggattctctcacttggctaattctcgaagtggatgtaatctccaggggagagcatatagagaagggaatccagggcagaaactttggggacagggaataggagaggaaaaggttcccattgaggactgggaggtggcatagaagccaaaatagagaatttctttaagaagctgctggagaaactgtatgtctactttgttctctcttgagctttagttctgtggctcacattgtcttctggccttgttccttattttcttgaaacttaaactacatttgtaactaatcccagcttcctttcctcccactaaattcccttcttttacatttccccctatatgtatgtgaggagtgctttcattcccctcatctttggcatcaaaatctgtcatctctgcccctttcccttccctggttctccatatcattaccaagactctcattcactcctttttcattcccactcttgcctacatttgattgattattatcaaaataatctaaacaggatattttgaaataatctaaacaagattattttgatagctgccaaactctagtgtaatcttgtgttttttctgtctttcatagtcctcttaaaagaactagtttaggccaggtgaggtggctcatacctgtaatcccagcactttgggaggccgagaggggtggatcacgaggtcaggagatcgagaccgtcctggctaacacagtgaaaccccatctctactaaaaatacaaaaaattagccaggcatggtggcaggcgcctgtcgtcccagctactcgggaggctgaggcaggagaatggcgtgaaccccgggggcagagcttgctttgagccgagatcgcgccactgcactccagcctgggcgacagagcaagactcatctcaaaaaacaaaaaaaaaaaactagtttaatccagttaatccagtccctctgccttttaaatccaccagattatctttcctccaacatcttcccaaactgttctgaggaaggagatgaggtattaatgagagagattagtaggatcaccattaatgaaatatagtcaaatcagtttttagaaggttgagtccgggcgcggccgctcacgcctgtaatcccagcactttgggaggccgagatgggcggatcacgaggtcaggagatcgacaccatcctggctaacacggtgaaaccccgtctctactaaaaatacaaaaaaattagccggccgtggtggcgggcgcctgtagtcccagctactcgggaggctgaggcaggagaatggcgtgaacccgggaggtggagcttgcagtgagccgagatcgcgccactgcagtccagcctgggcgagagagcgggactccgtctcaaaaaaaaaaaaaaaagaaggtcgaatacctttttggcaccagggacccattttgtggaagtcaatttttccacaaatggtggggagtggggagtgatggttttgggatgaaactgttccatctcagatcactgggcgttagtttctcatagggagcatacaacctagatccttcgcatgcacagttcacaatagggtttgcgttcctgtgagaatttaatgcctccactgatctaacatgaggcggagctcaggcagtaatgcttgcttgccgcttatctcctgctatgtggcctggttcctaaccagttccagaccatggcccagggattgtggacccctgttgtatactatgtccccctctaaagcattctcagttcttatcggtgtgctttgaaaaagttcctcagaagtaaagcttatgtgcctttgtgtttaacttaactttgcagattgtgttttccaaagatggccacaatagtaactcccataccacatgttctttttacaatatgactttgacacttcttctactgacccctctcagtagaaatgtcacagtcatattgtacaaagaacatgctgtctttgaatattgatgggcttctgtctaacatggaagtgatgctatgtgacttttgagggtaggtcataaaaggtgatacaactttaatctggtactcttgagacatttgctcttggaaccaagccaccattttctgaagaagcttaagtagcccatattggcaggccaaatggagaaggcacatgcaggtgttccaggccaacagcctatgtgacaacagcatcagtcaccaagcatatgaacaaagatacttccagatgactcctgcctccagtgatcagatcacacccagttcttgagttttctcagctaaggccccagactttggatcagagataggctatctttgttgtgccctttctgaattcctgacccacagaatccataagcatagtaaatggttgtcttaagccactaagttttaaagtaatattttagatagcgagagtaactggaacacccaatgtttcctgagaacactttattttcttaagtatggtaactggtagcttgtgatacatgttccttggaaaacctgtttgtggaatttctggttttctaattttttagcttgccattcaaggccttcatagtgaacagtaggacagcttcggtattggcctatacatatccagcaaatcagtctcctccctgaatggtattttatttatagtttctgtatcagtattcttttactcttctagaaagcccttatgtttattcgctgatagtctcttttgtgaagtgcctgttcaaatatcatttttctattgagttgtctcttactgatttgtaaaagttctttgtaaattctggatatgtgcatgttgggacaaaaatctatttttatatcctgtgtgtatatatatatttcctaacaacaggctcgttttcagaatactatacatatgtgtatatatgtgtgtgtgtatatgtatagtgttctcccactctgtgacttgccttctgactctcttaatagtgtcttttgctaaatccaagttcttaattctaatggaggatggaatttgaaagtcttttcctttttttttgagatgaactctcactctgctgccaggctggagtgcagtggtgcgatctcggctcactgcaacctccgactccctggttcaagtaattcttctgcctcagcctcctgagtagctgggattacaggcacgcgccaccaagcgcagctaattttttttttttttgtatttctagtagagatggggtttcacgatgttggccaggatggtcttgatctcctgaccttgtgatccacctgcctcggcctcctaaagtgctgggattacaggtgtgagccaccacgcctggcagtcttttcctttatggctcatgtttactattaccttgtttacgaaacctttggccaccctaagctcataaaggtatgttccaatgttatcttttggaagctttattgttcacgtttcacatttagatctataatatacctagtactatattttgtctgtggtgtgagaaaggagtcaagattcatttattttccacatggatatccagttgaaccagcatcatttatttgaaagaccttgttttccttactcctctgcatgaacgccattgtcatgaatcatgaagatatatctttggatttgtttctggattccctgttcttgtccactgttttgtctatgttgtcttcaataatggtatatttttattaaacctggatatagggtaaagtcctccaactttgtggttgttcttcaaacttgtcttggctattctttttttttttttttttgagacggagtctctctctatcgcgcaggctggagtgcagtggcatgatctctgctcactgcaagctccgcctcccaagcgattctcctgcctcagcctcctgagtagctgggattatagacgcccgccaccacgcccggctaatttttttgtattcttagtggagatggggtttcaccgtgttagccaggatggtctctatcttctgacctcgtgatccgcccgcctcggcctcccaaagtgctgggattacaggcgtgtgagccaccgcgcccggccttgtcttgttattcttgactttttacacttccacatacatattagaattagcttaacaatttccatttttaaaaaaaggaaagggaaaagacctgatttggattggaattttacaaatctaagaattaatttggagtttatactagtgagacttccagttcacgaatacagtttgtcccctcgttatttaatttctctcagtaatatccagcaaaccacgtagctttctgtgtagaggtcttgcacatcatttgttagatttattcctaagtatttgatttttttgatgctgttataagtggtctcttttatgttttattttcaaattgtttgttgctggtatgtagaaatatatttgattttcatatattgaccttttagctaatgaccatgttgcattcacttattaattcaaataatatatgtaagggtttttttttttttgcattttctatgtatgtcatcatgtttgtgaataatcacactttcttcctatccaatctaaatatatttatatctttttttgttttcttattgcattggctgagacctcaagtatagaagtgttgatagcagacctccatatcttgatcccaaactcagagagggtttcaatattttacccttagtaaacatttactgaagatttttaatacttgtattatatgaaaaaaatgaatttcatatttatattttataaaagatttctttatttctcacttgttaagaattttttcatgactattggattttatgaaatattttctgtatcaattgagatgattatataagttttctttattctgttaatgtggtaacttaaactgattaaattttgaatatttaaacaacttctcatttctgatatatacacaatttagttgtcatctattacccttttgtatagcactagatttggtctgctaatattttgaatagtttttgcatctatctcaaccttaattataatgtacattttaaagtaaaaattacaaagaattgctgattgcataaaatgagttgggaagtgtccctctttttctattctctggacaactgtatgtaaaattggtattattccttccttaggtgttaatttcatctggaccaagaattttgtcttaaaatataagtttattaagagtcttctagtctgttttctttttgtatctgttgggtttggtttttttgtttgtttgtttgttttggaatttgcccatgtcaagtttattggcatacatttcttcatatttgtttattattttttgatgtctgtagaatctggagtgatatccttttttcacttctgatattgattgattgtaccatctcttttcttgagaagtcaagggtttacttatttataggtgttttcaaagtaaaaacttttgggtttgctaatcctctctaatgtaaactttttttcctatttcattaatatctactcttcattattatcttttttctattttctttatttggattcatttattttttttctaattccttaggccaaatggctaagtcctttatttgcagccttgttttctaatatatgcatttcaaaactttgaattttcctgcattcgtatctttatctgcatttcatacattttgtgtcctattttctattctctattgcttctctgctttctgcttatttctatattaattattttctatattttattaatttgttatacagtcttataaattctttcagtggttatggattttttttaacatttttaaaaaggttttctggcttttctaattgttctcaatggaagattatttgggatgtacagatcaccagcatgtttatgttggcttctaggccaattttaaaaaatgactaaagtaaaacttctgttaccaattaaaaattttgtttttctgccctgggcctttaaaagtcaaacctgcacttgaccagtcaccatatattttccaagtaggtttaatactagtgcctaggaatagcactaatgaaggttcagacacatgcaaagtatatgctctgctctgtgtcatcgtggcacaataacagagtccacagaatggtccacatttaatattattatgtttaaagtttttggcatttgaggaagttttagaagcttcctgttcatcttacatatgtaataaataatgtaagttatgactggatattgttggtactttaacttggaaagaaaaccatcttattacctctttttcaagtttttttgaaagactgtctggacatttaattgaaaactatttggacattgcaacacaaaccttaaaaaagttgttatcatctacagttcttacatgaataaagcagtattaccaagtagccaaagtaaaatgcagacattttactgtttgctgaagctgattaagatgtattatttataactccactttcaaatattttatttattagtacagtcttactgttctcaatggctaactttataataaataaatattatatttacatagaatcacttaatgtatactaagtatatatttaaacatataaataaatcagcccatgactttatatgtttgtattataaatagtataacaaatattataaatttgaacctctaaaatttatactagtcaaattatctaggtttgtatgagatttaattggaaaaaaccctcttactaaataaaattagaagcccattaagcaaattaaaacctatatttaagaaaataggcttgcctaagttacacagattgtatgcacgcttggtttttatccagcacaagtcttactgcttatgaaaattgattttattaaagattgcttatgggctgaggctgaaggcgtgccattatcctttaccagtatataattacaacgtactctcctttgttaatctgacagttatttgcagaactgaactaccttggattcttaggtagggaagagttttaattctcgtgcctcagattttccattgctgcttttacgtgggtgtgtgagattcagaaatacgagagtgaagtaaaataaacgatgctttataaatacatggaattaggtgcctacaggggaagctatacagcagctagccagcattttaattccatgtttctcagcttattttatttgaggtgttagagttgtacttttttgttttccaatgtttatagactgagcttgattttcatatctagttgaattctcactaattttgtggctaatcaagctcccacaatgtcatttacttgaagttaagtattgatatttatgatttgaatatatttaacaactttatagttaataactttaaattctcttctggtgaaggtattcagtttggccagtgtcttctcagtcagtgctctaatttaatatagtgtttagtgctaaatctaatattgtttctaacacattataaaggtcagaacttacataaatatactgtagtttgtgatagttttggagaatgggctacagtggcatttattagtgaagtaaaaattcagtccataagaaaatatgaagtgatactttatttagtccatatatttttaatggacagtggtctccactttctaagtggggatttttcatttttctaagtattcttaagagaatcagttttggacttttggttaaacatagaggttagaataaatatgtttatttcttcctaaattcactaaattaacagaataaacaataaaggaataaacaaagagaatgaaagaggcaatataacatcaggctagagaagtgaaattttagaaatgttagaaaagaaatgcataaattataaccaacttagagcagttttgatggaacataatatttgatcattatattgagttacaatttatttaattattccttaatatcgagtcatatatataatttttttagtgtctgataatgggttatcataattaagcattcatctatccatgaccatttagttttttcagcttttcactgttataattagcattccatgcatcagtcttaaaatattttaggtttttttcagaattgaatgactgaatcaaagtttataccttttatgagtattgatccatgctgccagattgctttgcaaagccatttttatgattaccatcaatgtgtggaatttcccatttcactacaacctagccaacattgcatttgccttaggatgttcaatctgggcagggacacatagcccttgcatcagttgcttgtctgtggtgctgtgggaaagtgtggcatgacatgacaaattttaccaggtgaagcttagctgtgtgcctttaccactgccaccttataataaagacagatgctgtgagtttagaggaagaggtgatttcctttgtttacctggggtgctcaaggaaggcttcatgtaacaaatagaatttgagctgtgtataatgagggaaagatttataaagaaaaatttgcacagacacatgagagatatatcagtctggatcaaatcagaagacagaagccacatagtaactaaaattgttagtttaacttaaagaattattagggtatgataagagaaaaactatgaagtcactctataaggagaactccaaaagttaccctagggctgaggaaaagtacccaatgaaggacggaattgaaatgaggttcagacctcattgaaagtgtggctatagcccattggatggtagagaaatttgctgcgttgtctgagccaacgctggtgcacaatcacagtgtgagcaggtgagttaagactggtaggagagcatgcagagggaatcagggcagtgcggcagggccacagtaacaacccttggggtgcaagtgagttgaggttggctagttagtagaaggagttggagcaccactttagataccactggaattgcaagttggagaggcctccctgtgtagcaatctagagcactgctgtttacagcttggggcaggacagtataccaagctgctgtgtggaacaaaggtcaggtggctggctggccaagccggtgcatatggtttgaggagaggggctggggagtagccacctggtctggggctcctggctatagtgctgctgctgcctgagtagagagctggagaaagaaagcacacagccgctagccagatgctggagaaagctttcccctgcaggcacctagtactacagcagtgttgtttttcagccttggcattattgaccttcagggctggataattatttgttgtggggagctgtcctgtgtattgtaggatatttggcagtatccttggcctctattcactgtatctcagtagttccccaagttatgacaatggaaaataatctccaaatattgccatatgtcctctgagggcaaattgtctctagttgtgaaccactgcaatagagaaatctcacagcagtggaacagtggaggggtaaaatataagctctccagaaacctgctgagaaaactccttccctccctttccagtgcactgtattgacagagcttagcatcatgtcatactggcaaatgaaaaatattttaaaggcccagatccacttttccagataagacaatgaagaatgaatttggagtagagaggtaataaactgatagctgtacaaagtacagttatgggattaaatatggttggagaattaaatatgagcaaagttatagaagcagaaaagcgtaggggcactagggaaattcaaggacaagaagactaaagtgcaaggctgatgtaaagtggtaagaggagaataagctagaagggccctttgaatcttaactctggagtgctttgagtgagtggaagagaggggaagagaaagacagaaagaccaatgaaggtttgagatttggtgctgtcagtagatgaggaaggcagaggcagaggtggaggagtgatagaaataattgggacctacatttttgcacataactaattactcaggaaatggttcatgatagtatatcctgggttttttcccacctatccatttcataatttaatgtagtgctttaatacataaaatatgcttattggggctggatgtgatggctcatgcctgtaatcccagcactttgggaggccgaggtgggtggattatctgagatcaggggttcaagaccggcctggccaacatggcaaaaccccatctctactaaaaatacaaaaattagccaggcgtggtggtacgtgcctgtagtcccagctactcaggaggctgaggcaggagaattgcttgaacctgggaggcagagtttgcagtgagccaagatcatgccactgaactccagcctgggcaacgtatatatgtatatatatatacatgtatattgtgtgtgtatatagatagatagatatagtatgtgtggatatgtatgtatatgtatatatacatatatatacacacatattcatacatacacacacacacacacacatacacacacacacacacacacacacacatagaatttgggagaagagaagagtaatatgaggaaataagagaccatagggagttcattgtccctcttactcttctatggagtgaatgcaagggcaagccagaacctctgcactttctcaccaggtgaaggtaggggaacctgtctcatggtaatgcacagagctaaaagagaattctagcagagggaatttgtggaagttacggttttgactcaaacccctctatagtctttcatttttccaaggatatgtctcctcctttctaagtactttcgtggcttgttttacgtgtcttgcaatcgtataatccagcatcactgaatagtcttatagtttcccagatgtccttgtggcatttccttctaggtatattgaaacttgcccttttttattcttgaattttgtctttggctcaaggttttacattttactgactcttcatactacttttctccccttatttagaaatggactcagaactcaaggaagaaattcctgtgcatgaggaattcattttgtgtggtggagccgaaacccaggttctaaaatgtgggccctggacagacctctttcatgatcaaagtgtcaaaaggcctaagctgcttattttcattattcctggtgagcgtaaaagtctgggtgaggagactttttgtagatactcataactatgtctgattttaaagtatagagaatttggtaaatatggaaaaccttggagaaggaattaaaatcgcttgacccattgttaacaaccacccttaatattttgacgtctggattttgtgtttttcttctatgtatttacattatgttgtctgttgtgtgtgtgtgtgtgtgtgtttgtgtcacagttggaagtatgtactatatatgcagttttgtaatgtggtttttaaagcatttcttaatatttaaaacttcatcaatatttttgccagttttctaaactttttctgcctcatttcaacatgattatatgtttattatagaatatttggccaggtgcaatggctcacgcctataatcccagcactttgggaggctgaggtgggtggatcacaaggtcaggagatcaagaccatcctggctaacatggtgaaaccccatctctactaaaaaacaaaaaattagctgggcgtggtggcacatgcctatagtcccagctactcgggaggctgaggcaggagaattgattgaacctgggaggcagaggttgcattgcccccagatcacaccaccgtactccagcctggggggcagagcgagactccgtctcaaaaaaatatttaaaaaaataaaaaataaaaaaataaaaattaaaaattagaatattctgatatttggcagctgagtcacttgtaacttttgctagatcattgtcaatagaattagggacagatgcttgagcgattgcaggtattcaaaatgcattttaaattgtgagtttgaacatacatgtttattcttattctgtgaattgccagttcgaaacccttgcccatttttcaattgtgttttcaatgttttccttattgattttcagttgattcttacacaactgtaaaattgtgttatatctgtcatacgtgacaagaatctttcctggtttgtcttttgacatcatttacaatgtttatttggttgtatagaaagtatctttgttatgtggccaaaatgctaagtctcttcctttaagacttcagggttttatgagtttcttagagagggctttcctactccaagattataaaacaattctgccatgtcttctagtatttttacaatttcatttgtgatctttaagttgatgcatctagattttaagggcaggcactgaggaagggatctacttttcttctccctctcctttggatggcttattacatggtccacaaccatttattgtatcatctgcctttctcctactgccttgcaatgctaactgtattgtaaagtagattatcctgtggccaggagtttctttccatgtttttcgcctcttcatgtgttcttcatgttttttaataaatgcagttttatgatacttttacatattttttggaacttgttcatttttattcttttccagaatattctttagcttcttttcttttggctgcagaatatattttttggcttcattaggaggaaaaaaaaagcttaaatgatctttaaagtcaactttcctaaaattgatctcgtaaaggcagagtataatgatagatactaaaggctgggaagggtgcagggctgggaggagggatgaagagagaggtaaacaggtacaaacatgcaagttagatgaaaggtgtaagttctattgttggaacttatttataccaacagaattggcatagtcggcagagtagactgactatagttaacagtagtgtattgtattggtataaagtagctagaagagaggccttggatttttctcaacacatagaaatgatgaatactcaaagtgaatgtactaaaacaccctgacatgatcattacacgttctatacaggtaacgaaatatcacatgtaccccatgaatatataacataaatatcaatatctttaaaaaaaataaataataaccaaaaaatcagcttttctagttccaacagatgttctcagaggcaaccacttttaacactggtatattcctgtgatatttattccacattcttttttgtttgtttgtttgtttagacagagtctcactctcttgcccagactggagtgcagtggtatgatctcagctcactgcaaccctccacctcctgggttcaagagattctcctgtatcagcctcatcagtagctgggattacaggtgtctgccaccatgcctggctaatttttgtagtcttagtagagacagggcttcaccatgttggccaggcgtgtgtcgaactcctggcctcaagtgatctgcccaccccagcctcccaaagtgctgggattataggcatgagccaccatgcctggcctttactcgtttctaaatgaaatacttatatttcttcttcttcagttgtcttttgttttgttttgagatggagtctctctctgttgcttaggttggagtgcagtggtgtgatctcggctcactgcaacctccgcctcccgggttcaagcaattctcctgagtttttaatattagatgttatctattgtcttcctccatgaaagaaaaagattagctttcttatactttcccttctccatgcacaatcatatacccctccttctccatctattttcctagtatgggaatatttcagttttttgttaggtcaatattcagtgcttttattattatgactatgtattatattatattatgtatattatattatattatattaattatattatacatagctaagcctatagggaattgcgcatgcatttcctttcttatatatttttgtttgttttccctgggttaatgatgttctgttatctttttgcttagttttttgtgctttaatcactcatttatcctagaactattctctagaagtgaaaagaatcctttcaatgcatttgagtcatcagtcagttttcagaatgctctgtcctttggctccagtctggactcattgctccccaggcctgctgcacagttgccatcctggggacttctgtcactttcttctggcttggatccctcgtttctcagatcccacatttttatcttagtttattctcttgtttttggtagagcatatcttctagtagcttccttagaagaggtacatgagaagtaacacagcatgctgcaaaatgtcttagactctaggttggaaataatttttctttaggaggaaaatggagggcgttaatggagggcattaatcattgttttccaacactcagagctgcttataagaagtattggtatcatttctgattttcgccttttgtatgtgaagattctctacccacattttcgagaccttttctttgttctgagattctgaaattttacagtgaagcaccttggtgtgactgttttttcatacaaggtacttgggttttggtgggcccttttaagccagaaactcatttcattctaatagcgctttgtttttcttttcttttttgtagtctcatgtttaatggatgcaatatcattttcttttcttttcttttttgtttttgcatttgcaagaattttcactgtgttccttttttcatttgcattagtctttagttttcctcaaatgtctggcaatccttgactatccattcatgtttaagaggaagacaaaaaacaaattggaagctttgcactcagagctggggcttatccagaggtgtgtctagggtgattagccatcctagcttgcctaggactgagaggttttctaggacataagactttcagtactaaaaccatgacagtctcgggcaaaacagaggagttggtcgccctaggtgggcctcatcctaaggtgattgagtagggacccagcatttcattgacggatttccagctttcagtgtctgaagctctttcttttattgttcagttttcctggggaggaatcttccaggctcctgtttgaagagtggaaacctgtctgttaatgttcaaagaggaacaggggaaaggaggtggtagtttcagtgtttggttatgcctagtccagcctcttctcagtatggtactttcattctcagctggactaagattcctgatcgagaatttctctttgttttaaccactaatgggaataaactattcttctgccaggatgtaacagtctttgtggaagtcagtccgttcagcatctattaacataaaaatacatgtacttttccagtagtgaaggagagtttgaaattatagtcatggcaagtgctgtttgatggagcagagatttggaatagcttatagcataggatagagaaaataagtagaaacattatcttaaactcgagaagggatatccttctaaggctagaaagaaggaggtgaaattggttactaaaatggaaaagtataaaggcgtatcagagggaagtgaagtctcctgcttcctgactactgttttttctgttgagagttgagaccatgttttgaatgctaatcatttccagctcatgaaaagatactaggcctgtggttcttaaagttggtgtcaggatcagaagtattgcttgagaactttaaaaatgcagttcctgggctctatccctgaccttctgaaccagaaagtctgggggttgggcaatcagtgttttaacaagccctgcagggaactgtgatacgcatatctgatccagggtgtagtcatgggaatgaattgcttaagtttaatgtaggtgaagttctttggatttcatcataataatgaattatgggacaaagtttttggctcagtcagtccaactggattttgaaatgtcctgacatgacatgacaagtgaaactgtcatttaagggtcaaggctttcagagaaagtgtgagtgactaaaaagttgatagatggaaatagatggcttgagtcttaaagaagaagaggttgttgtaatagtgaggtgaaatagtaagtgggacagacaacccacccacttccccacctggagatagtatttattccctcactcttttatcccaggtgctaggaatactgtgttgcattaagtctttgctctcattgagttatatgtggtgttagagaagagtgactgaggcctctgctgaagaggattgaaaggaagagagcccattacaggggagagccagatttcagatatggtgaggagataaagggagtattcagtgaagacactgagaatggagggaagcataaaacatttgtagtttgatagtctcattgtttatagtgctttgacattttcagatcatatttcatttcctagtgttcttttatgtttgccctgctcattagtttgtgggatttagaattgtattttgtgtgtgtgtgtgtgtgtgtgtgtgtgtgtgtgtgtgtggcaggtttcgggggagctaatctatttacactgtggtaataatcaggataacagtatttcaaggattgtgaagccactatggacaccatgttatgtccgtctctgatagactgacataacatttcattttaaatcacattgcttttgcagctagcaaaattaattcttcacttctaagttagtaatgataattgtgagttttcttttcttttttgtagtctgatgtttaatggatgcaatatcattttcttttcttttcttttttttgcatttgtaagaatttttactgtgttccttttttgatcagaatccacagattgaagaacttttaatttagtttcattttttctgatgaaccttagatcttggatttctgtaaagtaacattgtccttggactttctttaactagtgagatgaacaaagggaatcagattgagaactcaccatagagtacactgaatcataattcttaggaggtcatatggagataacagaaccatgtgaagtatcaagtgctgtgagcacagtggttggagatatagcagataaggctccatgaatgagtccaataggtctgtctacatggcaacctattatatagatactgtgccatattaacttgatatgtggcagttttcgttcctctccctacaaaattaactggaaggtataagtctatacttgcagcattgtatagttggagattattagcagtcagggcctagagatgatcactacaacttctgttatacattgcatgggtatttgactgatttgactgttatgagcatgttcaagtgtgtgtttataacacatttttatgtaaacttttgattaaatattttacttgcatgtctgcattggaatgttttccaacatccttacacctggacctctcccatacccctccgtgtgtgtgtcttttttagttgcataagtgtaggccttttaattttctttgtggtttcttaacaaggaggtttaaatggtgaagtatgaagtactgtatgcaatggtatttaagcattttgcattgcattttccacttctgtctctgttataagttagacctttgtgatacttgctatgcgttcagtttgaaaggatttattgtatgtgagtgccatgtacccaatctagtgctgcttggtgccactggatacagagaactatagcaagtgatggctacttttaaagaagttaaactttcaagtttggtacgttatacatgctacaatgttaagtatatttctgacaggataaaacttccatttttttctgcatctgttgaggatcgtatggtttttcttttacggttggttaatgtggtggatgatgttaatttttgaatgttaaaccaatccagcattcctgtgataaatcccacttggtcatgatgtattatgcttttaacattttgatggactcagtttgctaaaattttgtttagaatttttccatctttgttcacgaggtatagtggtctgtagttttttctttttctttttgcaatgtctttatgtggttttggtatgagggtgatgctggcctcatagaatgagttagaatatatttctttcttgatatggtttggctgtgtccccacccaaatctcttcttgaattgtaactcccacaatttccacgtgttgtgggaggggctcagtgggaggtaattgaatcacgggagcaggtctttctcatgctgttcttgtgatagtgaataagtcttatgaaatctgatggttttataaagaggagttcccctgcacacactccctttctttttgcctgctgccatccatgtaagatgtgacttgctactccttgccttccaccatgattgtgaagtgtcctcagccatgtggaactgtgagtccatgaaacctcttctttgtgtgtgagttgcccagtttcgggtatgtctttatcagcagcatgaaaacagactaatacatttctcttctattttctgaaagagtttttatacactgggcatttttcttccttaaatgtttgatagaattcaccagtgaagctgtgtgggcctggattttctttgtgggaagatttttaacttaaattctaattaatccaatcaatttagggctatttaggttatctgtttcttcttgagtgaactttgatagtttctgtctttctaaaagtttattttatctaagttgctaaatgtattgctatgaaaattttcatatttttcctaattactcttttaagatagaagactttttttaaatttaaatctgattatgccttaaccctgctcaatctcttttaatgttacttagattaaaagccaaattacttatcatggcccaaaaggtatcacatgattgtatttctcttcctcttcaacctgatctcatacaagatttgatatctcttgttatgctttagccacactgatagattagatgcaaagggaagaaccaaggattatggactgtcttccatttcttcaagagctaagatctttatttcttgagggcctttgaattagctcttcaagagctaagatctttatttcttgagggccttctccctccttagtatttattctcttccctcaaattttcacaaggcttatttcttgtcattttggggtcttagctaaatgtcacctcctcagacctttttttcactctattctcttcccttctctatcatgtgaccctgtttattccttttataggagttctcacactctttatctcacctatttagttatgtgttgtatattctcccactagtacataaattccaaaaaggccctcatctgtcttttgcctgacatagtgactttcatacagtaagtgctcaataaataattgagggctaaaagaagctgtaattctgaatagaattaatgaacataagtaattggcatcatcatttacttgatgatgataaaattgtggatcagaaagcttaagaactcagacttaatcccagagatagggagaaaactttgttttatttatttatttattcttcctcatttaaaaaaatatgttaagttctgggatacatgtgcagaatgtgcacgtttgttacataggtatacatgtgccatggtggtttgctgcacctgtcaacccatcatctaggttttaatgcctgcatgcattaagtatccattatctagtactcactgtttttcatatatcgtgtcattgtaacttacatctaaatcatggggttatctttagtgtctccttaatgttacaccagtttttaattgttataatagctgtggtattaatagctgccatttattcagcccctaccatgtgccaagttttgtgcaagtggctatccattcgttatttctaatgaaaatgccaactactttatagagatattgtaagactaactaaaacaaggaaggcagaagatcctacaccggattactgatgttttttaaaaattcagtattatgattttcttttgtatatactttcagtcatcaaatatttatttagcacttaccatatatgtgatgttggctaagttatttaacctctctgtactcagtttcctcatccataaaatggaagtaatgatagtgctacctcatatgataattaaataatatatgtaaagcacctaaacactgcctggcatgtagtaagttatagtacctaaaaatattagctattattattttctagccatatgaagaaatctatgagcaacgtaagacatgtgaatatgaggtataacatattcctagaaggttatactcagtaatataaaaatataaaatttttgtaaagtaatatattaatgagatgaaattttagtcacaatcccaaagagatttttaagaattgaaactagtgaaaataaccctaaagtttatgagaacagcctagaaaatttagaaaaagaaaaagggaagggatttgccctacctgttaacacttaaaaaaaaatgtagtaattaagacagtatggtcctggcagaggagaaaaggaaaaataaactgaattatttggtatcagaattagcaagtgaatgtaaaaatgtagtattgggtctgaagatatttcaaatcaatgcagaaagaatggattatataataaatggtcttggaacaattggccagtcacttggaaaaaagttggattgctacttagtattttatactaaaaagtattctaaacttactgaagacttaaatgcataaaacatgaaacagtgccacccacagcttccatagatgttatagcccctgtgctggtatgcccttcctcccttctttcttccttagctatacagtggccaataaactgaccaaagaatatatttctgcatttgaggaagttttcatcctatttgacaaagaagccaaaagcaccatcacaaaaaggaatttggaacttgggtcactaggtcagaatgcaacagaagcaaaataatatggatgctacggccgttgtatattaccgttatagctagacgttgttgtacaagtttgaatacctaacatttatataatacttgctgtgtttcaggcagtgttacaatgctttgtacattgattcacttagtcttcaaatgaggtagtaccattattacacattttgtggatgaggaaaccaaggcagagggaggttaaatagcttggccaaagctcacacagttggtaagtggcaaagccaagattccaacccaggtagtctggcttcagagtctatgctcttaaccactttactacactgcttatctagcaaactgaaagatataaaaatggagtagaaatcagtgaaattcgacaaggatgacagtggttatttacatcagtgctccagagccatgtcatgtaattgcagagaccagaaagcctaacaacatgaagaaatagataaactgatcagagaaatagatattgatggaaatggactagtagctgtgaagactttatatagatgatgattacaagatgaaaatcccatttcgttgtaatttcccccctacagatctatcagattgaatgtttttaaaaagatcgtttatttattgtttctttatagcaaactcatgtcaaaaataccttctgtacacacataagaaaaatctacatgtacttgtagacgtttgtttccccaaaagatcaagctgtacacctgtttacaattataagtgctagtgataagtgacaaggaaacagtagactccttaaagctctccctgtgcatgcttcttacactattttggctggcttgtttttctggttttcatgcatcttgttaactgagcatgaccaaatcttgaagtgccttatatgcagtattactgattttagacttcttccagatgactttatctggaagacactgaagggtgtttaaatagggtactgctgtgattttaatggaagtttgaagataatctctcttgggtactctgaagaattcagaggaaagtgtgaaaagaaacagacccatcttttctagcctgcgtgtcatcttatgcctgtttattactttgattaatctaaggtctgtgtttcttttcttaggtaacccaggtttttctgccttttatgtgccatttgcaaaggctttatactctttgacaaacagacgctttccagtttggactatcagtcatgctgggcatgcgttggctcccaaagacaagaagattcttacaacatcagagggtatgtccttgttaatatctactttcctttagagtgagtgcagggtcatgtttctagcaagcttgctaaggttaagagttacaccagtggaaacctctgcttgtggcattaggcccatggtgccatattttggtaaacttaggatttttagagacattttaactcttcatgtaattttctgtaagaatatgggtagataaaacaatctatgacttgccttctttatttaccaattagtaatcaactgtgtgttttttgatcatgtattatttttccagggttgttctaggaggaatggtggggaaaaagcagtccccaaccattttggcctctgggaaccagttttgtggaagacaatttttccacagactggggaggggtggatggtttcgggatgaaactgttccacctcagattaacaggtgtgcaacctagatctggcatgcacagttcacagtagggtactcctatgagaatccattgctgccgctgatctgacaggaggcagagctcaggcggtaatgctcactcgcccgtcgcacaccttcatctgtgtggccgggttcctgacaggccacagacaggggttgggaaccccttttataaaccatgttctttactttaaagaagctttttctctcatatttagagaataattaagtgataaaccgtggcctgctaatcatatagacacctaaggggtaaacaaaggagaaaacacagtgtgggttaggagagactttgtggagtaggcatgtgtcttagtcagtttgggctgctatagcaaaataccatagactaagtagcttttaaaaatggaaattgatttctcatagtttcttgagactggacgtccagtccagtctgcactggcagattcgatgtctgatgaaaacctacttcccgattcacaggtggcattcttgctgtcctctcgtggtggacacaggaggcaagccctcttgggactctcgcgggctctaccctcatgaccccatctgatcctaattacttcccaaagacccctctccacctcttaatagcatttgggcatagggtttcacctatggatttgggggccatataagcattcagaccattacagctggttttcacaattgaataaaatttggatttagggcatggaggtgggtgcagaggtacaacagacagaaagagtagcacagaagggagcaagatttaatagcgatgttactgctaagcagggccagtttgagagggactttgagagctggagagagagccaggactccatgctggaaggtttctaaatggaagaagtaataccatggagatgcaaactacctcctttaaatctgtgagaattctagcatgttcactgttccaaaaaataaaaaatgagagaaaaaataacttaaatataagtttataaaacataaacataactttataaaagtacagcatatccaagagttgaaggacactttcaaaaggtgtaacaattggaatgctctataggcattccattcaagggcgttttgtcctagggggtttcctttagttaatttgaggtgagatcgaggtggctgtgacttcattgcccagtttgcttctggttcttgtacgtctctctagtggtatgagcatctttttgtgcttattgagcttctcagttttaaagatattttacaataaagttacattttacatctatagtcttcgttattatatatgcatgattcttttagacattgatgtacaaggttgaacatacaaaagcctgtactctttgaaggctagttttgattatatttatttttaattgtaatctctgacctcagcctctgatcctcatatcagatacaattttttgtttctattttaaaatttgaatgtggtggcaataaatatggctgcatatgtgaactcctctgaatactttctgaaaaacattagtttactaatctgttattaatttgtgtaaatgttgcacgtcagataaacagtatcaatttatctagttttatctaattgttaaccttgtattttgcaactgaccctttagctgcagggagtatgttgtataattttctatttattttcaaaatggattaccttcctttattgtatttttagattaaaaagttatatgtgcttattaaacaatttagtatggaaaactgaataagaaaataaaaaatcggtgtcctgtaagttaaaggttgaaaagaaatactaaaacttcataatggtttaattatgcttaaacattttcagcctaaagcctaacaaacgttagcaccttggcactaagagatgagatttttcaatgaataatactttgtgtaatagctcagatattttctaggctgaagtaagcatctaggaatagcagcacaagggaccatatttttagtgctttttcccctatgtcaatatcgtgatgaagtgtgtatcttaaatgttagtgaaatagttacatttagattttcagggtattttttttcaacatttatttgcttattacctgttcaaaacttgtatttggcatatgttatacattaagaaaatatttagcatagaatttttttaaaaataaatagtggacttccagtttcagctctgacatgtagaacttggagtttgtcacttctctcctcgcaataagaaaaaagctgaggctaagtgtggtatctcatgcctgtaatcccagcactttgggaggccaaggcaggcagatcatgtgaggccaggaagttgagaccagcttggccaacatggcaaaactgcatctctactaaaagtacaaaaattagccaggcgtggtggtgcttgcctgtaatcccagctactcgggagactaagacatgagaattgcttgaaccttggaggcagaggttgcagtgagccaagattgtgccactgcactccagcctaggtgacagaatgagactgtgtctcaaaaaagaaagaaaaaaagaaaagaaaaaagctgaacaaaactaaaaatcatttttcttagacctttcagagaattgaggtcacaggacaaattgtcacctaaaatctagagagacaaggaaatacaatgaagattgtagaagacactagtgccgtttatgtagaatacactacataagtgtagaatacataaatggtgattttgatgaattgctgggggtaaagtacagactattttaaaagtaacaaacttctgcaagcctattcttgggggacttcttcactttcataggtattacttctaggaaccttatcaggtacttttgtgaaaatttgagaaatgtcctctatggttttttgttaggagtggaagagaagtaagcattttgcagtatgtccagaatattctcaataacatggcttactttccaagggaaaaagagttccagagctttatccaacctggggggaagggcagttagccaactccgtcttcccctagccttcatgtctcacatgctggaggagaaaaaaagatgacaaaaacttttgaagatcacagcacaggcattcaggcccactgaaagactgaggtttaatcattacattataggatgtttccctcctcattttaccaccatgtctacaggcctctaccttaataatagttcattataactataggagctacaagacacaaactctatttaagaaggagttcttagggaaaaccaaaggcaatggaggaaaaaaaaacaagaacattagaggaaactgaagtttctgatacctatagctacagaaaacattaagcatagccctggccaggcgtggtggctcatgcctgtaatcccagcactttgggaggctgaggcgagcagattgcttgaggttaggagtgcttgaccagcctggccaacgtgatgaaaccccatctctactaaaaatacaaaaattagccgggcatggtggtgcaagcctgtactcccagctactcgggaggttgaggcaggagaattgcttgaacccgggaggcagaggttgcagtgagccgagatagtgccactgcactccagcctgggcgacagagtgagaccctatcttaaaatacaaacaaacaaaaaaagcatagcccagcttctagtggcattaacatatagcctcacataaaaggtctatttacctcattcctattacttaatacatcatgtccagctttaagcaaaaagtaaaattagaaggcattgtaaaaggtaagaaaaaacagtctgaagagacaaagcaagcatcagaaccagagtcagatatatacttattaccaattttagaaatatcagatcgggaatttaaagtaaccatgattactacgttgagaactctaatggaagaagcagcatgcaagaacagatgggtaatgcaagcagacagtagggaactcttaagaaagaatcaaaaggaaatattagaaaacaccgtaacaaaaatgaaaaatgcctttgatggactcaccagcaggctggatgaagctgaggaaaaaatcagtgggctggaaaaataggttaatagaaattttcctaactgaaatgcaaagagaaaaaaataatttataaaagtacagcacatccaagagttgtgggacaatttcaaaaggtgtaacatatgcataattggaataccagatcaagaagaaagagaaaatggagaagataagagttgaagtacttaatgccagatgacaaaacacaggtctaggaatctcagagcacactaagcaggatcaatactaaggctctacacctacatatgtcattcttaagttgcagaaagccaaagacaaaatcttgaaaataggcagaggaaaaagtgccttacctgtagaagaacgaagatgagaattacagggaacttcttgtcagaaatcattcaacaaagaggagaatggagtgaaatatttagtgtcgaatgaaaaataacacttacctggatttctctatctagtgaaatcatccttcaaaagtaaaggagaaagaaagactttttcagaccaacagcagctgaggaaattagttgctggaaacatcctatgcaagaaatattaaaagaagttctttaggggaagggaaagcgatagagattagaaactcaaatctgtataaagaagagcatcggagaaggaataaaggtttaaaaagtttatttttcttgttccaaattgatctggtagatagctgtttattcaaagtaataaaagtaacagtatgttgggtaattacaacatggataaatgaaatgaatgtcaatcatgttataaaggatggaagagaggaattgggaatactcagttgtaacatacctggactaacggtgaaatggtatagtgttacttcagatgaacttgtgtttttttgttttttttgttttttttgagacagggtctcactctctcgcccaggctggagtacattggtacaatcttggcccactgcagcctcaacctgccaggatcaggtgatcctcccacctcagcctcccaagtagctgggactacagacgtgtgccactacacctggctaatttttggatttttagtagatgcagggtttcaccatattgcccaggctggtcttggaactccttgggctcaagcgatctgcccgcctcagcttcccaaagtgctgggattacaggcatgagccactgtgcccagccaaaaaaaaatttttttaataagtataattattatgagaagaagagagaatgttagatcatttaaaatgctcaattaaagctaggaatagagagtaggattttaaaaagaaagaacaagtataacaaagaagaaacatttataaatatgatagctattaattcaactatatcagtaatcactttatttatttatttagagatacagtctcactctgtcacccaggctggagtgcagtggtgccaacgagactaactgtagcctgaaactcccaggcttaagtgatcattcccacctcagcctcctgagtagctgagaccacaagtgtgtgccagcatgcctggctaatttttatattttttatagggacaggattttgccatgttgcctgggctagtcttgaactcctgggctcaagtgatctacctgccctggcctcctaaagtgctgggattacaggcatgagccaccatgcccagcctcagtaatcactttaaatgtgaatggtctaaatataccaattaaaatacacagattgttggagtggtagggggagatccaactatatgttgtctacaagaaaccactttaggaccaggcacagttatacacgcccgtaattccagcactttgggaggacgaggtcaacagattgcttgagcctaggagtttgagaccagcctgggcaacatggtgaaactccaactctacagaaaaatacaaaaattagtcaggcgtgctggcacgcacctgtggttcagcctactcaggaggctgaggtgggcagatcacttgaactcgggaggttgaggctgcagtgagccgagatcatgccactgcactctagtctgggcgacagagtgagatcttgtctttaaaacaaacaaataaacattttaaaacaaacaaacaaaaactttaagtataaagacacagatatgttgcaagtaaagggatatacagagatataccatggtagcactagtcaaaagaaagctggagtagctattttaattttagacaaagcaggcttcagaaaaagaaaatgtcagggataaagaggagcattacataatgataatagaaccagttcttcaaggaaacataacaatccttaacaaatatgtacctaacaacaaaggtcagaatgcaggaggcaaaactgatagactgcactattataagtggaaacatcagcaatcctttttctgtaatgaatagatccagcaaacagaaaggcagtaaagatatagttgaactgaattgcaccttcagtcaactttatttaattgacatttatagactacttcatctaacaacatagtcttctcaagcacacatggagcattcaccaagatagactacattccgggccataaaacataccttaagaaacttaaaattgagtataaattatacaaggtatgctcttagaccacagtggaattaaactagaaatcaacaacagaaacatagctaggaaatcccaatatatttagaagttaaacaacacacttttaaataacacatgggtcagtgaagtctgaagagtaacataaaaatactttgagcaaaataaaagtggaaatacaacttataaaaattggtaggatatagcaaaactagtgcttagaaggaaatttatagcattgactgcatgtattagagaagaaggaagatataaagttaattacctaagtttctgccttaggacaccagagaaagaacaatttaagcctaaagcaaagagaagaaaagatgataaaaatgggaacacaaatcaatgaagttgaaaacaagaaattattagaaaaaaaatcaacaaaccaaaagctagttatttaaaagactaataaaattaataagcctgtagccaggctaaccaaggggggagaaagagaagacgcaaattacaagtattcagaaagaaaagaagattcattgctgctgatctcttagataataaaaggacaataaacttaacttagataaaagggaccaatttattgaaagatacaagctcccaaaactcacacaaggaaaaatagatgatcagaatagactgtatctgttaaagaaattaaaccaccaaagctgaataaggacaaaacaagaaaagtataggtcaatatccttgagggacatacatgcaaaaattctcaatagaataccagcaaactgaattcaacatcacattaaaaggatatggtcatgatcaagtgagctatcttaagtcatactatagacagaagcgaacatttgaagagaacatgaatggcaactttgaaagttgaaaacagactcagaggatcacccttgatcaggtgttctcaaactttggcatgcatcaaaatcacctggagggtttattaaaacacaggtggctacctctgagttgttgatttagtagatctggggtgggacctgagaatttgcatttctaacaagttcccaggtaatattggtgctgctggtcctgggaccacattttcgggaccacattttcagaaccactgccctagatgttcacaataaacactgatacggaaaaccagtagaaaatatctgtcatgtgtctgaatttttaggaaacagctttaattcttattgtaaattgacatcttattatttataactttactttgaatatgtttatctctagttggcctgcttgtgtactattgagttaataacttagtaattagtctgggttctttgctacctaatgagaatagtgccatctagaggcattagcccaaagggccaccatagcgccaaaggaagctgtggtttctggagagggtgagagggcaactcattatcatcaaggacttattgacaacctactaggttattaactgtcatgctacaagggtatacaaagagttagaattgcttgccagtctccaccttttaggtttgtgactttctgtatctgagtagctcaaaagttctgtgaaggctaagtagggctctgggccttggaccagccccccattcagctagaacagttctgctctcatctgttgtacacattggaggttatgtttgcaaatgtatgctatagtggctttggataggcaacacagatatattatttgctgtccaagattgtcctaaggtactgattttctggcatgcaaaataatggcgtgaaaaatatgtaatcattgagaaaaagggcataagctattaccacacatcaaatgttgaaagtatgttttccttcatattagcacatgttaaaattatgaacagttggaaataatattctagtagaccacattatcacaatcataagttgaatataattggaagaacagatgttcaccaatgtcagaaggggatgattcgaggggaaaaaaagtgtgaaaagaaaatttgaggagttaggagtataaactgttttctggatttgatttgctatagagtcagcacacatgatgggaaattcattatcaactatttcaagtcattgtttagaaagtatgaaatgaaagctagaaatcatgctggttttgtattagcagataaaaacattacctaaaaaagttatacaatcttgcaactaatgatgaatttgagtcatgcttatccaaagaaacaataaactactctcactgcagtcccccaaataggaagaaagagagaaaacccagtggagctttctcttgccaggactgggagtggcagggcaacaaggaggtaagatggaatgactagatgagcccaaggcaggaacaaccaatcaatcaactctcagggctcacagtccctagaaatgaaagcacgtaaatctgtgggtcagaagagcaaaaaaccaaagtgcagagcaagagaagaagttaggaatcaagcaaattgttaagagtcccagggcagacagaagtagggagagtgagcattgcagttaacgtccataacacagaccagattgtgcgctcctctcttggcaatctataggtatcttctcattgatcacagaaccgagtccagactccttggtgtgaagttcagtttcctacttcatttatacccaactttcctttttaaccttatgcttcacctttccatataaccacacatagccacagaactcatggctttttccaagtaacagccatggaaacatggctgtttccaaaatatcactttacaataaaaagtaacacactttttatgcctttttcttttattgtttgctaagtctataacattatgttctccttgctgaatctctctgctgtttcctgctaaggactgttgaagtccttagcagataattggttttagtcaagtggaaagcataatttgatgactgtggttttcaccgtttggagaataataattaaaaattattttataaaacatatgcttggggtttacaaattttgaaatttgttttctaaataagatagcagtgttaaatagaataattatctcccatctccttcactgtaatgcatactttaagagctaacagagttgtaccagtgtttagatacagggagcttacagaatacttagggagggagctggggtttgatgagagtgtactcccacttcagcctagtaacctcaggacagttgtgaaaggaaggccttatggatcgatgaagtaggtaagcctacagaattagggaccacagttctcattgagccaattcactgatattcagtatcaacccacaacatctttgggggcttctgtattccatgtgagaaagaaatcaatggtgattttccctacaaaataggtgtaagatatctaggaacaaccgcatgtcaatgcattcttttttttaaatttattttgagaaatttttaaaaacgtagcaaaatagagttatataacaatcaaagtttctattactcacaattgacagttaacattgccatatttacataaatattttttgttaacaaaataagtgaaataaaacaatacagaaaaaggtttgttttttgtatcccatctctagttctatcatgaatttagagtaaatatttcatgtctctttttatgtttgtagttatatatatttatatatatgtatagcatggtgaacaacatattatttttttgtgtatttgaaagaaattaaggaggaaactttttattttattttttcttaaaaaaaaaggtatacatgagcagaatgtacacgtttgttacataggtatacgtgtgctatggtggtttgctgcacctattgacctgtcctgtaagttccctcccctcaccgccccacccctcaacagccctagtatgtgttgttcccctctctgtgtccatgtgttctcaatgttcacctcccacttatgggtgagaacatgcttcacaaggaaactgtattttcatcttgatcaaagaattctttaaaatatgaaatattattcttagcctttcaatttttacatgcaagttgtttagttattaagatacagctttggagtaatgactgggggcaggatggaagggtttagtagctgagcaaattctggtgtgagatgtagttactgtctgcagactcagtcctaccaaaggcatgtgtagtgctaatctccagtcttgtctgttccatggtcagagatgaccaataaatactgtttgtatgaaaataaatagttgaacttatacatttatattcagtatatagccatatatatatatatatatatgaatggcagttaaatatgtagttaaatttaaactgttttgcttggattcagatacatagttaaatgtatacatttatagtaatatacatgtaataaagaatatcttctagttatttatcttgggtagagtgggaaaaggtacagtactttttatgaatcaaagggccgttacccttctattgtgatccaataaactgtgttcttttctcacacaaatgcttgagatacttaactttggcatttaatgattgtgtttttatctatgtctgtttcctgttagtagattatgatctcctgaaaggcaaaggtagtatattttatttatgtctgtactttcaataataccaagggccaattagtcactgttttctgtcagagtagtcaattcagttcatgtaaaatgaagaaaataataatcatcagatttatctgtgttctgaggctataagggaatttaaaattgaaagcaattttaatgactgcttaataactttaataactggagcagcaaatttgaacgattagacaaaaagttaatgcgaagtactgatattatttaatttctctactaactatttcagaacaagttgtgtgtaccttttgaaataaactctagaaccgttaggtgagctgtgaagtgatatctaatagagatgggtctaagaaataggctcaggttctaagagaaaattgtcaatatgatattggggctggggttacagattaacagcatctcaaggcagaagaatttttcttagtacagaacaaaatggagtttcttatgtcttcctctttctgcatagatacaataacagtctgatctctctttctttcccccacaatttattggtaacaatatggtggattggattgtcatccaccaattcgggcagttctcaatttagaaatctcaatttagattatgttccaaatgtgcttcattgattataacttggagtacattttccttatagaaagaatggtataaatgatttccatattagcattcttctggttttgatacaattgaatgtaattttttctacattttttggagagtaagttaataatttctagcattttctcagaatatattactattaaaataataggaatgaaaatatataatcaagtatatagtcttttaacatttcattttctgctagtaaaataatatctagaattttatttactagtaaaatgaaaaaagataggctgggaatggtggtttacgcctgtaatcccagcacttcaggaggccgaggtgggtggatcacctgaggtcagaagtttgagaccagcctggccaacatggtgaaacctcatctctacaaaaattcaccaggcctggtggtgcacgcctgtaatcccagctacttgggagtcatgagaattgcttgaacccgggaggcggaggttgcagtgagctgagattgtgctactgcattccagcctgggcgacagagtgagactccatctcaaaaataaataaataaaaataaattttaaaagatagcacatttaaattttcagtcattgtacatttttagaaagtactttccccattaatcttaccactttggcaaacactagcaagtactgtgttcttgaaaatctactgaatagttcccagaggtaaagctagatctacctctgaaatattctgatttataatgtcctttaaagtttatctgaaatacaatgttttaggaccttatttatgatgtcagtgaaattttagaatatttagcccattttctttgctctaaccatgtaaatgttcttggtatatatttggaggaggacttaaataacaggaattgaaatgatgacaatcatagcttttatttatctgcttatgccagacacttaaacaacagccattggaggctagcattattatctctattttgtgtatgaggaaactgaagcctaggttaaaggatttgctcaagtcacacagttagggagatgctgagctgagatttaaacccagatgtatctcatctccagagcccgtttatctttgtactgcacctactgtcccaacagaaggaaaacttggatatttccaaatgctgcatattttgaaaaagaacttgggatgcaaatattaacattattgtggttttttatatcaaagaatgatatgatcacttctgggtagagtgattagagaagcaaggtataaactcttcaaacctaaatataatatttcatgcataaaaaggtggatttggagccattagaagtcctaccaaagtcaggttccagattctctctcttcccaattctgtttcatgctgaacttccttgttaagtggagaatggattgtaagctgacctgggaaaaagagtgagagcataacatgtttaacctgggagattaatagtactatggaaatagggaagtaagcctcattgagtcaagaaaaagcttttcaataactgtatgctggactttggggagcagtgataagcaagacctgaattgtaaagtaggagtgaattaggagtagtatagtgagataaataaacagggatgttgtggaaactgaaaagagagccactttactcctcacatcatgaatcataaaaaggtctctcagaggagataacgcttgtttcaagtttgtaggataaacaggacttagactaaaaggggagatgagcacacacacacacaaaaaaaaccatatacaaacaaaacagaagagtagtttttctgagtttggggtgcctcttgaatgagccataccgactgtaattcccatcaatgccttgcaagtcatgagagcaagaaattcagtgttcagtcactcaaattttaggaaacagttgactgtcttgtgatattttgaaatattacaccctgtcattgggttatatatatgttcatagggaaaacctattcaagttttctacactcgtagaatattagagtggccagcatcctcagagatcatctagtcagttccagttttcattcagccataacatttgctgtgtactagtcacaggacacatgaaaagatggaccttgccttcaaggaactcacagcctaagagaggaaataaacatacaaacagacaatgtgcaagtttgataaagtgctataataaaagaggtactgattaagcacagaagagagctcattaatttttcttgaggattagctaggtaaagttttaattaggtcttgaagaacctagaagagcagttcatttgtgacagggagggaggatatttcaggtcaggactgctgattatttaaaagggacagtttttaacatttctacctaagtttttcgatctggattctttaaataaataaagattatctaaaataattaagtcatgtcatggactttcttagttgtctattagtaatataaattagcctaagcagctggttctcaatgtgtggtactgggacccagtgcatcaacatctcctggaaacttggaaatgcaacttctcaggccccagcctagacctactgaaacagaaaccctggggtgtggagcccagcaatatgttttaacaagcctttaaggggattctgatgtatgctcaagtttgagaaccactggcctaagctaacagtaatacacagaattattgaaagttcatggactttgaggatttggagacctgaatttgaatctcacctctcccacttaataagtttgtgactattaatctgtcacctaatatctatgagcattgggattttcacctatcaagtgaaggttataatgtttccttcccaaaattgttgtgaaaattagttaatataatgaatgcctaatattatcactggcacactgtaggctttcgataaatggtaactgctttttatcatgattgttatctttttcttgatcttttttcagtgattacttttacttaatgaaaacgtgctcatatttttgcttttagattcaaacgctcaagaaattaaggacatttatggactaaatggacaaatagagcacaaactagctttcctgagaactcatgtgccaaaggacatgaaacttgtgctcattggccattcaataggcagctatttcacacttcagatgctgaagcgagtccctgagctcccggtaagtaggtctccagaggtaactgtgggtgctggactgtgtgcctgcacaaatcctcctcacctttcctatgttcttttgtctcttgttcagttgataaatagaacagagagagggatatttgctttctgcctttatccttatctccatattacgatgggcttatgtgaatgtatgttcataatgtttcaaagaataatgctgagggagataagaagtttctgaaagaatgcctttgaatctagggttatcggagttcttatgttacacattacttgctgttttttataaagaaatatttaagagcggtcactaggtaagacctagacaagaatctgtcttttgtgggaaggtattttgtaaatattcttgcctttttcagaaggaagaaatgtatcatcatcatcactgataggcaaacagctgtctttatggaacactacatctttattaattcataagttcagattcttacctattctgtatcttggcagcctttttgagacacatattcacaaatgcttgcaaatatttgttggataccactgtgtgccagatattaagtgaggcgctagagacgcaaagacctatttaaagtgcccaggaaagcaagtgaactataagagatataaaacaaaacaaaaaaattgtactttcactagcatataccattgaaataactcactgaatggatgcaattcacaagataattcatttctttattcaacaaacatatattaagccctttccatgtgtcagatcctgtgctatgttttgaggacatcccagagagtaagacagtctttgaagtaggagagcctggagtctgcttgaggagacagtctaaccaatagatgtgatacctactgtcttgtttcagttcagggggtgtgggagcatggagtgctggtaaacctagtaatctgaagccaagataggacgtgatcgcttcatggctgctttgtgctaggattttgactgtttctcactccgtgggataaaatatcttcagtggggtctcagagctcactaagcactcgctccttttcttgccagcttcacctgcttgcttcttattcgtaattgcccttgggaaatgtacaactatagcctccctcgctgtggtttttgatactaaatggaggttttaaattattattgggtataagaaaatatgtttttcatttctaagtgtgaattcaataaattcaagattgtactctgttctctgtattattgtctactgtgttgggtgttttttccctaaataaggtgtcttaatcagaatgcaggctttatttttccttttagcattttgcacagcttctaatctcttttgtgccttcgaagtctcctctagtactgtgtcatgtggttgccatctttatggtgtccagctctgcctcttagtggttctacttgcacagttgctgtgagttctggcagtagaatcaggacacctaggttccaatatttattgtccttttttttttttagtctgtctgatcttagacaagttattgagtctctactttagttttgagtctcaacctcagtttcctcatttgtaaaatggggataatatgttcttcaaagtatttttgtgaggaattatataaagcatcaagaatggtatctgtaactttaaagttccaaataagtattagctattattattattagggaaataactctagagtcattgtctcagtcattaggttaactattgtattaggtatctattgctgtgtatcaaattgccccaaaacttagcagtgtaaaacaatacacatttcttcactcgtagtttctggtcagaagtctggccacagcttagctggattctctgcttcagggtctctcccaagattttaaccaacatgtcttccagggctacagttttatctgaaggctttagttgagatggatctgcatccaggctcactcttgtggtttttgacaggatcccattccttgagagttgttggacagagagccttcattcagcagtggcatttggggggaggccaccttctttaacgtgtcggcctgtctagctgacttcattagagcacacctggaagaagagtcaaggaggcagacagcctgctagcagatgaaaatcacaggctgtaacccagttacaaagtgacatcccatcacgtttcctgtattcttgttagaatcaagtcactaggtctagcccacactcaaggagagataattacacaagggcatgaatactaggaggtgaaagtcactgggagctgcctcagagctgcataccccatcattctaaaattaggatttcacttgtgtgttgtgcagtcaagaacatggacataggatgtacataaattgttgcatttatttactggtgtaggcaatgacttggacctgtcaaataaaatgtagcaaactgacatgaaatgtagttatttgttgttagttgttccaggtgtcttaaacactttaaaaacattaaaaaggatacttgcatatttgaaataatagcattactgttctataaacataggaaagaaaatattcattttggagcccatcacagactattattaacttaatcacagatctgttttggtttttgtgtttgcttcagatctgttctgcatgtgatgtgtggtttctcttttgtgtgtttgaaaatgattgttcaatacattgtcttgaacctttctctctttttgggcccatattcacaatgtctgttgggaaagaagtagaatgcatctcaaggttaatgtgctttcttatagctttttcagcatcataactttctaattattgtcctgccttcaggtgtccttgcttttgcaggaatagtggtgaaaaggggaaacaaagatgaaacgtgaacttaacctactctatttgtggagacacaactcaaactgattatagagttttcagaaagatatgtgaagctgtgttttatcttcttaaaaagggtgtaagctagaaaataatgtgtgcaataaattgtccaaagggtgtaagctagaaaataatgtgtgcaataaattgtccaaaaggtcacctcttttggggggtaggaggggcagtgaacatctgtatgatttttaaattattattcagaagctttatctggtttcaattaactacattgttgaaattccctaccccatccccagcccccattaaacacctgggtcagtgaatattggtggtgtgatccctgccaaagtgttgaaatttcagtgtctctgggctactctaagacaccgcagtgcctgcatgcctgaagttagcatgacatgctccatttaagatgcatttgacaaatatgtttgtgtaagccagaatgttacaatccttaatcattttgccaaaaataagttagctattatgttttataacatatgaagtgtgataataagaaacttgtgtttccatctcttctgttattttttactggaatatttgactcttgtaagattttgaggacatatgtgtagtttagtagctagctggtttatttagttttattttggttcagctctttgtaatattttcataactaattataggcaacttggtcttaaatcattttaagagacttattgtatatgtcagatatactgtctgacctgtattttaatatactaaaaaaaagttgcccctttaaaaaaatctggcatttaaagttgtttatctaaacaaattccatacatagaattagagatattcttcatatattttgaaattagtgctcagtatagggaatttaaagagaaacttgagcaaataggtaattgaaagactgttaaatagtagctatcatgacttacaataataaacataattgtttttagattcatagaatcttagaactgagataggctttagagacaatctggccccatctttcattttatcagtgggaagtgagagaaaggtcccttgccagtattcagccttggctctgcctgaatctggggtggggcatactggtattagctgtgagtataaaaagaatccaagaaggtattgatggctccttcaacctgtggatgatagcagagcctatagctattacagtgtgccctgcagtgtacacaactgctaagttcgtgtgactcattgtgttggtgctccaagagtaggaaaccccgtgaatgctctagcaatttcaggattgtgtgttggggtggggggagaataatacagaagcaaaaaagtagtaatcttatctccactatctagaatcttctttctcttatcaaccctctatatgttaaaaatgtgtcacctgattttgccagtaaatctttttcataaagttcaagtttgggagttgagttgaaagcccttgattcttcactgagtcttggggtgaactttaattaatataactttaattttcctctaagaatttatataacctttaatgataacatgttctcctcttcgaaggatatcagatccttcacaaacttaattttttatattatttggccttctgtgcataataacacagagtttcctttgtcttctggttagcaaaaatgtcttctctctgaatgaaatttctggattacttaaactcactctcttaagtaccagactattttacccaactggataaaaatttgtctaaaatatattacttacttatctgccttcagcaatgcatattgactatagaggaattttttcttagtgatttaagggcagtggtaataacactattattttgatagtgttatgctagaataaaatgtaatcaaaaggaatgtgcctgtgtcctgaaatttcttaggtgataatgctttttcattttttaaaaaaaatgtttcatgtatgtctattttagtttttctatctcctctctcagtgttaagtacttcttctcttccctacttctaatttattgctactaatttgctgtgggcagagaaaaccagtaactacattataatttttttcagtaggaatgaacaggtcctaaatagataaaggagtaaaattgacagcattaaatgtgtggacattgttatcactcagcctttttttctcttcttttgagatcctcaaaaaggatgttttggggcattttaagtactcaaaattttagagactcaacatacaactatagctgagaagtttgcaaaactttactaaaagaattagaataacatgttagatcatatatgttttgattcaggaatatacctcatccatactaaggaaaaaatagcttcagtgttctccaacaatgagattattgagactgtggtttacttacactattctgctgagccttcatgtctgctgtcaaagtaagacatgcttgtaagaagcattcatattatgtcactcagctatgtttaacagttgagataatctggagggagggagaagaataggaaataactcatttgtcgtagtaaattttgtcagaatcctatccctagattcaagtgacaagtgacaagacacggaaggcaaaatgaggcagtactgtaaggctcagaaagttttgtggagagggttgtcttctacctgggaagctcagaaaaagcttcctggaagagcttcagggccactgaaggatgagttgtatctggaagtagaggattttatatggtggctagggggtactgtgcattctaggcaagggagacagcatgaagagaaatggttttcatcactgggcacggggagagggcagtgggtggtgtgactgggttgcggcagagtgtgcgtggaggggtcgatcgggcatgagattcaaggttgatagagatggacaaaaagctgggctagggagcatgggctcattttctggacagcagaaagccattgaaggatctctgatgatagcagtcatgcatcaggtaaattaatctctcagagaaaaggaaaatgagatggagatagaaaaagtgcagcataaaaagtgaagatccaggtgacaggaaagtttactagtccaaataagaaataatgaagacagtgtaagggataaaattgcccagggaaattgttgagaaaagagagaggccatagatgtgtatcagcggaatgatttcatttgccataaaggagtgttacaggatctttggggtgttgctgttctggccagaaacctgtggttggcggaatctttgcctgagttttgctcgggcccactgggctcgttccaccgactctgcctgacaggctatgctcagctcatgctgccggcctggatcctatgcctccaagggagactagagtcaggcgtggagtgatgaggggtgtgtgtgagcgagtatggggtccagccactgcacagtcagacatgctggctgctgccatggggcaggcagctccaggtgccagcatgggtgtcagctctctgtgaggctgcagctggaccaggcacactgtaagcagcttccccagctggcaccagggaatgcggtggcacccagaagcttagagactccaggaaccacaaggccccaaagagggagtcacagctctggctcagggagctcccaggtctgggctccctgaagtgctgcagattttctctccttctcttcactcgcaacatggcgagcagggggcatgtttcagctttgtttgtgttacagcagctcttttagcctcgccactcatcaggtcctgagttcttgttctgcgaccaggaagaatgaggtttgcagacatgcagagggtgagcaagacagagaggagctttattgagcaataaaacagctcagagaagacccgcagtggacagctcctctgtgtagccagggtgtcccagtgagtgttcagctcctagcagagagggtagctcctctctgcagctggtcatcccatcctgcagctctcagcagagaggaggccctgtaggtggcttctctgtgcaggcaagtcatccctttgtctggatctcttggcagagatagtagctcctttctgcagcaggtcatcccattgtctctctgtcctctgctctgctctggctgagcccagggcttttatgggcctcagagagaaggaagtgcccactgattggtccatgggcagccaggggtaggcccagaaagggcaccacaagtcccctactctggtccctgggactggcagcctggcccctagccttcaaaccctccctggcctgcaggtggggcctcaccggagatcctccctcttctgcccagtggcccatctgcctcctgccagcatctaaggcacccaggttgcttgtgccaaggggcacctgcaggccagtgctgagccgccctcaacacaccccctcaatttcccctcatgcttgtcagcacccgaagtccagaggggactgaggtggcagggagctggcatgtcagtgctcctcaagtgtgtgcacacccagccgggctgtgacagtgaccaggcttggccccaaccctactccaagatcagagcgggcaccaggagcagggagaggtcatggagtggagcaggcctctccaagccttcaagggcaagggaggggggacttcccaggcccccaagggcacagagaggcctgggtccacagccttgtcttgggctgctgcctgtttctggctctagtggctccatggagcatgaagcccagctgcaccccctcacagcctggggcaggggctctaggtacttgctgggcccaggccagtgtcagggtaggggcaacatctccatgagctcccccagtggccctggcattcaggggcagctgggagctccccctcgcccagattgtggccctgcccagtgcgcacctccaggaatggattgcaggccctggtctggccgtcaggagtgtcaggcctggtggtcaccctgatgcagggcagaccctggggacagagccctgggcggccctgcgcagagccccctcctgaggcacagaaaccctccactgctggccggtccccgaagcaggcgtcacagtcagctgcctcaaggacgtggggcacaggggacccaccaccgccattgcagctcctgtagccacttctgctgccaccgtctatgcctccccactgtggatagccccctgctgccatcaggaggggaaagaggtggaagtcacagaaagaggcagaagatataataattttccaaactattggctgcaatccattaatggatcccaaaatcacttcagtgggttgcaaccagtggatcagtcaagacagtagactgtgctataataacacaatgtcagtggcttttaacaacaaaggtttgtttcttactcatgatacaaatcctttgagggtaggctgcccctatgaagatctctctatgcaagctttctccagaatccagattgatggagtagcctctgcctggaatattcaagtcccatggcagaggatataaagtgaatagtgaaccacacctacattttaaaacctctgcctggaagtgaaaattttcactcctcaaattttattggacagagcaaatcatatgaccaagtcagccatcaatgaggctgtgaagtacagtcctccccagagaatggaagcgtctgtttgtgaccaatgaaacagtgtttttaaacaatgtataataaaatcaagtaaaatagaatagaataaaaatatattgcagtaaaggcatgtattatgaaacttttgtttcactttgtgtgtgtgttgataacatagtagattataatgtcgaatgtatatcttactgtgagttaaggtaaaaaaaaaaaaaagtttgaaaaccattcatctggactagagtacaccacagcagctaagaacagagcaagaatgtcaagaaaggggtagatatatggaggattacagatggccacagatttttttgtcattcctctcaagaaatgaaacctgtttcccttcccctttaaatttaggccaagcatgtgacttactttcaccaataagatacagtggaagtaatgtacttctggtagcttcaagtccaggccttaagaggactaggagcttctatttcctccctctcagaagccagctgctgtgtaagaaagccgactgccctgagaccacgaggctgagagaagcccaagctagctacgtaggaggatcatgaggcaccaggcctgagtgaaaccttctcgggtcttccagcccatctcagcccagcccatccgccactgaatgcagcccaatgagtgaccccagcccacaccacatggagcaaaagaaccatccaactgagccctatttgaattcctgacccacagaattgtgagaaagcaaaatcattgtgattttaaaccataagtctagagatgctatgttatatagcagtagataatttaaacaaggtaacagggttgaatgtaacaaatgttgaaggcttcaggcttctagagtaaaaggttcttggtgtcctcgaagacagacttttagtgaaataatgggacaagggggttgcaggaagttaggtgataaatggatagtgattccactggccagtgaaggagaagaacacataataatttaaggaagaagctggtcaagggaactttttttcctgtaagtaggggagaatttaacatatgctgagaggaacagcccaagcgtagagagatgtcgaaaatgaaagacaaataggaacttttgttggaacaggtttccttccatttgtcttttagtctacatacttgaaaacttggaaaatggaatttttcttaatatttatgtctttgcaaaagtggtttaccccttccctggggtgtagggggaacatatattacatatttggttctccttttccatctagaaaaagtctagctcaatttttaaaattgatgttattgtcattactaacagtgattatacctaacattcatttgaaatttataaaacgtgttcacatgtaacaaggtattttaacaatctgatttttcccatcttaaagatgagaccgaagtgccaaggagccatgtgtccaacccatatgtcaactagtagaaagtagcagagctgggactctgtattctgttttctaactttcccactacctgttttctaggtgagttagagaggtgatgattacagatggttagactaagttgctttcacaaatcaccaaactatttggcctaaacttaagatttctatttttgcttttttaatatttgagttcttcaaacacacagtgagtgttttagtaggaagcaggtgaatgcattgggaggagttcagagagaactgagagaaatgacagcatgtgtgagtgttctggagcataggagataaagagactgttgaggcctgggccaagggcagaaattaaactgaaaagatagtaaatcagagtcctagaattgagctgggaacagaaggactatgaaggaaattggaggattctgcaaacatagtgcatagtagtttgacagttacctctatgtgacccattaataaatcctgctgcgtgaaaaacacaggcttagacaatcagcacctaactactctgatttctgaaagattttccatttcagaaaaccgtaagtctcttactctaagtttgtattgtagatgatgaaatgctatttttccaatcacttatgcatttatttaagtatatatgtatctgcatatttgtgcgcacacacacacattatcttttctgagttacccagaataccttgctaaaaactagacacatggacagtttcaacttttcaacttcagccatttttagttatctgtgtatttttttaaatcctgaaattgctttcaaagtggaaaaattgtgtgggcttttttcatcttttcataactcaaaaacgacttaatatgtttttctcaaactttgcaaaaaaaaaaaaatcacctttgggctgaaaccaagcatggaaaatttcaccacaaagggctaattttttggaaagctgcaagaaagtgaaaacgggtttataatagaacattcttcatgcatgttaatacttagtactttatctaatgcatttcatctgagaatttctgaacacttttcagatttaaatattgagccattttaatatttgtgtaccaatgatatattgtcagatatcgaaaagttcccccatcctctcagatgtctaatagcttgggaattagtgagatgtgtttaaaatgacaggtggggcaaatgaagttaagtggctgctagccagagaaagctgtatatttactgcccaacacattttatcactacctcttcttggcccaggagtactgtagttgtaagtaaaatataatagatgacactgggcactaatttgaataagccaacatgtctcaaagtagtatcaacagcacctgtgatcttgttagaaatgcaaattcttccccctcttcaccccaaggggtggggctcaccaaccagcatttaactagcactgcaggtgattctggtacatgcttaagtttgagaaccacctacctaagctttccaaaagcttggaacagaatgcattgaaatgctgtggacagttaaatctgtccttggtctttctgtgatgtcagctctgtcttctcatatcccttggaagcaggaggaatatgaatcaaattctctgaaggaaaggtcttctgtgttaatgtgctctagttctttccacctatgacgttgtccataaacacagagactcccttgagtaaatgtgctgatatcagcttgttcagggtaacagcactaccaagatgtattttctcatttccttgaattattagggtcaaaactgaaatgggactataaatttctttcttatttctttggaatcttttaagttctaagatggtatcagatgtgtcagtggaagttgattgaagctctttggtgtgtaagttctcaatctgacgctttgcagtagacctctgcatttcagcaaactccatggtctgtatttttgtgtcttcaggcacggaaatagttgtttacgtggcattgtaacaagttttgaaaatattaccctggtgatggaagtcactagtctgtagtatgtgggcctttagctaatccttttagcttaggttaatttcttacaataaataatttgtagaaattcataaaaaggacagcaagttctcaaagatgcaaaggatgtgaacagataattcactgaagaactaatatatcaaaaagtgtgtgcctaccacaatgtgtgatagtgtttaatgaattagtatatagtagtatacttaatgatgtctgtttatattgagtatggtagtatttgctaatgttcatttgatgaatgaacctcaacagttatcaaaattaactattactattacatagtctaaaagaaaagttgtgttgtgtatgtgtgtacttcgatatccattttaaataagtttgaacaggtaaataccaggtggcttatagtagttttctctggtggttaggggtaaaggatgtattggagtgaaaactctacattgtttctgcttttctttataatgaccatgtattatcagaaaaaaataatttccattaaaaaagtattcataccctttgaacctactaattcttttttttggaatttatattaagaaaacagacaaagatagaaaaaatcatgtgcaaaactattatctattataacaaaaaattggaaacatcctaatgtccaaccttaaaggcaaggttaggtagagtatggaaagtacagccattaaaattatatttgcaaaagacattataatacataaaagttaattatagaatattaaggatgtcagaatacatagagaatgtgtgaatacaactgtataaaaatcacacatggaaaagcttgataattataaaatgaatttagtggttgtatttaagtggtgagtttgggttttttttttctattttttatttttgaattttctgtaatgacatatatttattcactattatagacatttaatggtcatgcatttttctctctctttttttttcttttaaggtgatttgttcatgttactttagagcagaaagttgttccaggatagatcttttttaaaaatttaattttggattcatagggtacatgtacatgtttattacatgagtatattatgtaatgggggggattgggcttccagtgtaccagttacccaaatagtgaacattgtacccagtaggtataaattatgtttgctttgtatattgtcaagttcagtgcagtccttcttagggctcaagttatcctacagggcccatattaaataccaaccttcttaagtccttctgggtacaagatagtttataaatagacaaaagaacaaataagtcattagccaaatgtcacttcctgcatgaaaactttgctgattgctccgatagaatataacttctgctacttttgggccaatgatattgtctcctgtagcttttctgttgtggcttgtagcttaagtgtaatttttttttatagccacaagaacaagagctggcttgttttctttgtacccttgcaagttctagcatagggtcttacacatcccaaaaggaagacatccattttttttttcatttaattaaattaaactatatgaaagttacatcagcagcttctgctggtaaaattctcacttggttcataagtgccactgacttcttctgttcatacagattaaccactgcattgaccttaaggaaacagttgtcttgttcgacagtgaaagagaatacagatcagcagcaagagttagcagctatatacatccaaaggagcaatactaattcagcttctataagatagaattgaagaatattattatggtctcggaatagttgaagatttcttaaattggatagcacaaatgtttgtacaaaatactgctgtaagtgaaaggaaagagcttaggggtgtggcggacagactttagggtgggtggcaccccatgatcctcacctcctaatgttcattcctacacgtaatcccctccataagtggatatgactgatgacttgcatctaaccaacaaaatatgataaaggtgacagacaggaagcacatgattatgtgtatgtgatttacatacctaagattgtaaggcctgtcttgcagaagtctctctcccatgctggctttaaaagcaaactgccatgttgtgggttgtctatgttgggcggcctatatggcaaggagttgcaaggggccactagaagctgaaagctgccttccgtcaacatccaacaaaaaaactgaaatccttgatgctacactacaaagaactgaatcctctccacaaccttagtgatttgtatccttccccagtcaagcctcagatgagactgcagccctagctgacaccttgattgcagtctggtaagatgctaagcagagaacccagctaagctaggcctggactcctgatgtgcagaaactgtgcaatatcaagttcgtattgttctaagctgcaaagttttagtaatttattacatagcaatagataacaaatcaagaagaaagtaaaagggtaatagcaactccttgttttctttgcaggaaaacccacctctaagaccagtagtggccctaagttagtatcagcattgtagcagtagcagctagcctagccttttcccctgtcacttttccctgcttttacactatcttacccactcttcctactccactcaattacctagacttttggtcttccttgcaatttttttattaacattacttctctccccacctcaaaaaaaagataatttgggttgttgataagcatgtcttttgatagcttgcctggtgattatttgatgtaataacaaaatcacaggttgggattcattagcatcattcatcctactctaggttgaagcagatcttatttgaaagtattgccatattcaaatctcatctgaccaagaggttaatagtggtaggatattgagaggccctgtggtatgagagagtggcccatgctaaggcagaggtgatacatttgtgaattcccttgcatttgtgtggatataggtctgaaaaatgtcgcttgtacctggccacactgaagccttgttcatagaagagcacattcatagagcctcagtggacagactataactatcagagaagacataacagggaggggagtggaaacagatgaacaacattctgtgaaattgcctctttttggcttttgtttagttcagatagaagcttctttctaggtctgtttgtggagatgagaagtatgattgtgatctttaagaaaggaaaaagctctctaatatggttaaccagcatgtatgaggttgttttacgctcacttccagcttgtatggaaaatctgtgaacaatatgcaatgtaggccacaaaaaatttcctgaaatggaaaaagcctagcaggcactaaatgaaagctaggcactaaatgaaagatgcttcacaagaataaaatgtggttgctttgagatctcacattccaggccatttcagactaattgtatttgtttgggaagaagcaagattgtcaggtatcaggaaggtgtattgatacataaaagatggaagccagcgtcatactgcaaacctctccctaggaagccagacagtaaatcattttccagggtcagtcatatagagaccagagggagcatgcatgaatgaagacacagtctagaaactccatttcaacaaatagtttctcccctcaccagtactgttatgggagcttctgcaaaaagccaaattgagtgttagagattcagccttttcccctttcataatctactacccttaggaagatgctgaggagcttcttataacctcttacaaaggagaaagtctctgagagcttcagtaatattatattaatgtcaatagacattttttcagaagagatttcataaaaacttaaggacatattctggttatctgggtaccaggagggttctccttaaggcccttgtttccttccgttcatagttgctgtgtttgccttacagtccctgcacttagggctccatcctgactttataatttctcattgtctagatatatattttcctatctatgtgcctttgttgagctacttcctttctgctttgtcccacaccatctaactgatgcctcctgttcttctggaaaatcatctcaaacatgagctcctgtgtgaactctttcctgattcttcccagtcatttttactctgtccttcctttggtaacactttttctcataattcttctatattctaccctatattataggcattgcatatttctttgatttttcctgttagatgtttcagctttccttttaactagagcataatctgcatacagtaactcttttgtttgtctccctgcctcgttctagatatttcttctgacttaacattctacttcactaatcctcacttgagctatgtataaacacctttaaactcatctgttacatcctcaattttagttattctattttttgcctataaaatttccattttattgttataattactaattcctgcaaatctccatcttgtcatttaatatcttgatcatattatagttattttaaactccctatctgactttattctcctttgtaccatcaacaatttttaaaattatcattacttttataaaagttcagagatcatatatttgacatgaaaataaataaagattgtgtctgataattccaacatctaagtctcatgtggttgcattcctacttcagctttttcctttgctttggttatattatcttgtctatccgtatgcttgtgtattagtccaggtttgccagagaaacaaccaatgggatgtatgcacatggaaagaggtttattataaggaattggctcacatgtttatgggggttgacaaatcccaagatctgtagtcagcaaactgcagacctaggaaagccaatgatgtaattgtagtttcagtccaaaggtctgagagccagaatttctgatggtttaattccagtccaaaggctggcagcctcaggacccaggaagagctgatgtttcattttgagtctgaagacagaaaaaaaaaaaagtcctagcttgaaggtggtcaggcagaaggaattctcttttattaaaccttttggttctagtcagaccttcaactgattggatgaggctcactcacattagggagggcaatatgctttactcagtgtaccattcaaatgttaatctcagccagaaacaccctcacacatccaaattgtttgaccaaatatctgggcaccctgtggcccagtcaagctgacatgtaaaattgaccatcacagcttggcaagtattttttttaactgaatacctgacattatatgtgaaaaattagtaaaacaatattagaatcttatcttcctccagggaggatttacctttgtttttgcaattattcttagggtaggtcactttgatgccattgggaattgggttgaatcaaagctatctttggaggggctggcctatttccagttcatcgttacttctagggtatagtcctttaatagtttccactgaaagcctagagtgccttctcttttatgggcacacaattcccaggtttttccttcaagctcacaagatttttcagaaactctcttcagcttcttggcttcttagctactgcttgcaaatcagcaaataacaaagaaaagctacttcagcactcctctctgaagttcctttttccctagcattttagccttcaaatctcctctgcctctgatgccttcaaggggactttaaaaaactttcccaacttttctaattgttcttggcaaggagattgctctccaacaagatagcctgccatcttcacctcctatcaacaccattagcagctggtgctgagctttaagttcttccagctctgctattgagaagtatgtcatttcaagtttttaattatttttgtgaactgttttcttcctctggaaagttttagaatattcactttattgtcagtattatattttctgatgatattccttggactatttatcctttttaatccagaaactggcatacttacacactgaaaactcttgtatttttttctctacttgttttctcattatttgtgtgttatactttcagaaaagattttcttgatttattttcttttccattatccatttctttcaatttttagttttttgcaatgagaaataggggatattttccctactttatcttccaattcatctaattaaacttttgattttggcatctatgcaaatagtttctaaggaatttcttgttcttttcttcctttttgtaatatcctttttatttttacttcatgggtctctctttctctctctctcaggaaaacattttttagagtttttgggctcctgcattgtctgtattcattctgaattcctttcttcatgcttttaaaaaaagtactgatctgtctcttgtaagtgaagctttcctcaaatgtctagtgcttattcattatccactcatatttaagaatgaggcaccaggctgggcacggtggctctcacctgtaatcccagcactttggaaggccgaggtgggtggatcacctgaggtcaggagttcgagaccagcctgaccaatatggtgaaaccccgtctctactaaaaatacaaaaattagctgggcatggtggcgcacacttgtaatcctggctacttgggaggctgagacaggagaattgcttgaacctgggaggcagaggaggttgcccggagccaagaccgcgccactacactctagcctgggtgacagagtgagactccgtctcaaaaaaaaaagaaaaaaagaatgaggcaccaaaactatcaggaggttttgtatgggagtgggtttggtcagctggtcagctgtactacagggtaatttggacaggtatccaactttttttggtgtggtattctccagtgtacatattttttctggagccattaagtctcttcagaaaaacattttcaaaccacttatctaacacacagcatcctgaagcaaacagctcaaggagctggagtttgcatgggagaatgtcttagcatttagtattttggctttcacttatattgtttttatgatgttccttttcccctgcctttttctgtgccctgtgtctccagatcaggagcctctttcttctatttctacacagaataaacctccaggccatgatggggttatggagaagttgcttgagggtattggatgaggcaagtgtcccaggggactggctgcctctcagccagcctttcattcatcaagtctgctctgtgccctgcactgttactggcacctgttatggtcttggatccatctgtgaacaaaataggaaaagaaacaaaaaacaaactgcttatgcagaatttacagtttactaaggagagatggtaataagcataaaaatgagtaaattaatatgttcaaaggtgatactgccttgatataaagagtggagcaagataaaggggattggaagcaccatggctgggggatagagggcagtggtggactgcaagtgatttttaaaactttttatttggaaataatttcaaacttagagaagagttgtaagactaagaatagtgcaacaacatgagatacacttttaccagatttacctgttgttaatattttacctcatttgctttatttgctcccctacacacacacacacacacacacacacacacacacacaaacacagacacacaatatttcttcttgaaccgtttgaggataaattgaatatattattgccccttatccctaaagacctccttaagatgttcttaagaataagaatattctcttaatcaaccacagtacagttatcaatgtcagtaaatgtaatattgatgtaatactttaatctaccttgcatattcccattttgtcatttggcccactaatgtccttgatagcattttccctcttccactatggtctggagaatcaggtattgccttgaattttcatgttcctttattctcctttagtatgaaacatctcaagcatattcctttgttttttcataaaactgacattttgaagaatataattcctttttaaaaagagattatcctgattttgtatttgtctcatgtttccttttgactagattaaggttttgcattcttagctgtaaaataatacctcataggtgatgctatgtccttctcagagtaggtcacctgcaggcacatgacatccagctgctcatcattggtgatattaatttcaatcacctaatcgagatgttatgcagaatttctccactgcatgctttactttttcttttcttttcctttttttttttttttttttttgtggcgagggtagttggagtcttgctctgtcacccagactggagtgcagtagcatgatctcagctcactgcaaactccacctcctgggttcaagcagttctcctccctcagcctcccgagtagctgggattacaggcacttgctgccaggcctggctaatttttttttatttttttagtagagacgggtttcaccgtgttgcccaggctggtttcaaactcctgagctcagacaatctgcctgcctcagcttctcagagtgctaggattataggcatgagccaccgcgcccagcctgcgtactttactttttcttagcaatgaataaagagtctatggggaggcacttttttttcatgtcaatatcctcctcttcaacgaaattttctcctagattcaacatccattatttatccttgcctgatccaatctttaccaagattttctaactgtagtactttcttcacataaacccattagaactcaatattcttttataagcaagaaccttccttcttatgtatgtttaatttgtatatatgtatttatcagcatggacttatgaatttcggatttattaaaggtatatgattcattaccatattgattttggtgataaaattattccatatttggccactgggagccacttaagtcgggctcctgttgtaactgcaattttaagcaagatgtttattaggcatcatagaagtgacctgctggaggtagagttagccacatggctatctagggtacaagggttctaaacagcagaatagttattacaaaggctttaaggccgtgagtatgcctgtttgagaaacagcaaggccagtgtgactggagcaaagtgactaaggtgtgaagtaataagacagggaaactttcattgcatttgccctccccacactcttctatatcctgtggtccagaagaaacattaaatacacccttatacccaccaacaaacgaagaagtaaaaactgccattaagccaacttcttgaatttattttgtatgttgtaaaatccagatagctacatatagatgtgtactttttgaaaatgtatcccatcagccagtgatagttgtatttccatggagattattccagtcgcctgtatttgaacaattatacaggatctgactgtaattagaaaaaggagatgggcccaagtcaacctagtacaagtttggatttcacattttaaatcattggttaaataaaaacaaagtgaagatgaaaatgtttcttttgttaaaaaagataagaaaatataaaattggagcttttattaatttatacatgtctcagagaaataatagtcacagagaagtagcagacagtggcatgcacttattagcttctcacattattatattacactggaaacatgggctgttactgtacagtgaaactagagtttaaggtggagaaccagattgacctgatgcatgtgtttatgagtttcacattgaaggtgcctggtttttgttgttgctgttgttgttgttgttgttgttgtcgttgttttctctccaaagaatacagcttagaatgagtgaggcaagctcaaatcatgtagctgtaactgtcaacttggtgaatttctgagttatcagaaagtgagactctgggcatgatgaggccataagtcagggaatatcagcaaccatcagaagctggaagaagcaaggaatggattctcccctagagcttcttgacacagtgcagccagggcatctttatttcagcccagtgatactgatttggcctccaaaactgccagagagtaaatttttgttatttgaagccacccatttgtagcaatttgttacagcagctgctggaaactactacattgccattgacacttgatcgctatttcagtacgaagacctgtgtatctgtcttgttcagtgatactgatttggcctccaaaactgccagagtgtaaatttttgttatttgaaaccacccatttgtagcaatttgttacagcagctgctggaaactaatacattgccattgacacttgatggctatttcagtaggaagacctgtgtatccgtcttgttcagtttgggggaaactttcatgcattatttctgtcatgttcccttccctccctccctgtcttttctttctagaactcacttgataggacattagttttcctgggttgggtgtctgattttctttccacctgtttatctctatgctttcagtggaatttttttccactcagtctttttcactgatatttttaaattgaagtataaatttttttttttaaatactactgtcttgaccaggcacagtggctcatccccgtaatcctagcactttgggaagccaaagtggaagaatttcttgaagtcaggagttcaagaccagcctgggcaacatagtgagaccctgtctctacaaaaaatacaaaaattagcctggtgtggtggcgcacacctgtagttccagctacttaggaggctgagacaggaggatcacttgagcccaggaggttgaagctgctgtgagctgttatcattgccactgcactctagcttgggcaacagagcaagaacttgtctctataaaactaaataaatttaaaaataaaaaaagaataccactttgtttactgcgtgtttcttttatatcccactcatcattgatacagtattttctcttagctctaagcaaattacaatttcgtctgattcttcattgtcttttcctctgagttttatatttgttgtgctgtctttcatgttagaggctttacctaatatctgtcaatctgttgtttctttatagtaaggaagtttttccccctgaaatcaatggatgaatgggaattatatttttaagttattagaataagttaaaaatgtgtaaatagaataaatgcatttgcagggcatttactctcataagactgagggagagcatatgtgtgtattgtggcttattgttacaactatctcctagattcattgaagatagaagttacgtttgtttcatagtctcctcattggcttgtagcaatttttcaaaagaaggaaggaaacatttttaccttacaataaaagtctgaaaccacatattttatggtgatctataggaggactaactggaaccagtcacagggtactgtccctaacagaatgtgcatctttcatgcagtaattatattttactagtggaaactacattccaggaaacctttacataaaggttttacaatgttgaaaataaaagatatgctttttacctttaaaaagaaaggtggaacttaattgagaatattatagaattatttcaaaatcagactgcttttaaaaaaacttcaacttttattttagataccgggggtacatgtgcaggtttgtcaaacgggaatattgcatgatgttgaggtttgcgatacagatcctgtgacccaggtagtgagcatagtacccaataggtagtttttcaatccccccatcctcaagtggtccatagtgtttattgttcccatatttatgtccatatgtgctcaatgtttaacttccttttgcaggtgagaacatgcagcatttggttttctgttcctgcattaatttggttaggataatggcctccagctccatccatgttgctgcaaaggacatgatttcattcttttttatggctgcatagtagtccatggagtatatgtaccatattttctttatccagtctaccactgatgggcatgtgggttgtttccatgcctttgttattgtgaatagcacaacaatgaacataagtgcatgtgtctttttggtagaatgacaaagttagtctttgatttaatggtgacaaatgtgcttaattacttaatgcaaactttgctgtatgcatttgaaaagcgtcagttagttctatcaattggaaatattagctgtacttactgaacaactgtctagagccattgagttaggtgaatttcttggttactgactaacacagagtatatgatcctcagtttcatcatagagcatattcagataccgtggaggcacttttgatggacaaaggctatcagcaatgctatccagtcccattagggaagttaagagtctccccagagtctgttgtcctttctctgagctctgcagaagctgagacctcagaagtttagtaaggcagcccgggcacagtggctcacgcctgtaatcccaacactttgggaggctgaggcaggtggatcacctgaggtcaggagttcgaaaccagcctagcctatgtggtgaaaccccgtctctactaaaagtacaaaaatcagctgggtgtgatggcatgtgcctgcaatcccagctactacggaggatgaggtggaagaattgcctgaacccaggaggtggtggttgcagtgagctgagattgcaccatggcactccagtctgggcgacagaatgagactttgtttcaaaaaaaaaaaaaaaaaaaagtttagtaaggcagacgtaaaaatcaggaactaaatttcggttattgctgagtctgggagataccatggtaccaccaggagggatgctacccttatgaacctgttctgtctgggagtaaatgggaggaggaaacccccttcagagacctgtgaggaagaaataaacatcagatatgtcttctttcctgaactaagcaggacagatcctaacctgttctgttatcaaagctgatatggggacttatacacttcagccatttgggcctaaccttttctctgtgagttaactgcttatattcccaaggtttagtctctatctcatggggtcttagctgccctaactgatggatttgcttcttaccacataaaattgaacaagaaagctgtactctttgccttccagttgacttcctagacgctgagagtgtcctggggcagcttctgtggcagaaatcccttgtggctggggctgtgctgtgtgccctatacatgcctctggctatgggcctttgcattatattattcatccttggcctgaaaccctgtcacggatacctttgcctcatcttagtactggtataaaatggcattttagtatatggaactgaagtatacatgtttcacaatatcttttagtaaagttaaatagggaataatttttttactggtttcactgaataaccctgtattctatcatcagcactttgcttgtgtactcagtgtttgtcaagaaaatttctttctgagctgcttttcaaaggttccttgacccttatagagaagaaattttgagtgcctatttagtatgtttctattttactcttcatttcccatgtcctgatacctctctaaatatctctcccactagactttatgatctctgaaggcagggactttgtcttgtcacccctgtgtctccagcactcagcacagcacctggcatactgtaggtactcagtatatcttcatgaatgaacaaatgaacaaatgaatgaacaaccagtagatctaaggaatggctccccctcccagtcatgctaggcctgcgcttttaaatattggggtttttaacttagaacagtcccagtgccattgccaaagatagtggtggggtgtgtgtgtgcttcctgacccatacatagcactccagctccaactttatgccaagtagcagtttcttgatcagcagagccatcctatcacattctgtgtagctttacctctaggaaccatgagaaaggcctgttattgccaaaggccatagtagtcatgtgagaattttgtagctatagaccttaaggtttgctattcactattcactgaattctgaggctacctggagaacactgtttaattcaaaataacaggtgcttcctaagagatagttgtactgcagagcagcaggtaaagaataatttgcagtgagcctgtgagcatcattgttttctgaatgagctgtcagtgattctaaatcagaagagcccaaaacgaagtggtttccacaagatttcaagctgaggagaacagcattttgcatccaaaataaaataagtgcagagaatataaaatgataaaagcttgagaagaatgggctataggaagatattgaagctaagtttcaggtgtttgtgcagttataagttatgtaaagacctctgcaaatatgcaaacattccttattattaacaaccgtgacatgaagattaaaagtattaaatggctttttttttcacattcaggtaattaaagtgtagaaaaatctctgccccagaggtctgaatataattcacatgaatggaaaatggcaaaagtggttagtttcttgagtaccatcttaactgaaacatactaaaatggcataattttgtttcagtaatcagtagttgaaagatctcatgctttacttcttaggatatggatttaattatttctggagctaaatgatttgagacacttgtaaagattagcccatatctaacaataatagtagtaattggttcaaccataagaaaattgcctccaaacaataacaattacaaataacttattttgtacgtaaatatatagtatatataaaggttaatggcatggattcagaaatcatcctgctttaattcatatctctgtcactttgtggctgaacctcagttttctcttcagtggaatgagggaacttcataaggtttttatgtgtattaaatgaaacaatatatataaagtgcataagtgtagtacctagaaaatagtaagctatcactactactgttaatccaagtacttccctgcgaggcatattcttatctttctgacatatgaagtttttaagacagagtagaaaatctcaaaaagcaaactcttgattaaaatataatggcatttgcagtttataaactgcatacttagtaaataagcttactaagcttgtgtttccagtgtgatcctaaggagaagaacacatggccttatgggaagaggagataaactaaactaggattacttctagacctatgttttgacagctagcaagtttatctttgaaggctgtctggttgacattgcatgttggctaagacatgccttacaaatattgcagtcacataaaaagagaaactgtgtgctatttttttgtttgttttctgcttgtacggtggagaagcaccctgccataaatacattgggtgggttaaactaataaacaaataggcagggtggcagtgataatgtttttttgaagatgttgaagtactatttgtcgcagcttcacttagtcataacacataggcaccattgctgctctcccagaaaaatggatgcatctgtaataagctatataaacaggtgaagtctttcaaggattttgaagatttactgtttttttaaagcctatttaatgaaacaggttgtgcacaatccacacctaagcaccatacttcttaccttgtggccatacctcaaattgtttcttagctccttttctaaaaaatgattacaacaataataataaattcaagaaaaataagcatcaaaatactttcctctaacccctgcaaatgtatccagtataaaaattcccagtgtgcatatttaccttcctgtactgttcaagaaaacacggttgtgcttcattatcaaaagttcattctggtagataacagaagagaatgtgaaatatgcgaaaatgttttcttaggatagaatgaattggctaacatgggagttctttttttaatgagatagtaacataagaaaatgtttggtcgtgtacacagatttggaaaccttcaccacacagctgtgttatcaaattaggcatacttccttgacttaggtgatttttttttttaccaatatgaagaatgaaaaatttttattactgtgatttatcaaatttggactgcaaatttcattgaaattatcattacaatatctaggaaaagtgtcacccagcaggtaataattgttgttctccaaaggcaagagaggaaaaccagtctcatcaactaagtattagttgtgataaggtctttggtcttcttatatttttacaaggcagtgacgcattcaatgtacatattagaacttccttattgttttggtccattcccattatttcagactgcattttaattctcaatttgttattgatatagatcaatcaaatataaccctgtggttgcttatatatttttagagtttcccttacatgcagttttgcttaacatgggtcacagtaaaggatcgtttataaaagtaatggattgtttcctgtttctgccagctgatttgatcaatctgaagttccttatgtactatgggttacataaccagtctggaatctgtgtggtacattcttctagtttggtattaactgaattaatcatttatattctttaaatcattgaggacattttagtaaacacttgaactgctctcttcttcaagtactctgctccagcaatactgttcacctggctcttactcaaacacaccactttagctttctatggcctctgcacatgctcttccctctccccacaaaatttatttttccaagcatctcttagctcaccccctaactgcctttgcacaaatgtcacctttcatcaaagcctttcctgaacaccctatttaaaactatcccaccacccctagcaatttctagtcctcttttattattttatctgccccgtcataggacttgtgacttactaccatcatacatatttgattcaattattatttattgcttaaattgttatgatcatttattataaatcatgtattacagctaattaacatacatatgctcagtcatttacttgattagttattagcctcaattatatcttattttttaatatatatttttatttgacaaatagaaagtatatagattggtacaatatgatgtttggaaataagcatatattgtggaatgactaaatcaagctaagtaacttatgcagtaccttacatgcttatcttttgttgtgataagaacacttgaaatctattctactgtcttagaaatttaaaaatgggcaaaggacttgaatagacatttcttcaaaaaaaatgcaaatgaccaacaggtatatgaaaaggtgctcaacatcactaattatcagagaaatgcaaatcaaaaccacaatgatatatcacctaacacctgttaagatgtctattagaaaaacaaaatgtaacaagtgttgataaggatatggagaaatagaaatctttgtgtgccttgtacactgttgcaagagcattagtagaactactttggaaaactctttgtaattatctactaaagatgaatatatgcctactatatgacccagtgtttctactttgaagtgatacagccaacagaagtacatgcatacatgcaccaaaagacatatacagaaatattattaggacttctggtttccagttccacatgtagggagcttagaagttgccactccaaccctaacaagtaaaaagctaagcaaactgagaaatcaattcttatcggacccaggataggggaggacacagggaaaaccactgtccccaaaagactagagagacagactggcaaataccgagagccacaagttactagagcatgcagtcacaaacagaaacccccacaggaagcagtgccatggtagaaaaacctgagctgtaattgatgaattataggaggttcagtatgaacaactctgaaagttttaaactccaggaggacccactcatggggaaacaccacaattttgttagacttacctacatgagctcaattagattctccaagtaaatattgcagaaaaatccctatgtgcttctggcagggggaaggtgaaatgaaccattttgaaatatgccagagcactgtgctcttcttaacaaggtctgcccccaggagaaattagttagctaaatcctaacctgctggggtattattagagcctgacccaagggaagggaaatacctaactcttgtcagctctaaccttctgcatcagagaagggaaatactaaactccagacaactctagccatcctgtcctaccaaagaggggagaagaatactgaggaaacacttagaagtttgtacaccagaggcatatgcttactaaaagactgagacttaatcataggatgatagaatgtctcccctcccctttcccccacctaactgctacattgctaaaagctgatttataaaagttccttttacctggtacatcatgtccagctaccaagaaaaaattaccaggcataccaaaaggcaaaaaaaaaaaaaaaaaaatctgaggagaatagagcaagcttcagacccagacagatagggattctggaattatcagatgaggaatttaaatccactatgattaatatactaatggctataacagataaagaaggcatcattcaagaataggtagacaatgtaagaagagagatggaaatcctaaggaaaaagcaaagagaaatgctagagagtaaaaacaccgtaaaataaaaatggctttgatgggcttatcagtagattgaacatggctgaagaaagagtctctgagcctgagaatgtctcaacataaacctccaaaattggaaagcaaagaaaaagactgggaaaagaaaaaaaaagaataaggactgcaggacaactacaaaaggtgaaacatatgcataaggggaatactagatggaaaagaacgagagaaagaaacaagaaatatttcaaacaataatgacagagacatttcttaaattaatgtcagacatcaaacttcagatccaggaaactcagaaagaaaataataggggtttgaaactcagatctccataaagaaaagaagagcatcagagagggaataaacaaagactaaaatgttcatttttcttattcttaattgatctaactgataagtttgttcaaaataataatagcaacagtgctttcgattttgtatgtttatatgttatatgtatgcttacatataagtgaaatgaatgacaacaacacaaggagcaggagggaagacttaggattattttgtttttgtatgatacactacttataaagtggtatagtgttatttaaaagtggacttgggggtgcagcgcaccagcatggcacatgtatacatatgtaactaacctgcacaatgtgcacatgtaccctaaaacttaaagtataataaaaaaaaaaaaaaaagtggacttggactagttgtaaatggatattgcaaaatctagggcaaccactagaagaattttttttttttaagtataactgacatgctaagaaaggagagaaaatggaatcacataaaatgctcaattaaaaccacaaaaggcagaaaatatgtggaagatgaaaatagaaaataatgacaaatgtggtctatattaatttaactaccagtaatcactttgaacatcagtggtctaagtgcaccaaataggcctggtgtggtggctcacacctgtaatcccagcactttggcaggctgaggcaggaagatcacttgggcccaggagtttgagaccagcctgcacaacatagggagacagaccatctctacaaaaaatttgaaaaattagccaggcgtggtggtgtgtgcctgtagccccagctactcagaaggctgaagtgggaggatctccttgagcctgggaggtcaaggctgctgtgacagagtgagaccctgtctcaaaaaaaaaaaaaaaaaaggaaaaagaaaagaaaaagaaaagcactaattaaaagattgttagagtggatcaaaaaacaagactcaactgtatgttgtttacaagaaccccactttaaatataaagacacatgtaaatgaaaagtaaatggatggagaaaaatataccaagctaacactaatcaaaagaaaacaggagtagctatatttcagacaaggccgacttttcaaagcaaagaaagttatccagaataaaaaaggtaattacgtaatgataaagaggtcagtcctccaagaagacataacagtcctttacatgcatgtgcctagcagcaaagcatcaaactatgtgaggcaaaaactgatagaactacaagcataaatatatgcatccactatcatagttggagatttcaacacccctttatcagaaatggacagatccagcaggcagtaaatgggtaaagacctagttgaattcaacaacaccatcaatcaacttgatataattgacgtctatagactacttcatccaacaagagcagaatacacattcttctcaagatcacgtggaacattcaccaagatagaccacattatggtccataaagcacaccttaacaaatttagaatagaaattatataatgcctgctctcagaccacagtggaattttactagaaaccaataaaggaaagataactggaaagtcccaaaatacatggagattaaacatggattagaaaagaaattccaagataaattgagaaataattttgaactaaatgaaaatgaaaacacaacttatcaaaatttataggatgctgcaatgagccaggatcgtgccataaaataaaattaatatatcagagatgtatgtactccatgtccattgaaacacccttcacaatagcaaagttaacagaatcaacctaagtgtccatcagcagatgaatggataaagaaaatgtgtatgcactcaatggaatactgctcagtcttaaaaaagaagttttgtcatttgcaacaatgtagatgggcctggagaatattatggtaagtgaaataaaccagacacaggaagacaaatactgcatgtcctcacttatatgtggaatctgaaacaacagaacttataaagtggggagtagaatggtggttactagagtctggggtggtgggcagtgggagaatgaggagaggaatgttagagggtacaaagcctcaaatagacagaagtaataacgttttttcctttgggatatattgcacagtgcagtgagtatagcaaaaacagcctttataacaaatgatgctggaacaactgaacgtccatgtgcaagaaaatgaatctagacacagaccttatacttaccacaaaaaccaactcaaaatggattatagctctaaatatgaaacacaactataaaatgactagaagataacataggagaaaacctagatgaccttggatatgatgatgactttttagatacaaaccaaaggtacagtccctgaaagaaataacagataagctgaacttcattaaaattaaaaacttctacagaaagcagggtcaagagaataaaaagataagtcatagactgagagaaaatctttgaaaagacacatctgataaaagactaatccaaaatatacaaggaactcagaaaactcaaaataagaaaaatataaaacctattttaaaatgggccaaaaaccttaacagatacctcaccaaagaagatatacagatgacaaataaacatatgagaagatgctccacatcatatggcatcaaagaaatgtaaattaaaatgacagtgagataacgccacacctgttagaatggccaaaattcagaacactgacaataaatgctgaaaaggatatagaaacagcaggatatggagcacctctcattcattactggtgggaatcaaaatagtacaaccaccttggaagacagtttggtgatttcatacaaagctaaacatattcttaccatgtgatccagcaattgtgctcgtaggtatctacccaaagaagttgaaaacttagtgcacatgggcatttatagcagctttattcataattgccaaaacttacaagcaaccagtatttccttcagtaggtgaatgaataaatacactacggtacattcagatgataggatattttttagcattaaaaagaaatgagggggcctggacatggtgggtcacgtgtgtaatcccagcactttgggaggccaaggcaggagaatcatttgatcccaggagatcaagaccagcctgggcaacacagggagaccctctctctacaaaaatataaaaaatgagccaggcatggtggtgcacacctgtagtcccagttacttgggaggccgaggtgggaggatcacttgcactcaggatgaggctgcagtgagctgtgattttgcctagttataggctgagagggtggtgagtggtggttcttctcactctgaagagatctctagtcattctaaaacccattcatttgtcattactatatagaagagacaataagtaatggacctatcctttaagaaaacctctcatcaaagtatgcttctttattgcaggtaattcgtgcctttctgctctttccaacaattgaacgaatgtctgagtcacccaatggcagaattgccactccacttttgtgctggtttcgatatgttctctatgttactggctacttattattgaaaccgtgtcctgagacaatcaagtccttgctaatcagaaggggccttcaagtaatgaacctagagaatgaattttcaccattgaatatattagaaccattctgccttggtaagcacagattttaaaatgtgtatgtttattcttgtatcacaaaatgtttacacaatactctctgacagtggacaaatatcaagcaagcaattatttactagtttttttttcctcttccaaaagtttaaaactagaaataaataaaattagaaatagaatgaattttttcataagaaattagaaaagcctcatcaagctttaattttaccttatgtttctgattcttcactctagctgcagcacagtgagaaacacttcttccgcatatagtacatagtatatatggagtccctacaggaatccttggtgtgcctgttagcttagtgggagtactttacgaaaaacagcacaaggacacaaagcctaatattcttgtagagttaacaggttgtttttattttcctcctttaaatgttttgggagaatttaaatcatagaagtaataaatatttgtcatggtaatgtattttaatactgggtgctttgctgatttttatgaatatgctaggaaatgtttttgtgactttactttttggcttcaaaagttgttttaaaatgtagtctatctttttagatcatactattttatactacatttataaatgactttcataataaagtaatcctagtttcttaatctataatgtggggataacaatactccgtacttcaaaaggttattctagtgttaaatgtgataaaatatccaaagcttctatctagtattttatttataaccgacctccaatgaacgatgtaacaattagttgcagcagtagctgatggcactttctaagcttttacctgtgttcctcaaaagaactaataaggtttagtattgctattgtccccattttagatgaagcaactgaggtacaaagaggttacatgattgcccaaagttatacaactagtatgtagtgttgaaacccaggcattctgccactgtattgcatttcctttcaccatagctggtgctgttgcccttgttaatgataacagcaggactcctgaataaagttttccatgctcagctgtattaagaatgccataaggtcacatgcctaatgaactagaaacaagttaacagccctgcctgttcaattgtgcagctgcagttcatatgggaggtgtttttctaaatatgtaacaagaagcagtcctcaaaaatacaaggttcagtatatttgtcctattgatagattttttcccccttccattttccctccaatttccattctttaatatacccttagcatagtggtttaaaaagatgagataggaagagggaaagcaagggctaaggacagtcatagaaattgccagaggttgatgttggaaatatcccttaaagaccatttggtccaactcctcatctctccaccatattattaaggaaaggggtcccgatccagaccctaagagagggttcttggatctcgcgcaagaaagaattcagggtgagtctgcagtgcaaagcaaaagcaagtttattaagtaagtaaagtggtgaaagaacagctcctccatagacaaagtaggatattcctgaaaataagaggagggatgcacccaccctaggtacaatgcttatatatatagggagatgtgttctgctacaagggtttgtgataaaggattaattttcttaattactgtattttgcaagaatctatatattattattattattattattattattattattattttgagatggaatctcactctgttgcccaggctggagtgcagtggcgcgatctcggctcactgcaacctccgcttcccaggttcaagtgattctcctgcctcagcctcctgagtagctaggactacaggcaagcaccactgtgaccagctaatttttttattttttttagagacagagtttcaccatgtaggccaggctggtctcaaactcctgacctcgtgatccgcccgcctcagcctcccaaagttctgggattacaggcatgcgccaccatgtccggcccaagaatcgatatttttatcttaaaagcaaaattaggaatgcctttgttctccagatatcaggatatctggacactcccaagtctgagtctgttttagtaaacattattaatttgttcccttaactttaaacatctagaggctcggaatgccttactttctgagaatacagtccagcaagtttcagcctcattttcctagcccacactcaaaatgaagtctctctggttcacacgcctctgaaaatattatggaacagatgcctactggtgaaaatagtactgacaggaagtcacaaaccctcaactctcattttggttctgccctagagtcactctgtggcttttgtttagttacttcccctcgttggttttcagttgttgactaaatcaagagttagggccagtctacctttggaaattacttgagacccaatggaatcaacatttgaaattctggcaaatatatgtaaaactctccacatatactttgataagatcattttacgtctctttacaggtttgtttgtctctcccagccccttgttgctttttgtcattttctttttgccttgtagaatgtattttataaagcattcttcagttatggattccattttcctcctgggacttctgcttccaggaagatagagtaaatggactttccactatttctcctgctaagtactaaaaaccatggatattatctataaaacaacatcaagaagactatacaaggtagagaatagaaagcaggctatgtagggactttgggacccaaggaacaaacacagtggtgagttctctgggttttctttttaccacatatatcctagatttggagccagcaacccagaaacaccaaagagtagagacttttaaaggtcctaacaaaagcctactctctctagcccaaagaccaggaaaggagcaatgttttatagagtaggaaaaaatagtcttctccctactttgtatagttcttacttggggcagatctttgttacaaaagacagattaacaagaaaaatgtataaatttattaacatttatatttcatatgtacatgggagatacccagagaaatgagtaaatctcaaagaggtggcttctgagttcagacttaaataccatcttgaactaaaacaaagaaaagaggtcagtaatgggaggtgaccaagaaaagcactgcacacaagacaagtttgttgtgcagatttaagttagtgccctttgcgttgataatagagtccatggtgatttagaatcatccttcatggtacagagaggaaaacacccatacaaatggaaatgtcctttatagatgtcaatttccctttaaaaagggaacttctccatttttagagcttctcctgtgtcttcagtttctcaaaatactcagtttaaaataatccttttgcccaagacacatctttagggatggtatattttggtcccctacagtcattttgcagcagtgtattctggttttcaatactttctttctttattattattattatatattttttgagacagagtctcactctgccacccaggctagggtgcagtggctcaatctcagctcactgcaacctccgcctcctgggttcaagcaattctcctgcctcagtctcccaagtagttggaactacaggtgcctgccacgactcccagctaatttttgtatttttagtagagatggggtttcaccatattggccaggctggtctcaacctcctaacctcaggtgatccacctgccttggcctcccaaaatgctgggattacaggcgtgagccaccgcacctggcctctggtctttaatactttctaaaagaaacatttagacagtaactgctctactctactccagccatttccagtcatgcctgcaaagattgagtggactttaccctctccccagcagtaatgaagcaccccctctctttccctgctctacggtactgtcccagaagaggctgagtagagagcgaagactttcatcactgccctgcagtaatggggccaccatcaccactacccccatattatcagtaaaggtcatgtggggagaagtagcaagggactcaccacttgtcccagccaagatggtaacagtggaagcctagtacagagtcagaattccttcccctacccagcagctatgaggagccccttcatcccttgggtgtcaacagaagtcaaatgggtaacttagactctaccctacgtggccatagtgaaaaaaacatctaaaacataaagtttaagtaagatccagaatctcataacataatactcaaactgtccatgttttagttgcaaatcacttgtctaacaaaatctcaacttgactggaaaaaaaaaatcaatgccaacaccaaaatgacagagatattagaattatctgacaataactttaaagcagccactataaaaattatttaatgatcaattaataaacatgtttgaaactaatgagaagatagaaaatcttaggaaagagaagattaaaaaaaaactgagtggaaattttagaacaaatttaaaatctcaatggatggaaccaacaataaaatgaggagacaaagaggaaagaatcagtgaatatgagattagattaatagaaattatccaatagagagaaaatagactaaaaaggggaaaaaaaggaacagaacctcagggacctgttggactacaacgaaagatctaacatttgtgataacactagtcctagaaatagagagtaggtctggaaaagtgttcaaagaaataatggtcaaaaactcccaaattttgcaaaagatatgaatttacagattcaagaagctgagtgaatttaaaacagaataaacccaaagaaatctatactaaaacaccataaccaagcttttgaaaactaaaacaaagaaaatgtcttgaaagcagccagaagagcaaagcggtacattattcatggaagaaagtctgtttgaaggacagctagtttttcatcagaatccatggagacccaaaggaaaatgacaaaatgcaaaatgaaaataactattaatccaaaattctgtatctagcaaaagtgtctttcaggaaagaaggggaaatttaacattctcaaatgttgaaaaactaaaagaacttgtcaacattagatctatcctaaaagaataactgcaggaagttctctcaacagagaggaaatgataaaagaaggaatctgggaatgtcaaaaagaaagaacagtgaacaagttaaaatgtggacaaatgcaactttcttcttctcttgagatttctaaattatgtttaacagttaaagcaaaaattatagcactgtctcttatggttctaaacatacacagaggaaatatttagggaacgattttataaatgggggagggtacagggacataatggcaagtaaggtttctacactttacttgaactgtaagatgtaaccatatgtacatagtaataagtcatgtatatatgtaatgtagtacctagaacagccatttcaaatgctattcaaaagagatactcaaaatcaccatggatagatgaagatggaattctatatttagaaacacattgattggaagaccagaaaaagaactcagagacatgacagagaacaaacagaaaacaaataataaaatgatcatccatgattatattgaatgtaaatctaaatatacaattaaaagaaattggcagggtagattagaaaacatgactcaattgtatgctgtcctcaagtcttagtttaaatataacaatataagtaggttgaaagcaaaaggatgagaaaagatacattatgcaaacatttataagcaaaggaaaccaggaatagctttattaatatcagataaagtagatttcagtgcaaagaaaattacctaatagacatttgtagaacacttcacccaaaacagaattgatatcaacatgttgatatcattgaaaccatacagagtatgttcagtgaccacagtggaatcaaactagaaatcagcaacagaataacaaaagttagatctttaaatacttggaaagtaaaccgcacacttctaaacaactcatgagtcaaaaatggaaattacaaagaaattcaaataatactacatgtaattaataaaactatagctcacaactgtaatcctagcactttgggagtctgagatggaaggatcgcttgagcccaggagttctagaccagccagggcaacacagtgaggccctgtctctataaaaaatttaaaaattggccaggcactgtggctcatgcatgtaatcccagcactttgagaggctaaggtaggcagatcacttgagtccaggagttcaagaccagcctgggcaacatgatgaaaccccatctctactaaaaatacaaaaattagctgggcatggtgtcgcacacctgtaacaggtcctagctagttgggggactgaggcaggaggatcccttgagcctgggaagtcaaggctgcagtgagccgagatcgtgacactgcactccagcctgggagacgaagtaagatcctgtctcaaaaaaaaaaaaaaaaaaaatagccaggcatggaggtatagcctgtagtctcagcttctttgggcaggctaagatggaaggatcacttgagcccaggaggccaaggctgcggtaagccatgatcatgccactgaactccagcctgggtgacagagtgaaagcatctcaaaaaaaaataaaattattaataattaataataaaactgaatcaaaatgaaaatacagcatattaaaatttgtgggacacagctaaaacagtgatgagacaaaaatgtatgctggtgtcagaaatgattacattagaaaagaagaaaagtcctagtaacctaagcttcaacctgaagaacctagaaaaagaagagcaaaataaacccaaaaggaggaaaaggaaagaaataacaagaatagaaattagggttaggagcagtggctcacatcttgaatgccagcactttggaaggctgaggcagaaggtttgcttaaggccaggagtttgagaccagcctaggcgacatagtgagaccctgtctctacaaaaaaaattgaaaacaaaaacaatagagaaaatcaatggaagaagaaagtggctactttgaaagagtaataaaattgacaaacccctagcaagactgacaaagaaaaaacagctgaagacacaaattaccaatatcagaaatgaaatagaaaatatcaccatagagcctgcacccatcaaaaggataataaaggctactgtgaacaactctacacatataaatttgacaactggaatgaaataaaccaattcttcaaatgtggacacactaccacaattcatccaagatgaaatagaccatttgaagagccttataactttgaaggaaactcaatttgtaattttaaaacttccaaaaaaagacatttagaggctcagatgatttcactgaagaactatacctaatgtttaaagaaatactaacacaattctacctattttttaaatagaaaataggagggaacacatcccaattcactttttgaagctagtattatctaatatcaaaaccagagaaaaataatacaaaaaaagaagaaactacaggccagtatcccctatgagtatagagacaaacatctctaataaaatattagcaaacagaattcagcaatatataaaaagaattatatactattctattaccaaatgtgatttattccagggatgcaaggctagtatgatattcaaaaatccattaatataatctaacatattaacaggctaaagaagataaaccacatgattctatcaaccgatgcagggaaaaaaaaatattttgaatgcttttcttctaagactagaaacaagacaaagatgtctgctctcagcactcttattcaacatagtgctggacgttctagtcagtccagtaaggtaaggcaaggaaataaaagatatacagatcagaagagaagaaattaatctcgtttgtagatggcatgattgtctgtagagaaaatcccaaggatggttctgcggctctgccagggaataaaaatatatcaaatgattaaaaaaaaaaaaactaaaagaaaaaaatgacaatcccaaggaatctaccaaaaacaaactttgagaattaatacaagttcaacaatgtcacaggatacaggataagcacaaaagtcaatattatttgcatacactagcaatagaaaccaaaatttaaaatataatgtacatttttagccagtcggaaaaattaaattgttaggcataaatttagaaaaacatatacataattatatgctgaaaatgatgactattaataaagaaatgaaagaagacctaagtaaatggagagacatactgtgttcatggattggaagactcaacatagtaaacatgtattaatgcactctcacactgggtaatttataaagaaaagaggtttaattggctcacagttccataggctgtacaggaagaggcatccacttctgcggacgcctcaagtagcttttacttatggcagaaggcaaagtgggagcaggcgtctaacatgggaggagcgggactgagaaagacaagtgggagaggtgccacacactttaaacaaccagatcttgagataactccatcattatttctataacagcaccaagggggatggtgttaagtcatgagaaaccatccccatgattcagttacctctcaccaggtcccacctccaacattggggattacattgaggacatgagatttgggtgaggacacaaatccaaaccatatcagatgtcaattcttcctaaattgatatgcatattaaacatagttgctatcaaaatccgagcaagatttttttgtagctatcgacatgattattctaaaatgtatttggaaaggcaaaggaataagaattactaagacagttttgtaaaagaagaataaagtggaaggagtgagtctgtctggttgcaagatttattatgtagctacagtaatcaaaactttgtgatattgataaagggattaatacataaatcaatggaacagagaagagaacctagaaatagacccacacaagtgtgcccaactgatttttgacaagagggcaaaagcaatttgataaaagaggaattgccatttcaacaatgttgctggagcacttggctcttcttaggccaaaagaaaaaaagaagaaggagaaggagaaggagagaagaagaaaggaaggaaggaaatgaacctcaacctaaactgtaaaccttacaccttataaaaaggttaactctaaatgagccatgaattttaatataaatcttaaaactacaatccttttagaaaaaaagaataaaatattcaggatcaggatctaggactaggcaaagactagctgggtgtgatcacagtgagatatcattacacacctatcagaatggctaaaataaaaaaaatcagcaaccataaatgctggtaaggatgcagagaaactggatcactcatacattgctgctgataatgtaaaatggtgcacccactctggaaagcagtttgacagttaaaaacctaaacacgcagctaccctatgacccagcagttaacactcctaggcattcatccctgatatgtgaaaactggtgttcagagaaaaacctgtatatgaatgtttattgtagttttattcataatagccaaaaactggaaacaacccagaggtattttcaatgggtaaattattaaacaaactgtggtaaagccataccatggaattctacttgataataaaaaggaacagacttttaatacacacagcaacctgtgtccatctccagagaattatgctcagtgaaaaaaagcaacccttaaggtttacatactgcgtgattccatttatatagcattcttgaagtgataacattatagaaatgaagaacagattagtggttgccaggggttaaaaattaaagatgaaaatttagctaggcatggtggcacacacctgtagtcctggctacttgggaggttgaggcaggaggatcgcttgagcctaggagttcaaggttacagcgagctgtgattgcaccactgcacttcggcctgggcaacagaggaagaccctgtctctttaaaaaatacatacatacatatcctggctgtaacattatactgtggttttgcaagatattaccatgggagaaactgggtaaaaggtacatggatttctctatattatttgttacacctgcatgtaaatctacaactatcttaaaataaaagttgaattaaaaacaaaaagcattctccagctagggataccactttcctccctgggataggtgttcccctcatcctgacggcctgaattaggagctccttgtccttgagacattgagaaggttgaggacccagagtcccagggctgaggacaccattagatatgcagctgtacttatgcctctttagaaatattttctaaactcaaatcaggacatgggatataaattttatacattttttaaatttatatatgaaaagtctagctatgacaaattattcttaacggtatatttactaaatacataatatgtcacatataacatataatcaagtgcttaatgtttttaattaaaacaggaaattatgtaaaggtattttccactttttctgcatcagagttatatacacttcaggagaagtaggctccaaaagctgcacttgaaagaaaggactcttccttttaattgcaataattgacctcctactgcatcttccaggagactgaagtttaggcagcagggagcaagacagtttaggcataagacatatttccctccccaatccaaggcaaccagagttttatactacattgttgcttgaagaaccctgggcttcctttctcacacaaccctgatatatgaaatacattttgtaaatcagactgaacattcagctacatgtcttcatctctgttctaaataacaaactagcaaacaaatttttggagcacagtcctcctatttcttacatcctttccttttctgatcttttaatcccttggctctaatctggccttctgatagccaaataactactacttcagtggtctctgatttttttttttccccataacctacccagtgtgtgtaaccttgggtaaaggaaaatgaggcagtagttagttacctgtcttctttcttctttgggttattggttcattccctgcttgggttcatagttcacttcctagtagccagcctcttccctctagatccccagtgccacccctgcctcctcttgcaataaccctcacagaagctgccttcgcccaggcttgcccttaccatcactatggtgattcctagtaccttgcttcccacaaagagaaagtcccaactgagagagcaacactcaacagaagactttgggagatgatcagtgggctctgctagagtttatactccatgaatagtggacataactaatgttcataccagctacttgcatcggcataattttcatggttacacaaagagaggggttatcaagggaaaagaagatcaggtcagagatcattcccagctgggaatctggtccagctggatatttccccctggcccccacagacctgtttctctgtggcttgactatcatccagacaacgaccttttaacctgccagcatgccttttaggaggctttgcagtgtttgcagattatgtaatgtctgtgcttcagtagaaatcttacggaaacaaatggaggaagtttgctagtccaagcagtggataataaatcctgccctatctagatagaaactggttttctgtatcctttagtttatacacacatttttgttgttgttgttgtaagctctgaaaaattctaggaaccaaaatattcaaatatttcaaatcctgctgcccttttggcaaagatggcacatcctttcctgtaggcttgagttctggggcattagcgttcttctctagtatgagtgagtgaaatgtcatttcctatccagcattcagagaagagtagccctacatcagttagtgtacattataaactttaccacagtgttcatcaatgtcattttgttaactaggttattttaaatgttatttttaaagaacatatatggattttttcttcagttttaattctggaatgtttgctactctgtattttctttagatgttcttccacttcatgaaaaataggcttttcactgagacagctaagttgattttctgatcaaagctaaaagaaaatacgtcttagttcagcagtatagcaagtcaaaataattaactttaaaaaatattctagggtcttttcgttagttaggccaaattgatattttatttcctttcagttacctaactagaaaaacatagcacagagacatagggaatttctggtagattacattactttgttgaatatattcttgtaaaataaattttcataattttttcttcccttaatatggaattagctttttaagatataaaatgaactattaaatgagatgacaacataagcatttgcatcactaaagaatcataaatttcttctagaatatttttaactcaatcccagaataatttttgagtaagacgaaaccagactctcatgttaccttacctattctctcatttatctgagcagcttatgaaaatatgtttataaaacccaactgtggcttttatttatttatttatattagagacagggtcttgctatgttggccaagctagtctcaaactccaggcctcaagcagtcctcgaccttggcctcccacagtgctgagattacaggtgtgagccgtcatgcccggccccagctgcagcttttaatgattcatgcaagtataacctaaaattcaggaatgaaggaaaaggtttttttgtttgtttttgtttttgtttttcggtcagtgttaggatttaggacaagaggtgattagtgtggtactaggatataatctctggtttagaagttaatagcgcaatgaatatcttattttttctaaagaaatttttatatttcaaaattaacgccagtctaaaaagttgcattattttttaaaatcatacaacacctccagttgtttttcactttggtgaactcagtgtcgcttaggtaagattatctgtttgcagactaaattgattatcgtaatgaccacagtcctggcttatagagaaatacataataaactatgttgactacgaaacatttctccaaattatgcagaaagtttagaatgggagaattatttttttaggtctagttttcactttgttgcaacttggcaccattggaaaggtggaaaacaacctggaaataaataaataaccgctgaagaattttcccttggaagaaggtttcatctgggtttctaagactatctggtcctacttaaccttttgacaaaccctgctggtatagcctttctgagtacccagccttactctgcctacagctgtgttggcatgtggggctgctcatgtctccagaatcttctagtcttgcagctcgtcctcaaccctaaattttgttcccacacagccctgcttgacttgaaccttcctaacttccctacactcagcacatcttgccagcctcaggaatagtcagaatatgtgctaggaggagctttcctgtgaaaggctctttttcagtcagctcctaccctgcctcctctcaggcaagccctggatatgtgcagatgccactttctcccccactcaagtaccagagcctgataggcagttaagcacatcagcccttgtgctgtgaccaaaaacacccagaatattcaaaggccctatttctattcacttttatcatctgggattgagtttgactatagataacagaaaaccaaattacagtggcctaaacagatagggatctatttttctcatgtgccaagaaatccaggcataggcagtccagaggtaaataacatctcaacagtgccatctgggacatgggtcgtatgtttctactctgttgtcctttgcacatcacataaacctttatccttgtggtcatcatctcatggtcacgtcatggctcctgcaactctagacctcatgtctaacattcagccagaaagaaagggaaaggggagaaaggcaaaaggcctactcctgattaggctttggcttatttaaaaagagaatgtcctccctaggaacttttagattagtagccaaaatatcccttactctgaggaatagagaaaagccatatgttttgatttccccatgactcagtagagtcaatcaagggaaatgaaaatttttgttggcttttaggtagttacattgcgtctactacatccacactgcaagatggtcttgagattcaacatccatggacttaatctcagaatagcccacctaccaaacactgaggtaagacagtcagtccaccagaactaaaatccatcgttgccatgttcctgcagaatgccttcaggcgttgtaacccttggcaagataagctcacagtgaggtctaccgtttatttcttaattgtgacaggtcttcttcaaatcttgtctaaataagtacccatccacagtagagctcatctcagctcccaagattattgtattttttattttaaagggagttttaaaatgtttggcatttcatcggtattaatgggcttactaatgattattctcctcagccaccccccatcatggtgctgaatctaccaaagccttttcctaacctgtcaaaccttttcatgagtactttaagaaagtgatttttccttgtaaacgtggtggtatattttggacatgtagaatctgtcagaccttttaaataagatcaaagtgactagaagtagtatctcagtcaccatagaccaagagtaaaactcacatatatattgcggtatatacacccacaatggttgatttcctacctcccaaattcacctgtcataatgaaaccatgcccatctcctgtaattccccttgcttcagtaccaacaagtccctctcctcaataatggcaaagccaaacaaactggggcattctaatatgaatcatactagtggtactaggctacgtaccaccaaaacagcagcacaacttggcttgccaccttgcagttctactttagaaaactatttatgcatcaccttccattttatgattagttgtggtttaaattgcctctacattgtctctggctcttataactagtgtgtatgtggcctagtttctgactagtcccaacaggggctgttagacttgtactctggccttcagttattcatctcacttttataccagtacctgccagcttggcttaccagtgtcagtgtgcttcagcctctagttctggcctccatcatgatgtcagctcttggaccacttcctccccaccccgctttccaaagcactagctgagtaaccttctctgtcagtctcttcccatttatttcacttaacaacccttccttactgatacctgctgtgagctaactgttcagataagcactggagagaataatgaatgaaatatagttcctgcccttaagttacttacagtgggatagaagagaaaaaatatgaagaattttaatatatcatagggctatcataaatcagatacaaggtatgaatggtaatgagaaaggagagatcagttctattaatacctaggtaagtaacagaggagaagatgaatgaatttggacttgaaggtgagttgggatttttccagacagacaaaatggcaccaggataggcaattagaaggcagccttctgttatggattatgtgtacttggagaattgggtgataacatttgacctgtgagatgaatgccctattggtcttccagctttagccctcactcggctatttcaaaccttttagccagcataagttaaagttgtatagtaatttttggacattaagcaaatcttagaaaataatgttagtaaataacattagactcttcaattagtcttttttatacctgtgtttaatggagcaaaagtaaagaattaacattcttccaaatcattctctttccttcatgtttttgtttccattactactgctactagacatttccttcactgtagtgcttgaaattctgagttctgctggatttccaggaatgctgttgacagtcattgccaagagaaatgtgttttccacttaggaaattacacttctatttggtattattatttctgaccactatgttgtattatgagcatttctgaggaatgacaaagatggcttccttggagcaattactggaaaagaagctggtgttctattaaaaaaaatatatgcttagataggaaattaccaagaaataaataagggtaggaataaaggtgggatggagtacattccctgatgaaaaaatttactttcagaaaataggactccttacaaattatttgaatttttaagtttttttttaatttaagaatgacaaaaaagtacttaaaacataaatgtgtcccttcatgaattatcacaaaacaaacttctattaactgccacccactcaagaatcaccattgcccgagtctcagaagacccccttatgcttctgcccatctcacttactccattttcccaaatgtaactactactaacatctagatgtacctggttttggactttaaataactggaattgtataatgtatacttgtttgtgtctgacttctctcagtcaacattgtatgttgcaactttaattatttcatttttattactaaatacttttccactggatgaatgcactacagtgtatttatttattctatgattgatgaatacttgggttgtttccaatgtggtactactaaaaataatactgtcaagagcatttttatgcttgcctttcagtgaacttatgcacatatttctcttgggtccatccagagaggaaatgcagaggtcatatggtatgcatatgtttagcttcagaagacaatactaaatggtttccaaagtggttgtaccaatgtgtactcccaccagcaatatatgagtttatgttgcttcatttgctcaccaacacttggtattgtctgtattttttgtttttgctatgttttgtaatttgggtcaatctagtaggtatatagtgccatctgatggtgttaaggttttctaaaaaatattttgagattgttctttttctttgattacataatagttgtacatattttagggtacatgtgacattcgaatacctgtatacactgtgttatgatcagattagggtaaatggggtatccatctcttcaaatatttatctttgttttaagaacattacaattcttctcttctagctattttgaaatatacaattactataattttcccactgcattatcaaatacaggaacttatttcttatatctgattctgtttttgtaccccttaaccaatttctctcatctgttccaccccgcttcctttctaagcctctggtagtgaccattctactgtctacccctgtgagattcactttttttttttttttttttttttgagacagtttcattctgtcgcccaggctggagtacagtggcgcaatctcggctcactgcaaactctgcctcccgggtttaagcaattctcctctctcccaccttcccccgccagtagccaggattgcaggcgcacaccaccacgctcggctaatttttgcatttttagtagagacggtttcaccatgttggccaggctggtctcgaactcctgacctcaggtgatccgcccgcctaggcctcccaaagtgctgggattacaggcgtgagccactgtgcccagccgtaagattcactttttagctcccacataggaatgagaacatgcaatatttgtctttctgtgcctggttttcacttaacataataacctccaatcccatccatttttctgcaaatgacaggatttcattctttttatggctgaataatattccattatgtgtatataccacattttctttatccattcaccaactgatggacacttagattcattagtatcttgggtactgtgaacagtgctgcaataaacatgggaatgcagatacctctttgatacactgatttcctttcttttggatatagacctatcagtgggattgctgaactgaactatgtggtagttctagttttagttttttgggaaaactctaaactgttttccataatggctatactactttacattcccaacagtttacaggtattcccctttctctgcatcctcaccagcatttgttattttttgtctttttcttgatagccactctaactggagtgagatgacacctaattgtggggttttttttttgtttgttggtttgtttttaatgttttatttccatagattttggggaacaggtggtatttggttacacgagtaagttctttagtggtgatttgtgagattttggtccacccatcacccaagcagtatatagtgaacttaatttgtagtcttggttttgatttgcattttcctgatagtgatgctgagcattttttatgtacttgttggccatttgtatgtcttcctttgagaaatttctattcaggtctttggtccatgttttattcagattatttgtcatcatgctattgagttgtttgagttccctaaatatcctggttattaatcccttgttagatggatagtttgcaaatattttctcccatgctgtagactgtttcttcactttgttgattgtttacttttctatgtgtagctttttagcttggtgtaatcccatttgtctatttttcgcttttgttgcctgtgtttttgaggtcttacccgaaaaaaatctttccccagaccaatgtcctgtagcattccccctaatgttttcttttagtagtttcatgtcctattaaagtctttaatccatttgagttgatttttgtatatggtaaaagataggatcgatctagcttcattcttctgcatatggatatctagtttcaataatgtttattagagagactatcctttccccaatgtgtgttcttagtgcctttgttgaaaacaagttggctgtaagtatactgatttatttctgagttctctattacattccattggtctgtgtctgcttttatgccagtatcatgttgatttaattactatagctttgtagcatgatttaaagtcaggtagtatgatgcttccagctttgtttttttgtttttgttttttcctttccttaggattccttagcaattcggcgtcttttgggattccatacaaattttaggattgttttctccatttctgtgaagcatgtcattagtattttgagagagattgcattgaatctgtagattgctttgggtcatataacatttcaatgatattaacccttccaatccatgagcatgggatatcttttcctttgtgtgtgtgtcctttccatttctttcatcagtgttttatagttttccttataaagaaaaacttgttttgttaaattcacttcttttgttaaatttattcctaggtattttttagtagctattgtaaataggattgctttcttgattactttttcagattgatcactgtaaacgtatataaacactgctgatttttgtatgttgattttgtatcctgcaactttactatctttatttatcagttctgagagttttttgatggagtctttaggttttactaaataaaagatcatgtcatctgcaaacaaggttaatttgacttcttcctttccaatttggatactctttgtttctttctcttgcctaattgctctatctaggacttctaatactatgttgagttgaagtggtgaaaatgggcatcttgtcttgttagatgttagtggaaatactttgttcactgttcagtgtgatattagctgtgagtctgtcatatattgcccttatggtattgaggtatgttttttctataccccgtttgttgagagtttttattatggagggatgttgaattttatcaaacacttttccagcatgtattgaaacaatcatatggtttctgttcttgattctattgatgtgatgtatcatgtttattgatttgtgtatgctgaaccatccttgcctccctgggctgaattccacatgatcatggtgatcttttcaatgtgttactgaattcagtttgctagtattttgttgaggatttttgcatttatgctcatcagttatattggcctgtggttttctgttatattcttgtctggtcttggtatcatggtaatgctggcctcatagaatgagtttggaaatattccctcctcttcaattttttaaagtagtttgagtagaattggtattagttcttcttcagatgtttggtagaattcagcagtgtttctatcaggtcctggactttcctttcatgggagacttattattattatttagatcttactcattatttgtctgtttttctatttctttgtttcaattttagtagattgtatttttccaggaatttatccattacttgtaggttttccagttcattggcatgtagctgttgatagtagtctctagtgatcctttctatttttctggtaccagttgtaatgtttccttttttgtctctgattttacctatttgggttttccagcatgttggtattgtctatctttaaaaaaaaaaaaaaaactttttcattttattgatcttttgtggttttttagtctccattttatttatttctgttctgatctttattattttttttattctacaaattttaggtttgatttgttcttgcttttctggttccttgaagtgtatcattaggttatttatttgaagcctgtatttttttgacataggcatttattgctataaacttccctcttagtcctacttttgctgtatcccataggttctggtatattgtgtttccattttcatttgttttaagagtttttaaaaaatttctctcataatttcttcattgacccattggtcatttgggagcatgttgtttaatttccatgtatttgtacagttttcaaagttcctctttgcaaagattctagttttattccattgtggtcagaaaatatacttaatatgatttctattcttttaaatttgttgagactttttggtgacctaacatatgccctatgctggagaatgttccatgcactgatgagaaaaatgtgtgttctgcagtagttggatgaaatgctcataaatgtctgttaggtccatttggtctagagtatagtttaactgcaatgtttctttgttaattttctgcctggataatctatctattgccaaaagcaaggtgctgaagtcccttactattactgtattgcagtctacctctccctttatttctgttaacatttgttttgtatatttgggtgttctggtgttaggtacatatatatttattaatgtaatatcgtcttgctgaattgatatctttataattatataatggccttttttgtctctttttatagtttttgacttaaagtctattttatgtgctataaatatagctattcctgctctttttaaagttccatttgcatggagtatctttttccatctcttcacttttactctatgggtatctttataggtgagataagtttcttgtaggcagcatatatttgggtcttgttttttaatccattcagccattctatgtcttaattggagaatttagttgatttacattcaatgttattattgataggtaaggacttaatactgtcgttttacttgtttgcttgttgttttgtaaccctgtcttcctttcttactctctttatttgtggttgtgattttctctggtagtgtgttttaactcattgcttttgatttttattatattttaggtttttgctttgggttactatagtgcttacaaaaacattttatagttataagaagttacctataactaagctaatgtttttgtaagcactcctgtagtcccagctaattgaaggctaacgtgggaagatctctagagcccagcaggtcaaggctgcagtgatctgtgattgcaccactgcactccagcttaggtgacagagtgagaccttgtctcaaacacacacagacacacacacacactgatagcaacctaactttgatcacaaaaacaagagaaaagaaacaaatacaaaacatgtacacattaactccattctccccctacattttgaatttctgatgttacaaaaaataataaaagaatttacttttaaatttgataatgttttctttcatagaggcagaaaagcatgtaaatcaaagattgacctgttcttgtggtagtcagtttgtctgtgagtccatttggcactccagcatatatcatattggaagagtttcagatttttgaatttacatttccatgatagctaatgagggtgagtactttttcataatttgagtaacttctgaaatttctgctcttgtctattgcccatcttgatgtttggtttccagcctttttcttactggtttgtagaagttttaagataaattccagataccagtacctttgacatatggcacatatcttcttccactctgtggattgtctcattagtctcttaatatggtctttttgctggaaaaaaattctaattttaatgtaatttaacaatcttttgtggttagtgttgtagtgtcctactaaaggaatcttttcctaccccaaagttatgaaatattctcctatgttatcttctagaaatttaattcttttgccttttaccttttgatctacagcccacctacaattgatttttatgtaaagttgaaggtagaaatcaagtttgtcttttcttctccataggactatccagttgacccatcatcatttagtgaaaagaccatttattaattttttcttgctgtgtaacaaatgaacacaagcttagtatcttaaaacaacacccttttattaactcacagtatgtaggtaaggagttcatgctcaaatcaagttgtcagccaggctcttcttgtctggaggctctgggaaaaaaaaatccaattccgaaattgctcagattgttggcaagacatccattttgtgtggctttagactgaggtccatgttttcttgctggctgtcagccagggtgcttctctactcatatatatatatatatgtatatatacttaaagttctagggtacatctacacaacgtgcaggtttgttacataggtatacatgtgccatgttggtttactgcactgattaactcatcatttacattgggaatttctccaaatgctatccctcccccaaccccccaccccacgacaggccccactgtgtgatgttcccctccctgtgtccaagtgttctcattgttcaattcccacctatgagtgagaacatgtggtgtttggttttctgtccttgtgatagtttgctcggaatgatggtttccagcttcatccatgtccctgcaaaggacattaactcatccttctttatggctgcatagtattccatggtgtagatgtgccacattttcttaatctagtctatcattgatggacatttgggttggttccaagtctttgctattgtgaacagtgctgcaataaatatacgtgtgcatgtgtctttatagtagcatgatttataatcctttgggtatctacccagtaatgggatcgctggatcaaatggtatttctagttctagatccttgaggaattgccacactgtcttccgcaatggttgaactaatttacactccaacaaacagtgtaaaagcattccaatttctccatatcctctccagcatctgttgtttcctgattttttaatgatcgccattctaactagtgtgagatggtatctcattgtggttttgatttgcatttctctgatgaccagtgatgatgagcattttttcatgtgtctgttggctgcataaatgtcttcttttgagaagtgtctgttcatatccttcacccacttgttgatggggttgtttgtttgtcctctctcacttccttgagcagtggttcgtagttctcctttaagaggtccctcacatcccttgtaagttgtattcctaggtattttattctctttgtagcaattgtgaatgggagttcactcatgatttggctctctgtttgcctgttattgaggataggaatgcttgggatttttgcacattgattttgtatcctgagaccttgctgaagctgcttgtcagcttaaggaaattttgggctgagacaatggggttttctaaatatacaatcatgtcatctgcaaacagggacaatttgacttcctcttttcctaattgaataccctttatttctttctcctgcctgattgccctggccagaacttccaacactatgttaaataggtgtggtgagatagggcatccctgtcttgtgccggtttgcaaaggcattgcttccaatttttgcccattcagtgtgatactggctgtgggtttgtcataagtagttcttattattttcagatacgttccatcaatacctagtttattgagagtttttagcatgaagggctgttgaattttgtcaaaggccttttccgcatctattgagataatcatgtggtttttgtcgttggttctgtttatgcgatggattacatttattgatttgcatatgttgaaacagccttgcgtcccagggatgaagccaacttgatcgtggaggataagctttttgatgtgctgctggattcggtttgccagtattttattgaggatttttgcactgatgttcatcagcgatattggtctaaaattctttttttgttgtgtctctgccaggctttggtatcaggatgatgttgacctcataaaatgagttagggaggattccctctttttctattgattggaatagtttcagaaggaatggtaccagctcctctttgtacctctggtagaattcggctatgaatctgtctggtcctggactttttttggttggtaggccattgattattgcctcaatttcagatcctgttattggtctattcagagattccacttcttcctggcttagtcttgggagggtgtatgtgtccaggaatttatccatttcttctagattttctagtttatttgcgtagaagtgtttatagtattctctgatggtagtttgtatttctgtgagattggtggtgatatcccctttatcattttgtattgcatctatttgattcttctctcttttcttctttattagtcttgctagcagtctatcaattttgctgatcttttcaaaaaaccagctcctggattcattgattttttgaagggttttttgtgtctctacctctttcagttctgctctgatcttagttatttcttgccttctgctagctgtcgaatttgcttgctcttgcttctctagttcttttaattgtgacattagggtgttgattttagatctttcctgctttcctgtgtgggtatttagtgctacaaatttccctctacacactgctttaaatgtgtcccagagatcctggtacgttgtgtctttgttctcattggtttcaaagaacatctttatttctgccttcatttcattatttacccagtagtcattcaggagcaggttgttcagtttccatgtagttgtgtgattttgaccaagtttcttaatcctgagttctaatttgattgcactgtggtctgagagacagtttgttgtgatttccattcttttacatttgctgaggagtgctttacttccaactatggggtcaattttggaataagtgccatgtggtgctgagaagaaggtatattctgttgatttggggtggagtgttctgtagatgtctattaggtctgcttggtgcagagctgagttcaagtcctggatatgcttgttaaccttctggctcattgatttgtctaatattgacagtggggtgttaaagtctcccattattattgtgtgggagtctaagtctctttgtaggtctctaaggacttcctttatgaatctaggtgctcctgtattggttgcatatatatttaggatagttagctcttcttgttgaattgatccatttaccgttacgtaatggccttgtctcttttgatctttgttggtttaaagtctgtttcatctgagatgaggattgcaatccctgcttttttttgctttccatttgcttggtagatcttcctccatccctttattttgagcctatgtgtgtctctgcacgtgagatgggtctcctgaatacagcacactgatgggtcttgactctatccaatttgccagtctgtgtcttttaattggggcatttagtccatttacatttaaggttaatattgttaggtgtgaatttgatcctgtcattatgatgttagctggttattttgcccattacttgatgcagtttcttcataggattgatggtctttacaatttggcatatttttgcagtggctggtaccggttgtttctttccatgtttagtgcttccttcaggagctcttgtaaggcaggcctggtgacaaaatctctcagcatttgcttgtctgtaaaggattttatttctccttcatttacgaagcttagtttggctgtatatgaaattctgggttgaaaattcttttctttaagaatgttgaatattggcccccactctcttctggcttgtagagtttctgctgagagatccgctgttagtctgatgggcttccctttgtgggtaagctgacctttctctctggctgcccttaacattttttccttcatttcaaccttggtgaatctgacaattatgtgtcttggggttgctcttctcgaggagtatctttgtggtgttctctgtatttccggaatttgaatgttggcctgccttgctaggttgggaaagttctcctggataatatcctgaagactgttttccaacttggtttcattctccccatcactttcaggtacactaatcaaacatagatttggtcttttcacatagtcccatatttcttggaggctttgttcatttctttttactctttttttctctaaacttctcttctcactttatttcattaatttgatcttcaatcactgataccctttcttccacttgaccaaatcggctattgaagcttgtgcaggcatcacgtagttcttgtgccatggttttcagctccatcaggtcatttaaggtcttctctacactgtttattctagttagccattcacctaatcttttttcaaggtttttagcttccttgtgatgggtttgaacatcctcctttagcttggagaagtttgttattaccgaccttcagaagcctacttctgtcaactcataatgtcattctctgtccagctttgttccattgctggcgaggagctgcaatcctttggagtagaagagccactctggtttttagaattttcagcttttctgctctggtttctccccatctttgtgattttgtctacctttcatctttgatgttggtgacctacagatggggttttggtgtggatgtccttttggttgatgttgatgctattcctttctgtttgttagttttccttctaacagtcaggtctctcagccgcaggtctgttggagtttgctggaggtccactccagaccctgcttgcctgggtatcaccagcggaggctgcagaacagcaaatattgctgcctgatccttcctctggaagctttgtcccagaggggcacccacctgtatgaggtgtctgctggcctctactgggaggtgtctcccagtacatgggggtcagggacccacttgaggaggcagtctgtccgttctcagagctcaaatgctgtgctgggagaaccactgctgtcttcagagctgtcagacaggaacatttaagtctgcagaagtttctgctgccttttgttcagctatgccctgccctcagaggtggagtctatagaggcagcaagccttggtgctgcagtgggctctgccctgtttgagctttctggccgctttgtttgcctactcaagactcagcaatggtggacgcccctccccctgccgggctgctgccttgcaggtcaatctcagactgctgcgctagcagtgagcaaggctctgtgggcgtgggacccgctgagccaggcgcaggatgtaatcttctggtgggccattagctaagaccattggaaaagtgcagtatttgagcaagagtgtcccatttttccaggtacagtctgtcatggcttctcttggctaggaaagggaaatcccctgacccttgtgtttctggggtgaggcgatgccccgccctgctttggctcaccctccctgggctgcacccactgtccaaccagtcccaatgagatgaaccaggtacctcagttggaaatgcagaaatcacccgtcttctctgtcaatcatgctggaagctgcagaccggagctgttcctattcggccatcttggaacggaccacttctctactctttttttttttttttgatacggactctcgctctgtcgccgaggctagagtgcagtggcgcaatctcggcccacttcaagctccacctcccgggttcacaccattctgcctcagcctcccgagtagctgggactacaggcgcccaccaccacgcctggctaattttttgtatttttagtagagacagggtttcaccatgttagccaggatggtctcgatctcctgaccttgtgatccgcccgtctcagcctcccaaagtgctgggattacaggcgtgacacttctctactctttaaaggccactctcaggtcctttccatgtgagttccatcttcatacctactatggtgcatttaatccttctagtgctccaaatctctgacttcctttctgcaaccaaccagagaaaactcagattttaaagggcacatgtgaataggttaggctgggcccactagcataatcctcccttcttaaagtcaactctgccagataacatgacctatcataggagtaatatgtcatattcacagggtcaaatatttgaaagacgtcttagaattctgcttaccacaaactgtctttttcccactgttttgaagtgctacctatgccaaaaacaaaatagtcatatatatgtgtatatatatgtatatgtgtataatatatatgtatatatatgtataatatatgtgtatatatgtataatatatatgtgtatatatatgtataatatatatgtgtatatatatgtatactatatatctatatatatatatctatatatatatatacacacacacacacacacacacccctatatatatatagtccggggtgagtcatatatatagtcatttctgggaagagtttatgtagaatcaatatttcttccttaattgttcattgaattgactaatgaaatcatcttggcctggggttttctttgtgaagagattttaaattacaaattccatttctttaatatatgtaagactattcagggtatctgtttctttttgagtaagcttaacatttttgtctttgtgcagactttgtccattttgtccaaggtgtctacattcatgacataaagtttttcacaaaattatgtgattatccttttgatatctggaatctgcagagatgtcacctctctctttcctgatatttgtaatatcttaatatcttttgtcttctcacatttttttccctgatcaatctggctaaacacttatcaatttgattgttttattgaagaaccagcttttagttccatttattttcttgattattttattggcttcaatttcattaattaattgcattaatttctggtgtgaactttatttcctgcctacttcagagttaactgctcttctctttctagtttcttgcaatggaaactgaaataattgattttgtaatgtaagtttttagcgttataaatttctctctaactactgctttggccctgtcccacaaagtctgatatcttggagtgtgacttgcttctttcacttagcataatgttttcagggttttttcatggtttagcatgtgccagtgcttcattactttttattgatgaataatatttcgttgcatgactttaccatgttttgtctttccattcatcaattggtggacattcagattgtttgcactctttgactattatgaataatattgctgtaaacactcatgtacaagttttttgtggacttatgtttctaattctcttgtctataggtggaattgctgggtaatatggtaactctgtatttaatattttagggaactgccaaacagttttccaaagttcctgtaccagtttataattctaacaacaagacatgagggttacagtttctccacatcttgtcaacactggttattgtttgtctttttttattatagccatcctagtgaagtagtatctcattgtggttttgattatatttccttgatgactaatgatgttgaacatcttttcacatgcttattggccatttgtacagattgaatatcccttatctgaaatgcttgagatgagaagtgtttaggatatgggattttttttggatttggaaatatttgcatatacataatgagatattttgggaatgggacccaagtctaaacacaaaatttacttatattttatatacacctcatacacatagcctgaaggtaactgcacaatatttttaattttgtgcatgaagaaagttttgactgcaacccattacatatagtcatgtgtgaaattttccacttgtagcatcatgttggcactcaaaaagctgaattttggaagatttcagattttatgtttttacattagggatactcaacctgtacatcttcttaagaagatatttagaaatgtctgttgcaatcctttgcccattttcaatcagattgtctttattattgatttgtaagagttctttatatattatggctagagatctttatcagacatatgatcttttcccattctttagattgtctttttactttcttgatggtgtcctttaaagcataaaagtgttagttttgatgaagtccaatttatttatttatttttgtcacttgtgcttttgatgtcatagttacaaaccattctgtaatctaaggtcacaaagatgtatttctctttcctactgagagttttatagttttagttgttacatttagggctatgatccattctgaatttatttcctatgtcatgtgaggtagtgatccagcttccttcttttgcacatgtatatccacttgtccaagttccagttgttgaatgtttattaattttattatctttgtcatttctgcatcagttttgactgatcagtttttctcctcatttgggttgtattttcttgcattgcatgcatgataattttttattggatagcttacattctgaattttaccttgtcagatgctggatatttttgtacttctataaatattattgagctgtgttatgggacacagttttgttatttggagacggtttgatactttctggtcttgcttctaggctgttagttggtaccagaatggcatttggtttagggctaattttactccaccaccaaggcaaaaacctctctgagttctctagttaccagtccccaacctttttggaaccagggaccggttttgtggaagacactttttccctggaccaggctgggggaatggtttggggatgattcaagcacattacatttattgtgtactttatttccattattattaaatgttaatatataatgaaataattatacaactcaccataatgtagaaaagtgggagggagccctgagcttcttttcctgcagctagacaatcccatctgagggtgatgggggacagtgacagatgatcaggcattagattatcataaggagcacgcaacctagatcccttgcatgctcagttcacaatatggtttgcactcctctgagaatctaatgctgccagtgatctgacaggcggtggagcttaggcagtaatgcaagcaatggggaatgcctgtaaatacagataaagcttcacttgcttgcctgctgctcacctcctgccgtgtgacacagtactggtgctgctctagtggatgcattgttggttgtgacgttctctggtggactggtagaaacagtgactattctcaattcagggattattccctctaattctttcagatgattccttcacccagcttctcaaaatttctcatacaattgtgctgatctgcacctagctgaaattcagggggtcccctctgcagatctctggagcgttctctcactcactacagctttctccttctacaactctgccctaccaaaaaccactgcggtagcctccccaaactatcacctctatctccttgattacaaatgcattgttttaatcaggtgtgttaacatggcaagcatggagacaactgcctttgaaagaagagctacttagaattcttgaaaggagggggcattgcacactaggcagggcctcatggggaagcacccagttggggaaggaggcagaaggagcacaggagagcatggcccagagccttcattgtggtccccatgggaaggaagggatgaggcagtttaggcagctgagcaggtttagttaggattggctggtatgaaaaattttggtgggctttgagctataggagtagttcctagatgtcttgtgtccagccctgaaataattcccagcaggatttagagtgatttagagtatttggcttgttgtgtgagagttttctaagggaggtggttggtgggtatggcctttggattggttgtttgctcaatatgaaagaaatgttcaccgtggaatcatttgctatctctaagaatttagctagtcatgggaggggcagcctctccccgacaagcaaggcctccaagatgtcaaagcatcataaaatgaagacaataaaaaacaattaatgcacttatcaactgagggagattaccaagctctgcttgtacttctccttcttgcactgtagcctgaaaacttttcaaatgataagctgagacaatcataagactcctctcattcgtttctcttttctcagggattgctgtctttttgttgcccaatatccagtgtcttgaaaacttttttcttcatgtattttatctttttttttttttttagttgtttcaggattttaggtaggagggtaaatccagtccctcttactccatcttgttcagaagtagaactatggaaaatcatttccatttgaaattaaaattcagttgagatttttgggaaccaataacagtttaaacaggtttggcttctatatcgataattcagcagtctttattaacagattggagtgttagagcaaggtagcgaaaagacagagcatctaagccaagacaaaggatgggtgggaagacttcaagtagacagaatgccatgaacaaaatggctgaggatgcaaattttatgtgtttagaggataagtagctcacattcactggaaagcatgagtctttaaatgaagccaagcttcaacataggttgggatcagattttgtagagaaggctaatgggagttataaagaaaatgagaatttctctttcaataaaatctgtcttttcctcatggtgttccccaaacttttttttctcctaagcccccactaatattcatttttcattccttcaccttctcctaatatctaatccatttcttagctctgtaaggtcggccttatttgtagctctagaaagaacttcactgctcagtaaggtagacattagccatatgtggctatttaaatgtaaatgaattaaataaaattgaaatttcagttccttattgccctggccacatttcaggtgttcaagaggcacatctagccaagggcctttgtattggttggatagcacagggaacatttccaccatcacagaaagttatattgcatagcactactctagaatgtgctcagaggcaaaattttaaatttcatatgcggtataactatgtgaaaactaagacttaacaataaaattttaaagatttaaatgaagtcatcaaaatagtaatattgattatttttcactaagttcttgctaatcatttcttctactcatataatttctgcattttatatacagagcacatgtttatagtaggaaaaattatgtctttgatcatttattctttttcatactataagcactttaagtctcattctctcccccactagacaatataatagtattctaactagtctcttagaaaataatacaaattgaaaaagagaaaggctatagaagaaaaatgacagaggattagtctaagagagccaataccctactagtaggagttccagaaagaggggatggagaaaacaggggaagaaattaccaaagaaataataaaagaaaattttccagaaagaaagttggtaagtccaaacagtgaatgggcccactggatttccagtctaattaaggaatagaagacttgtattagggcatattcctatgaaacttcaggattctagagctaagacagctgagtttgaggataaggagatgggataggggcaggacaaagggaagtagtcacattccaagaaactaaaattgaaatcataaaccttggatgctggaagataataaacttgagggtaagcccctttcagcttaaaattctatatacagccaaactatgtgattcatgtgggaaaagaaacaaaaattagacatgtaaacatctataaaaattcctgtgtatctttttattagttactggaaaatgtgcttcagtaaagtaagggaataaaccaagaatgagaaagtcatgaacagaatccataaaacagggaatccagtccagagaagtggcaaagggaagtccaaggatgacagctatgcagcaggcctggagagcaacccgtccaagattggatcaaaagaatggaaggctctgtggggggagggacagaataaatgaattattggatgtgtttgtacatttgggaataaaatctgatgcatttttgaagaaagaattttcattgtctactcatgagaaaagaaaatcaagtaaaggcaacaaataattctaggaaagacaaaatgatgtacaaagaaagaaactataacctatttgaaagggaggcagggaagtgagaggagaagaaaggacaggcagatcacctgggattccatcaaccagagataacgtgttattattttattgtttatcttttcaaataaatctgtaccatacacataatgtatctttacaatagtgggatcatactgtactatttcatggtttgttttttgtcagttactattatttttaaatatgtatttgacattatatattctgcaggataatttttaataggttatagaataattaatttagtgaatagaccataatgtattaatcaaatctctgttgctttaatttagttggtccttataaattccctgaaatatagtaaaacaaagacagttctgattttggaaccgggacttagagtcttatagtccagcttcttagtatataactgcgactaaatatcctgttctgatttaggagattaggccaagaaaatgcagaatatttactcctatatgtactcatgctaatatcacagacagacaagaatgattaaagtgctactttttaggattatatcatggctatatttaagggagcatctcctaccctattctctgtctagagtgctgctaacccaagtatctgcatggtccattttctcatttcattcaagttcttctctgttcacacatccccttatcagggaggtcttttcagtgaattttacataaaataggccacctctgtcactgcacagacttatctcctaagctgattttatttttctccatagcactttctcaccatctatcatcccaacactaaaatataagctcaagaatagtgtttctgtcttgtttgttgctccatctccagcgcctaaaataaggcctggcataaagtaagtaggtgctcagtcatctttgaatgaataaacaaatgaatgagttaattaactgggacttagaaaacaataggaacaacccaagaaggcagtgaagggaaattctaagtcgacagtggtccaggttagagcagaaggtctcagggtcctggaaaggaggtctccaggaagaattgactcagaaaaatattgagtagagttaagagggaaaaaaaggtaactgtaacgaaaacaaatgttggaggacagagaatggaagtgtaagagtggaagtgtggttctagataccacttggctcagcagtgaacaatattcagaagtaaaggtgtaagtatattatttaagtaagaatagaataattcaaaataagatataaacatgttgagaagatggcaggaaggaatggtagggctgtaaaagggagctaaatcctcatctttcatagcaactcagcaagggtaatcaataagttatcaagaaatgacaagatgatcgtaagtgtttagaggtttgaagataactggtggaaggacagctaaaagagttcagagaggcttcctctaggaaacgggtctagaaatgggaaatgatggaaaagaaaactatggtttggcactacaaccatttctgtgatatttgatatgaaactatatatgtgtatgtgtgttaccttgataaaactttaaacaaggaaagcagaggcaaaatgtaaaaattaataatctgggagctgggtgcggtggctcatgcctgtaatcccagcactttgagaggccaaggcaggcggatcttctgaggtcaggagttcaagaccagcctgaccaacatggtgaaaccctgtctctactaaaaatacaaaattagcggagtgtggtggcgcatgcctgtaatcccagctactctggaggctgaggcaggagaattgcttgaacctgggaggtggccgtgagccacgatcgtgccattgccctccagcccgggcaacaaagagcgaaactccatctcaaaaaataataataatctggaactaaaattccagatggttgaagcaacagggatggaggcaggatgggaggaaggcatggggaaagtgcaagtatgctaaggtcatgccttgtttagatgagtaattccagacagcaagagaaaataaaaagtaagtttgcagtttttaggtaaggctaaccactagataaataaaaatggaatttatactttcagattgttaatgaaaagaaatttgttaaatcctgggtggggaggaaaattcatcattcacactaaagataagaggcagaaataacaagaaagcgtagggtatataaagcaagatgactggcgtcagaccaaatagctttgatctcaatatatgtgaatatgtttagtccttctatttaagaaacagagactttcaaactgcatttttaaagaagtccacttacatgatttcaagagacatacttgaaacaaaatgacaaaagattgaaaatgaagggaaggacagatgctggcaaaaaagaaagcaagataagaataataataccagccaaaatggaattcagggtacaaagcattgaatgaaaattttcttaccagtacaagaaagccacataaactcatgttatctctggcgttcttcctctttcctaggtatttgacatcttgaaagtgagcatcactttgcttattttgcagccagtgtaatgggactaaccctattgaaaactcctggagaactttaaacgtatttttaaagataaataatccttttagttgtttcctttaaaaaaaaaaaagccagtatattttcatgttagtaactgtttgcattttcttggtatacatgatttattggtaacaatttgtacttctaagccttaaatcgaaatagcacatattggtctggtaaaattgcacacatcatctgctgtggtatctgacattgggctgtggcactgttaaacttttgctatggagaagccagatgaggttggaagaaggttcttttaaatgaaatgctcttgtttccagagactgtgtgcatgttgcctgactcacattcctctgttggcctcaccagtatctctcatcagatagcacgtgccaaaagaaaggaggaacatgaatttactaaaattaatttgaaatttgtgtttgttctatatattctaaatgtttgactttttattttttaaatgtagctaatgctgcctaccttgggggccaagaaatgatggaggtggtgaagagagatgacgaaaccataaaggagcatttat

SEQ ID NO: 15661 - DNA, 139117 bp, Homo sapiens; identical to SEQ ID NO: 1210

SEQ ID NO: 15662 - DNA, 139117 bp, Homo sapiens; identical to SEQ ID NO: 1210

SEQ ID NO: 15663 - DNA, 55580 bp, Homo sapiens
tattagaaccattctgccttggtaagcacagattttaaaatgtgtatgtttattcttgtatcacaaaatgtttacacaatactctctgacagtggacaaatatcaagcaagcaattatttactagtttttttttcctcttccaaaagtttaaaactagaaataaataaaattagaaatagaatgaattttttcataagaaattagaaaagcctcatcaagctttaattttaccttatgtttctgattcttcactctagctgcagcacagtgagaaacacttcttccgcatatagtacatagtatatatggagtccctacaggaatccttggtgtgcctgttagcttagtgggagtactttacgaaaaacagcacaaggacacaaagcctaatattcttgtagagttaacaggttgtttttattttcctcctttaaatgttttgggagaatttaaatcatagaagtaataaatatttgtcatggtaatgtattttaatactgggtgctttgctgatttttatgaatatgctaggaaatgtttttgtgactttactttttggcttcaaaagttgttttaaaatgtagtctatctttttagatcatactattttatactacatttataaatgactttcataataaagtaatcctagtttcttaatctataatgtggggataacaatactccgtacttcaaaaggttattctagtgttaaatgtgataaaatatccaaagcttctatctagtattttatttataaccgacctccaatgaacgatgtaacaattagttgcagcagtagctgatggcactttctaagcttttacctgtgttcctcaaaagaactaataaggtttagtattgctattgtccccattttagatgaagcaactgaggtacaaagaggttacatgattgcccaaagttatacaactagtatgtagtgttgaaacccaggcattctgccactgtattgcatttcctttcaccatagctggtgctgttgcccttgttaatgataacagcaggactcctgaataaagttttccatgctcagctgtattaagaatgccataaggtcacatgcctaatgaactagaaacaagttaacagccctgcctgttcaattgtgcagctgcagttcatatgggaggtgtttttctaaatatgtaacaagaagcagtcctcaaaaatacaaggttcagtatatttgtcctattgatagattttttcccccttccattttccctccaatttccattctttaatatacccttagcatagtggtttaaaaagatgagataggaagagggaaagcaagggctaaggacagtcatagaaattgccagaggttgatgttggaaatatcccttaaagaccatttggtccaactcctcatctctccaccatattattaaggaaaggggtcccgatccagaccctaagagagggttcttggatctcgcgcaagaaagaattcagggtgagtctgcagtgcaaagcaaaagcaagtttattaagtaagtaaagtggtgaaagaacagctcctccatagacaaagtaggatattcctgaaaataagaggagggatgcacccaccctaggtacaatgcttatatatatagggagatgtgttctgctacaagggtttgtgataaaggattaattttcttaattactgtattttgcaagaatctatatattattattattattattattattattattattattttgagatggaatctcactctgttgcccaggctggagtgcagtggcgcgatctcggctcactgcaacctccgcttcccaggttcaagtgattctcctgcctcagcctcctgagtagctaggactacaggcaagcaccactgtgaccagctaatttttttattttttttagagacagagtttcaccatgtaggccaggctggtctcaaactcctgacctcgtgatccgcccgcctcagcctcccaaagttctgggattacaggcatgcgccaccatgtccggcccaagaatcgatatttttatcttaaaagcaaaattaggaatgcctttgttctccagatatcaggatatctggacactcccaagtctgagtctgttttagtaaacattattaatttgttcccttaactttaaacatctagaggctcggaatgccttactttctgagaatacagtccagcaagtttcagcctcattttcctagcccacactcaaaatgaagtctctctggttcacacgcctctgaaaatattatggaacagatgcctactggtgaaaatagtactgacaggaagtcacaaaccctcaactctcattttggttctgccctagagtcactctgtggcttttgtttagttacttcccctcgttggttttcagttgttgactaaatcaagagttagggccagtctacctttggaaattacttgagacccaatggaatcaacatttgaaattctggcaaatatatgtaaaactctccacatatactttgataagatcattttacgtctctttacaggtttgtttgtctctcccagccccttgttgctttttgtcattttctttttgccttgtagaatgtattttataaagcattcttcagttatggattccattttcctcctgggacttctgcttccaggaagatagagtaaatggactttccactatttctcctgctaagtactaaaaaccatggatattatctataaaacaacatcaagaagactatacaaggtagagaatagaaagcaggctatgtagggactttgggacccaaggaacaaacacagtggtgagttctctgggttttctttttaccacatatatcctagatttggagccagcaacccagaaacaccaaagagtagagacttttaaaggtcctaacaaaagcctactctctctagcccaaagaccaggaaaggagcaatgttttatagagtaggaaaaaatagtcttctccctactttgtatagttcttacttggggcagatctttgttacaaaagacagattaacaagaaaaatgtataaatttattaacatttatatttcatatgtacatgggagatacccagagaaatgagtaaatctcaaagaggtggcttctgagttcagacttaaataccatcttgaactaaaacaaagaaaagaggtcagtaatgggaggtgaccaagaaaagcactgcacacaagacaagtttgttgtgcagatttaagttagtgccctttgcgttgataatagagtccatggtgatttagaatcatccttcatggtacagagaggaaaacacccatacaaatggaaatgtcctttatagatgtcaatttccctttaaaaagggaacttctccatttttagagcttctcctgtgtcttcagtttctcaaaatactcagtttaaaataatccttttgcccaagacacatctttagggatggtatattttggtcccctacagtcattttgcagcagtgtattctggttttcaatactttctttctttattattattattatatattttttgagacagagtctcactctgccacccaggctagggtgcagtggctcaatctcagctcactgcaacctccgcctcctgggttcaagcaattctcctgcctcagtctcccaagtagttggaactacaggtgcctgccacgactcccagctaatttttgtatttttagtagagatggggtttcaccatattggccaggctggtctcaacctcctaacctcaggtgatccacctgccttggcctcccaaaatgctgggattacaggcgtgagccaccgcacctggcctctggtctttaatactttctaaaagaaacatttagacagtaactgctctactctactccagccatttccagtcatgcctgcaaagattgagtggactttaccctctccccagcagtaatgaagcaccccctctctttccctgctctacggtactgtcccagaagaggctgagtagagagcgaagactttcatcactgccctgcagtaatggggccaccatcaccactacccccatattatcagtaaaggtcatgtggggagaagtagcaagggactcaccacttgtcccagccaagatggtaacagtggaagcctagtacagagtcagaattccttcccctacccagcagctatgaggagccccttcatcccttgggtgtcaacagaagtcaaatgggtaacttagactctaccctacgtggccatagtgaaaaaaacatctaaaacataaagtttaagtaagatccagaatctcataacataatactcaaactgtccatgttttagttgcaaatcacttgtctaacaaaatctcaacttgactggaaaaaaaaaatcaatgccaacaccaaaatgacagagatattagaattatctgacaataactttaaagcagccactataaaaattatttaatgatcaattaataaacatgtttgaaactaatgagaagatagaaaatcttaggaaagagaagattaaaaaaaaactgagtggaaattttagaacaaatttaaaatctcaatggatggaaccaacaataaaatgaggagacaaagaggaaagaatcagtgaatatgagattagattaatagaaattatccaatagagagaaaatagactaaaaaggggaaaaaaaggaacagaacctcagggacctgttggactacaacgaaagatctaacatttgtgataacactagtcctagaaatagagagtaggtctggaaaagtgttcaaagaaataatggtcaaaaactcccaaattttgcaaaagatatgaatttacagattcaagaagctgagtgaatttaaaacagaataaacccaaagaaatctatactaaaacaccataaccaagcttttgaaaactaaaacaaagaaaatgtcttgaaagcagccagaagagcaaagcggtacattattcatggaagaaagtctgtttgaaggacagctagtttttcatcagaatccatggagacccaaaggaaaatgacaaaatgcaaaatgaaaataactattaatccaaaattctgtatctagcaaaagtgtctttcaggaaagaaggggaaatttaacattctcaaatgttgaaaaactaaaagaacttgtcaacattagatctatcctaaaagaataactgcaggaagttctctcaacagagaggaaatgataaaagaaggaatctgggaatgtcaaaaagaaagaacagtgaacaagttaaaatgtggacaaatgcaactttcttcttctcttgagatttctaaattatgtttaacagttaaagcaaaaattatagcactgtctcttatggttctaaacatacacagaggaaatatttagggaacgattttataaatgggggagggtacagggacataatggcaagtaaggtttctacactttacttgaactgtaagatgtaaccatatgtacatagtaataagtcatgtatatatgtaatgtagtacctagaacagccatttcaaatgctattcaaaagagatactcaaaatcaccatggatagatgaagatggaattctatatttagaaacacattgattggaagaccagaaaaagaactcagagacatgacagagaacaaacagaaaacaaataataaaatgatcatccatgattatattgaatgtaaatctaaatatacaattaaaagaaattggcagggtagattagaaaacatgactcaattgtatgctgtcctcaagtcttagtttaaatataacaatataagtaggttgaaagcaaaaggatgagaaaagatacattatgcaaacatttataagcaaaggaaaccaggaatagctttattaatatcagataaagtagatttcagtgcaaagaaaattacctaatagacatttgtagaacacttcacccaaaacagaattgatatcaacatgttgatatcattgaaaccatacagagtatgttcagtgaccacagtggaatcaaactagaaatcagcaacagaataacaaaagttagatctttaaatacttggaaagtaaaccgcacacttctaaacaactcatgagtcaaaaatggaaattacaaagaaattcaaataatactacatgtaattaataaaactatagctcacaactgtaatcctagcactttgggagtctgagatggaaggatcgcttgagcccaggagttctagaccagccagggcaacacagtgaggccctgtctctataaaaaatttaaaaattggccaggcactgtggctcatgcatgtaatcccagcactttgagaggctaaggtaggcagatcacttgagtccaggagttcaagaccagcctgggcaacatgatgaaaccccatctctactaaaaatacaaaaattagctgggcatggtgtcgcacacctgtaacaggtcctagctagttgggggactgaggcaggaggatcccttgagcctgggaagtcaaggctgcagtgagccgagatcgtgacactgcactccagcctgggagacgaagtaagatcctgtctcaaaaaaaaaaaaaaaaaaaatagccaggcatggaggtatagcctgtagtctcagcttctttgggcaggctaagatggaaggatcacttgagcccaggaggccaaggctgcggtaagccatgatcatgccactgaactccagcctgggtgacagagtgaaagcatctcaaaaaaaaataaaattattaataattaataataaaactgaatcaaaatgaaaatacagcatattaaaatttgtgggacacagctaaaacagtgatgagacaaaaatgtatgctggtgtcagaaatgattacattagaaaagaagaaaagtcctagtaacctaagcttcaacctgaagaacctagaaaaagaagagcaaaataaacccaaaaggaggaaaaggaaagaaataacaagaatagaaattagggttaggagcagtggctcacatcttgaatgccagcactttggaaggctgaggcagaaggtttgcttaaggccaggagtttgagaccagcctaggcgacatagtgagaccctgtctctacaaaaaaaattgaaaacaaaaacaatagagaaaatcaatggaagaagaaagtggctactttgaaagagtaataaaattgacaaacccctagcaagactgacaaagaaaaaacagctgaagacacaaattaccaatatcagaaatgaaatagaaaatatcaccatagagcctgcacccatcaaaaggataataaaggctactgtgaacaactctacacatataaatttgacaactggaatgaaataaaccaattcttcaaatgtggacacactaccacaattcatccaagatgaaatagaccatttgaagagccttataactttgaaggaaactcaatttgtaattttaaaacttccaaaaaaagacatttagaggctcagatgatttcactgaagaactatacctaatgtttaaagaaatactaacacaattctacctattttttaaatagaaaataggagggaacacatcccaattcactttttgaagctagtattatctaatatcaaaaccagagaaaaataatacaaaaaaagaagaaactacaggccagtatcccctatgagtatagagacaaacatctctaataaaatattagcaaacagaattcagcaatatataaaaagaattatatactattctattaccaaatgtgatttattccagggatgcaaggctagtatgatattcaaaaatccattaatataatctaacatattaacaggctaaagaagataaaccacatgattctatcaaccgatgcagggaaaaaaaaatattttgaatgcttttcttctaagactagaaacaagacaaagatgtctgctctcagcactcttattcaacatagtgctggacgttctagtcagtccagtaaggtaaggcaaggaaataaaagatatacagatcagaagagaagaaattaatctcgtttgtagatggcatgattgtctgtagagaaaatcccaaggatggttctgcggctctgccagggaataaaaatatatcaaatgattaaaaaaaaaaaaactaaaagaaaaaaatgacaatcccaaggaatctaccaaaaacaaactttgagaattaatacaagttcaacaatgtcacaggatacaggataagcacaaaagtcaatattatttgcatacactagcaatagaaaccaaaatttaaaatataatgtacatttttagccagtcggaaaaattaaattgttaggcataaatttagaaaaacatatacataattatatgctgaaaatgatgactattaataaagaaatgaaagaagacctaagtaaatggagagacatactgtgttcatggattggaagactcaacatagtaaacatgtattaatgcactctcacactgggtaatttataaagaaaagaggtttaattggctcacagttccataggctgtacaggaagaggcatccacttctgcggacgcctcaagtagcttttacttatggcagaaggcaaagtgggagcaggcgtctaacatgggaggagcgggactgagaaagacaagtgggagaggtgccacacactttaaacaaccagatcttgagataactccatcattatttctataacagcaccaagggggatggtgttaagtcatgagaaaccatccccatgattcagttacctctcaccaggtcccacctccaacattggggattacattgaggacatgagatttgggtgaggacacaaatccaaaccatatcagatgtcaattcttcctaaattgatatgcatattaaacatagttgctatcaaaatccgagcaagatttttttgtagctatcgacatgattattctaaaatgtatttggaaaggcaaaggaataagaattactaagacagttttgtaaaagaagaataaagtggaaggagtgagtctgtctggttgcaagatttattatgtagctacagtaatcaaaactttgtgatattgataaagggattaatacataaatcaatggaacagagaagagaacctagaaatagacccacacaagtgtgcccaactgatttttgacaagagggcaaaagcaatttgataaaagaggaattgccatttcaacaatgttgctggagcacttggctcttcttaggccaaaagaaaaaaagaagaaggagaaggagaaggagagaagaagaaaggaaggaaggaaatgaacctcaacctaaactgtaaaccttacaccttataaaaaggttaactctaaatgagccatgaattttaatataaatcttaaaactacaatccttttagaaaaaaagaataaaatattcaggatcaggatctaggactaggcaaagactagctgggtgtgatcacagtgagatatcattacacacctatcagaatggctaaaataaaaaaaatcagcaaccataaatgctggtaaggatgcagagaaactggatcactcatacattgctgctgataatgtaaaatggtgcacccactctggaaagcagtttgacagttaaaaacctaaacacgcagctaccctatgacccagcagttaacactcctaggcattcatccctgatatgtgaaaactggtgttcagagaaaaacctgtatatgaatgtttattgtagttttattcataatagccaaaaactggaaacaacccagaggtattttcaatgggtaaattattaaacaaactgtggtaaagccataccatggaattctacttgataataaaaaggaacagacttttaatacacacagcaacctgtgtccatctccagagaattatgctcagtgaaaaaaagcaacccttaaggtttacatactgcgtgattccatttatatagcattcttgaagtgataacattatagaaatgaagaacagattagtggttgccaggggttaaaaattaaagatgaaaatttagctaggcatggtggcacacacctgtagtcctggctacttgggaggttgaggcaggaggatcgcttgagcctaggagttcaaggttacagcgagctgtgattgcaccactgcacttcggcctgggcaacagaggaagaccctgtctctttaaaaaatacatacatacatatcctggctgtaacattatactgtggttttgcaagatattaccatgggagaaactgggtaaaaggtacatggatttctctatattatttgttacacctgcatgtaaatctacaactatcttaaaataaaagttgaattaaaaacaaaaagcattctccagctagggataccactttcctccctgggataggtgttcccctcatcctgacggcctgaattaggagctccttgtccttgagacattgagaaggttgaggacccagagtcccagggctgaggacaccattagatatgcagctgtacttatgcctctttagaaatattttctaaactcaaatcaggacatgggatataaattttatacattttttaaatttatatatgaaaagtctagctatgacaaattattcttaacggtatatttactaaatacataatatgtcacatataacatataatcaagtgcttaatgtttttaattaaaacaggaaattatgtaaaggtattttccactttttctgcatcagagttatatacacttcaggagaagtaggctccaaaagctgcacttgaaagaaaggactcttccttttaattgcaataattgacctcctactgcatcttccaggagactgaagtttaggcagcagggagcaagacagtttaggcataagacatatttccctccccaatccaaggcaaccagagttttatactacattgttgcttgaagaaccctgggcttcctttctcacacaaccctgatatatgaaatacattttgtaaatcagactgaacattcagctacatgtcttcatctctgttctaaataacaaactagcaaacaaatttttggagcacagtcctcctatttcttacatcctttccttttctgatcttttaatcccttggctctaatctggccttctgatagccaaataactactacttcagtggtctctgatttttttttttccccataacctacccagtgtgtgtaaccttgggtaaaggaaaatgaggcagtagttagttacctgtcttctttcttctttgggttattggttcattccctgcttgggttcatagttcacttcctagtagccagcctcttccctctagatccccagtgccacccctgcctcctcttgcaataaccctcacagaagctgccttcgcccaggcttgcccttaccatcactatggtgattcctagtaccttgcttcccacaaagagaaagtcccaactgagagagcaacactcaacagaagactttgggagatgatcagtgggctctgctagagtttatactccatgaatagtggacataactaatgttcataccagctacttgcatcggcataattttcatggttacacaaagagaggggttatcaagggaaaagaagatcaggtcagagatcattcccagctgggaatctggtccagctggatatttccccctggcccccacagacctgtttctctgtggcttgactatcatccagacaacgaccttttaacctgccagcatgccttttaggaggctttgcagtgtttgcagattatgtaatgtctgtgcttcagtagaaatcttacggaaacaaatggaggaagtttgctagtccaagcagtggataataaatcctgccctatctagatagaaactggttttctgtatcctttagtttatacacacatttttgttgttgttgttgtaagctctgaaaaattctaggaaccaaaatattcaaatatttcaaatcctgctgcccttttggcaaagatggcacatcctttcctgtaggcttgagttctggggcattagcgttcttctctagtatgagtgagtgaaatgtcatttcctatccagcattcagagaagagtagccctacatcagttagtgtacattataaactttaccacagtgttcatcaatgtcattttgttaactaggttattttaaatgttatttttaaagaacatatatggattttttcttcagttttaattctggaatgtttgctactctgtattttctttagatgttcttccacttcatgaaaaataggcttttcactgagacagctaagttgattttctgatcaaagctaaaagaaaatacgtcttagttcagcagtatagcaagtcaaaataattaactttaaaaaatattctagggtcttttcgttagttaggccaaattgatattttatttcctttcagttacctaactagaaaaacatagcacagagacatagggaatttctggtagattacattactttgttgaatatattcttgtaaaataaattttcataattttttcttcccttaatatggaattagctttttaagatataaaatgaactattaaatgagatgacaacataagcatttgcatcactaaagaatcataaatttcttctagaatatttttaactcaatcccagaataatttttgagtaagacgaaaccagactctcatgttaccttacctattctctcatttatctgagcagcttatgaaaatatgtttataaaacccaactgtggcttttatttatttatttatattagagacagggtcttgctatgttggccaagctagtctcaaactccaggcctcaagcagtcctcgaccttggcctcccacagtgctgagattacaggtgtgagccgtcatgcccggccccagctgcagcttttaatgattcatgcaagtataacctaaaattcaggaatgaaggaaaaggtttttttgtttgtttttgtttttgtttttcggtcagtgttaggatttaggacaagaggtgattagtgtggtactaggatataatctctggtttagaagttaatagcgcaatgaatatcttattttttctaaagaaatttttatatttcaaaattaacgccagtctaaaaagttgcattattttttaaaatcatacaacacctccagttgtttttcactttggtgaactcagtgtcgcttaggtaagattatctgtttgcagactaaattgattatcgtaatgaccacagtcctggcttatagagaaatacataataaactatgttgactacgaaacatttctccaaattatgcagaaagtttagaatgggagaattatttttttaggtctagttttcactttgttgcaacttggcaccattggaaaggtggaaaacaacctggaaataaataaataaccgctgaagaattttcccttggaagaaggtttcatctgggtttctaagactatctggtcctacttaaccttttgacaaaccctgctggtatagcctttctgagtacccagccttactctgcctacagctgtgttggcatgtggggctgctcatgtctccagaatcttctagtcttgcagctcgtcctcaaccctaaattttgttcccacacagccctgcttgacttgaaccttcctaacttccctacactcagcacatcttgccagcctcaggaatagtcagaatatgtgctaggaggagctttcctgtgaaaggctctttttcagtcagctcctaccctgcctcctctcaggcaagccctggatatgtgcagatgccactttctcccccactcaagtaccagagcctgataggcagttaagcacatcagcccttgtgctgtgaccaaaaacacccagaatattcaaaggccctatttctattcacttttatcatctgggattgagtttgactatagataacagaaaaccaaattacagtggcctaaacagatagggatctatttttctcatgtgccaagaaatccaggcataggcagtccagaggtaaataacatctcaacagtgccatctgggacatgggtcgtatgtttctactctgttgtcctttgcacatcacataaacctttatccttgtggtcatcatctcatggtcacgtcatggctcctgcaactctagacctcatgtctaacattcagccagaaagaaagggaaaggggagaaaggcaaaaggcctactcctgattaggctttggcttatttaaaaagagaatgtcctccctaggaacttttagattagtagccaaaatatcccttactctgaggaatagagaaaagccatatgttttgatttccccatgactcagtagagtcaatcaagggaaatgaaaatttttgttggcttttaggtagttacattgcgtctactacatccacactgcaagatggtcttgagattcaacatccatggacttaatctcagaatagcccacctaccaaacactgaggtaagacagtcagtccaccagaactaaaatccatcgttgccatgttcctgcagaatgccttcaggcgttgtaacccttggcaagataagctcacagtgaggtctaccgtttatttcttaattgtgacaggtcttcttcaaatcttgtctaaataagtacccatccacagtagagctcatctcagctcccaagattattgtattttttattttaaagggagttttaaaatgtttggcatttcatcggtattaatgggcttactaatgattattctcctcagccaccccccatcatggtgctgaatctaccaaagccttttcctaacctgtcaaaccttttcatgagtactttaagaaagtgatttttccttgtaaacgtggtggtatattttggacatgtagaatctgtcagaccttttaaataagatcaaagtgactagaagtagtatctcagtcaccatagaccaagagtaaaactcacatatatattgcggtatatacacccacaatggttgatttcctacctcccaaattcacctgtcataatgaaaccatgcccatctcctgtaattccccttgcttcagtaccaacaagtccctctcctcaataatggcaaagccaaacaaactggggcattctaatatgaatcatactagtggtactaggctacgtaccaccaaaacagcagcacaacttggcttgccaccttgcagttctactttagaaaactatttatgcatcaccttccattttatgattagttgtggtttaaattgcctctacattgtctctggctcttataactagtgtgtatgtggcctagtttctgactagtcccaacaggggctgttagacttgtactctggccttcagttattcatctcacttttataccagtacctgccagcttggcttaccagtgtcagtgtgcttcagcctctagttctggcctccatcatgatgtcagctcttggaccacttcctccccaccccgctttccaaagcactagctgagtaaccttctctgtcagtctcttcccatttatttcacttaacaacccttccttactgatacctgctgtgagctaactgttcagataagcactggagagaataatgaatgaaatatagttcctgcccttaagttacttacagtgggatagaagagaaaaaatatgaagaattttaatatatcatagggctatcataaatcagatacaaggtatgaatggtaatgagaaaggagagatcagttctattaatacctaggtaagtaacagaggagaagatgaatgaatttggacttgaaggtgagttgggatttttccagacagacaaaatggcaccaggataggcaattagaaggcagccttctgttatggattatgtgtacttggagaattgggtgataacatttgacctgtgagatgaatgccctattggtcttccagctttagccctcactcggctatttcaaaccttttagccagcataagttaaagttgtatagtaatttttggacattaagcaaatcttagaaaataatgttagtaaataacattagactcttcaattagtcttttttatacctgtgtttaatggagcaaaagtaaagaattaacattcttccaaatcattctctttccttcatgtttttgtttccattactactgctactagacatttccttcactgtagtgcttgaaattctgagttctgctggatttccaggaatgctgttgacagtcattgccaagagaaatgtgttttccacttaggaaattacacttctatttggtattattatttctgaccactatgttgtattatgagcatttctgaggaatgacaaagatggcttccttggagcaattactggaaaagaagctggtgttctattaaaaaaaatatatgcttagataggaaattaccaagaaataaataagggtaggaataaaggtgggatggagtacattccctgatgaaaaaatttactttcagaaaataggactccttacaaattatttgaatttttaagtttttttttaatttaagaatgacaaaaaagtacttaaaacataaatgtgtcccttcatgaattatcacaaaacaaacttctattaactgccacccactcaagaatcaccattgcccgagtctcagaagacccccttatgcttctgcccatctcacttactccattttcccaaatgtaactactactaacatctagatgtacctggttttggactttaaataactggaattgtataatgtatacttgtttgtgtctgacttctctcagtcaacattgtatgttgcaactttaattatttcatttttattactaaatacttttccactggatgaatgcactacagtgtatttatttattctatgattgatgaatacttgggttgtttccaatgtggtactactaaaaataatactgtcaagagcatttttatgcttgcctttcagtgaacttatgcacatatttctcttgggtccatccagagaggaaatgcagaggtcatatggtatgcatatgtttagcttcagaagacaatactaaatggtttccaaagtggttgtaccaatgtgtactcccaccagcaatatatgagtttatgttgcttcatttgctcaccaacacttggtattgtctgtattttttgtttttgctatgttttgtaatttgggtcaatctagtaggtatatagtgccatctgatggtgttaaggttttctaaaaaatattttgagattgttctttttctttgattacataatagttgtacatattttagggtacatgtgacattcgaatacctgtatacactgtgttatgatcagattagggtaaatggggtatccatctcttcaaatatttatctttgttttaagaacattacaattcttctcttctagctattttgaaatatacaattactataattttcccactgcattatcaaatacaggaacttatttcttatatctgattctgtttttgtaccccttaaccaatttctctcatctgttccaccccgcttcctttctaagcctctggtagtgaccattctactgtctacccctgtgagattcactttttttttttttttttttttttgagacagtttcattctgtcgcccaggctggagtacagtggcgcaatctcggctcactgcaaactctgcctcccgggtttaagcaattctcctctctcccaccttcccccgccagtagccaggattgcaggcgcacaccaccacgctcggctaatttttgcatttttagtagagacggtttcaccatgttggccaggctggtctcgaactcctgacctcaggtgatccgcccgcctaggcctcccaaagtgctgggattacaggcgtgagccactgtgcccagccgtaagattcactttttagctcccacataggaatgagaacatgcaatatttgtctttctgtgcctggttttcacttaacataataacctccaatcccatccatttttctgcaaatgacaggatttcattctttttatggctgaataatattccattatgtgtatataccacattttctttatccattcaccaactgatggacacttagattcattagtatcttgggtactgtgaacagtgctgcaataaacatgggaatgcagatacctctttgatacactgatttcctttcttttggatatagacctatcagtgggattgctgaactgaactatgtggtagttctagttttagttttttgggaaaactctaaactgttttccataatggctatactactttacattcccaacagtttacaggtattcccctttctctgcatcctcaccagcatttgttattttttgtctttttcttgatagccactctaactggagtgagatgacacctaattgtggggttttttttttgtttgttggtttgtttttaatgttttatttccatagattttggggaacaggtggtatttggttacacgagtaagttctttagtggtgatttgtgagattttggtccacccatcacccaagcagtatatagtgaacttaatttgtagtcttggttttgatttgcattttcctgatagtgatgctgagcattttttatgtacttgttggccatttgtatgtcttcctttgagaaatttctattcaggtctttggtccatgttttattcagattatttgtcatcatgctattgagttgtttgagttccctaaatatcctggttattaatcccttgttagatggatagtttgcaaatattttctcccatgctgtagactgtttcttcactttgttgattgtttacttttctatgtgtagctttttagcttggtgtaatcccatttgtctatttttcgcttttgttgcctgtgtttttgaggtcttacccgaaaaaaatctttccccagaccaatgtcctgtagcattccccctaatgttttcttttagtagtttcatgtcctattaaagtctttaatccatttgagttgatttttgtatatggtaaaagataggatcgatctagcttcattcttctgcatatggatatctagtttcaataatgtttattagagagactatcctttccccaatgtgtgttcttagtgcctttgttgaaaacaagttggctgtaagtatactgatttatttctgagttctctattacattccattggtctgtgtctgcttttatgccagtatcatgttgatttaattactatagctttgtagcatgatttaaagtcaggtagtatgatgcttccagctttgtttttttgtttttgttttttcctttccttaggattccttagcaattcggcgtcttttgggattccatacaaattttaggattgttttctccatttctgtgaagcatgtcattagtattttgagagagattgcattgaatctgtagattgctttgggtcatataacatttcaatgatattaacccttccaatccatgagcatgggatatcttttcctttgtgtgtgtgtcctttccatttctttcatcagtgttttatagttttccttataaagaaaaacttgttttgttaaattcacttcttttgttaaatttattcctaggtattttttagtagctattgtaaataggattgctttcttgattactttttcagattgatcactgtaaacgtatataaacactgctgatttttgtatgttgattttgtatcctgcaactttactatctttatttatcagttctgagagttttttgatggagtctttaggttttactaaataaaagatcatgtcatctgcaaacaaggttaatttgacttcttcctttccaatttggatactctttgtttctttctcttgcctaattgctctatctaggacttctaatactatgttgagttgaagtggtgaaaatgggcatcttgtcttgttagatgttagtggaaatactttgttcactgttcagtgtgatattagctgtgagtctgtcatatattgcccttatggtattgaggtatgttttttctataccccgtttgttgagagtttttattatggagggatgttgaattttatcaaacacttttccagcatgtattgaaacaatcatatggtttctgttcttgattctattgatgtgatgtatcatgtttattgatttgtgtatgctgaaccatccttgcctccctgggctgaattccacatgatcatggtgatcttttcaatgtgttactgaattcagtttgctagtattttgttgaggatttttgcatttatgctcatcagttatattggcctgtggttttctgttatattcttgtctggtcttggtatcatggtaatgctggcctcatagaatgagtttggaaatattccctcctcttcaattttttaaagtagtttgagtagaattggtattagttcttcttcagatgtttggtagaattcagcagtgtttctatcaggtcctggactttcctttcatgggagacttattattattatttagatcttactcattatttgtctgtttttctatttctttgtttcaattttagtagattgtatttttccaggaatttatccattacttgtaggttttccagttcattggcatgtagctgttgatagtagtctctagtgatcctttctatttttctggtaccagttgtaatgtttccttttttgtctctgattttacctatttgggttttccagcatgttggtattgtctatctttaaaaaaaaaaaaaaaactttttcattttattgatcttttgtggttttttagtctccattttatttatttctgttctgatctttattattttttttattctacaaattttaggtttgatttgttcttgcttttctggttccttgaagtgtatcattaggttatttatttgaagcctgtatttttttgacataggcatttattgctataaacttccctcttagtcctacttttgctgtatcccataggttctggtatattgtgtttccattttcatttgttttaagagtttttaaaaaatttctctcataatttcttcattgacccattggtcatttgggagcatgttgtttaatttccatgtatttgtacagttttcaaagttcctctttgcaaagattctagttttattccattgtggtcagaaaatatacttaatatgatttctattcttttaaatttgttgagactttttggtgacctaacatatgccctatgctggagaatgttccatgcactgatgagaaaaatgtgtgttctgcagtagttggatgaaatgctcataaatgtctgttaggtccatttggtctagagtatagtttaactgcaatgtttctttgttaattttctgcctggataatctatctattgccaaaagcaaggtgctgaagtcccttactattactgtattgcagtctacctctccctttatttctgttaacatttgttttgtatatttgggtgttctggtgttaggtacatatatatttattaatgtaatatcgtcttgctgaattgatatctttataattatataatggccttttttgtctctttttatagtttttgacttaaagtctattttatgtgctataaatatagctattcctgctctttttaaagttccatttgcatggagtatctttttccatctcttcacttttactctatgggtatctttataggtgagataagtttcttgtaggcagcatatatttgggtcttgttttttaatccattcagccattctatgtcttaattggagaatttagttgatttacattcaatgttattattgataggtaaggacttaatactgtcgttttacttgtttgcttgttgttttgtaaccctgtcttcctttcttactctctttatttgtggttgtgattttctctggtagtgtgttttaactcattgcttttgatttttattatattttaggtttttgctttgggttactatagtgcttacaaaaacattttatagttataagaagttacctataactaagctaatgtttttgtaagcactcctgtagtcccagctaattgaaggctaacgtgggaagatctctagagcccagcaggtcaaggctgcagtgatctgtgattgcaccactgcactccagcttaggtgacagagtgagaccttgtctcaaacacacacagacacacacacacactgatagcaacctaactttgatcacaaaaacaagagaaaagaaacaaatacaaaacatgtacacattaactccattctccccctacattttgaatttctgatgttacaaaaaataataaaagaatttacttttaaatttgataatgttttctttcatagaggcagaaaagcatgtaaatcaaagattgacctgttcttgtggtagtcagtttgtctgtgagtccatttggcactccagcatatatcatattggaagagtttcagatttttgaatttacatttccatgatagctaatgagggtgagtactttttcataatttgagtaacttctgaaatttctgctcttgtctattgcccatcttgatgtttggtttccagcctttttcttactggtttgtagaagttttaagataaattccagataccagtacctttgacatatggcacatatcttcttccactctgtggattgtctcattagtctcttaatatggtctttttgctggaaaaaaattctaattttaatgtaatttaacaatcttttgtggttagtgttgtagtgtcctactaaaggaatcttttcctaccccaaagttatgaaatattctcctatgttatcttctagaaatttaattcttttgccttttaccttttgatctacagcccacctacaattgatttttatgtaaagttgaaggtagaaatcaagtttgtcttttcttctccataggactatccagttgacccatcatcatttagtgaaaagaccatttattaattttttcttgctgtgtaacaaatgaacacaagcttagtatcttaaaacaacacccttttattaactcacagtatgtaggtaaggagttcatgctcaaatcaagttgtcagccaggctcttcttgtctggaggctctgggaaaaaaaaatccaattccgaaattgctcagattgttggcaagacatccattttgtgtggctttagactgaggtccatgttttcttgctggctgtcagccagggtgcttctctactcatatatatatatatatgtatatatacttaaagttctagggtacatctacacaacgtgcaggtttgttacataggtatacatgtgccatgttggtttactgcactgattaactcatcatttacattgggaatttctccaaatgctatccctcccccaaccccccaccccacgacaggccccactgtgtgatgttcccctccctgtgtccaagtgttctcattgttcaattcccacctatgagtgagaacatgtggtgtttggttttctgtccttgtgatagtttgctcggaatgatggtttccagcttcatccatgtccctgcaaaggacattaactcatccttctttatggctgcatagtattccatggtgtagatgtgccacattttcttaatctagtctatcattgatggacatttgggttggttccaagtctttgctattgtgaacagtgctgcaataaatatacgtgtgcatgtgtctttatagtagcatgatttataatcctttgggtatctacccagtaatgggatcgctggatcaaatggtatttctagttctagatccttgaggaattgccacactgtcttccgcaatggttgaactaatttacactccaacaaacagtgtaaaagcattccaatttctccatatcctctccagcatctgttgtttcctgattttttaatgatcgccattctaactagtgtgagatggtatctcattgtggttttgatttgcatttctctgatgaccagtgatgatgagcattttttcatgtgtctgttggctgcataaatgtcttcttttgagaagtgtctgttcatatccttcacccacttgttgatggggttgtttgtttgtcctctctcacttccttgagcagtggttcgtagttctcctttaagaggtccctcacatcccttgtaagttgtattcctaggtattttattctctttgtagcaattgtgaatgggagttcactcatgatttggctctctgtttgcctgttattgaggataggaatgcttgggatttttgcacattgattttgtatcctgagaccttgctgaagctgcttgtcagcttaaggaaattttgggctgagacaatggggttttctaaatatacaatcatgtcatctgcaaacagggacaatttgacttcctcttttcctaattgaataccctttatttctttctcctgcctgattgccctggccagaacttccaacactatgttaaataggtgtggtgagatagggcatccctgtcttgtgccggtttgcaaaggcattgcttccaatttttgcccattcagtgtgatactggctgtgggtttgtcataagtagttcttattattttcagatacgttccatcaatacctagtttattgagagtttttagcatgaagggctgttgaattttgtcaaaggccttttccgcatctattgagataatcatgtggtttttgtcgttggttctgtttatgcgatggattacatttattgatttgcatatgttgaaacagccttgcgtcccagggatgaagccaacttgatcgtggaggataagctttttgatgtgctgctggattcggtttgccagtattttattgaggatttttgcactgatgttcatcagcgatattggtctaaaattctttttttgttgtgtctctgccaggctttggtatcaggatgatgttgacctcataaaatgagttagggaggattccctctttttctattgattggaatagtttcagaaggaatggtaccagctcctctttgtacctctggtagaattcggctatgaatctgtctggtcctggactttttttggttggtaggccattgattattgcctcaatttcagatcctgttattggtctattcagagattccacttcttcctggcttagtcttgggagggtgtatgtgtccaggaatttatccatttcttctagattttctagtttatttgcgtagaagtgtttatagtattctctgatggtagtttgtatttctgtgagattggtggtgatatcccctttatcattttgtattgcatctatttgattcttctctcttttcttctttattagtcttgctagcagtctatcaattttgctgatcttttcaaaaaaccagctcctggattcattgattttttgaagggttttttgtgtctctacctctttcagttctgctctgatcttagttatttcttgccttctgctagctgtcgaatttgcttgctcttgcttctctagttcttttaattgtgacattagggtgttgattttagatctttcctgctttcctgtgtgggtatttagtgctacaaatttccctctacacactgctttaaatgtgtcccagagatcctggtacgttgtgtctttgttctcattggtttcaaagaacatctttatttctgccttcatttcattatttacccagtagtcattcaggagcaggttgttcagtttccatgtagttgtgtgattttgaccaagtttcttaatcctgagttctaatttgattgcactgtggtctgagagacagtttgttgtgatttccattcttttacatttgctgaggagtgctttacttccaactatggggtcaattttggaataagtgccatgtggtgctgagaagaaggtatattctgttgatttggggtggagtgttctgtagatgtctattaggtctgcttggtgcagagctgagttcaagtcctggatatgcttgttaaccttctggctcattgatttgtctaatattgacagtggggtgttaaagtctcccattattattgtgtgggagtctaagtctctttgtaggtctctaaggacttcctttatgaatctaggtgctcctgtattggttgcatatatatttaggatagttagctcttcttgttgaattgatccatttaccgttacgtaatggccttgtctcttttgatctttgttggtttaaagtctgtttcatctgagatgaggattgcaatccctgcttttttttgctttccatttgcttggtagatcttcctccatccctttattttgagcctatgtgtgtctctgcacgtgagatgggtctcctgaatacagcacactgatgggtcttgactctatccaatttgccagtctgtgtcttttaattggggcatttagtccatttacatttaaggttaatattgttaggtgtgaatttgatcctgtcattatgatgttagctggttattttgcccattacttgatgcagtttcttcataggattgatggtctttacaatttggcatatttttgcagtggctggtaccggttgtttctttccatgtttagtgcttccttcaggagctcttgtaaggcaggcctggtgacaaaatctctcagcatttgcttgtctgtaaaggattttatttctccttcatttacgaagcttagtttggctgtatatgaaattctgggttgaaaattcttttctttaagaatgttgaatattggcccccactctcttctggcttgtagagtttctgctgagagatccgctgttagtctgatgggcttccctttgtgggtaagctgacctttctctctggctgcccttaacattttttccttcatttcaaccttggtgaatctgacaattatgtgtcttggggttgctcttctcgaggagtatctttgtggtgttctctgtatttccggaatttgaatgttggcctgccttgctaggttgggaaagttctcctggataatatcctgaagactgttttccaacttggtttcattctccccatcactttcaggtacactaatcaaacatagatttggtcttttcacatagtcccatatttcttggaggctttgttcatttctttttactctttttttctctaaacttctcttctcactttatttcattaatttgatcttcaatcactgataccctttcttccacttgaccaaatcggctattgaagcttgtgcaggcatcacgtagttcttgtgccatggttttcagctccatcaggtcatttaaggtcttctctacactgtttattctagttagccattcacctaatcttttttcaaggtttttagcttccttgtgatgggtttgaacatcctcctttagcttggagaagtttgttattaccgaccttcagaagcctacttctgtcaactcataatgtcattctctgtccagctttgttccattgctggcgaggagctgcaatcctttggagtagaagagccactctggtttttagaattttcagcttttctgctctggtttctccccatctttgtgattttgtctacctttcatctttgatgttggtgacctacagatggggttttggtgtggatgtccttttggttgatgttgatgctattcctttctgtttgttagttttccttctaacagtcaggtctctcagccgcaggtctgttggagtttgctggaggtccactccagaccctgcttgcctgggtatcaccagcggaggctgcagaacagcaaatattgctgcctgatccttcctctggaagctttgtcccagaggggcacccacctgtatgaggtgtctgctggcctctactgggaggtgtctcccagtacatgggggtcagggacccacttgaggaggcagtctgtccgttctcagagctcaaatgctgtgctgggagaaccactgctgtcttcagagctgtcagacaggaacatttaagtctgcagaagtttctgctgccttttgttcagctatgccctgccctcagaggtggagtctatagaggcagcaagccttggtgctgcagtgggctctgccctgtttgagctttctggccgctttgtttgcctactcaagactcagcaatggtggacgcccctccccctgccgggctgctgccttgcaggtcaatctcagactgctgcgctagcagtgagcaaggctctgtgggcgtgggacccgctgagccaggcgcaggatgtaatcttctggtgggccattagctaagaccattggaaaagtgcagtatttgagcaagagtgtcccatttttccaggtacagtctgtcatggcttctcttggctaggaaagggaaatcccctgacccttgtgtttctggggtgaggcgatgccccgccctgctttggctcaccctccctgggctgcacccactgtccaaccagtcccaatgagatgaaccaggtacctcagttggaaatgcagaaatcacccgtcttctctgtcaatcatgctggaagctgcagaccggagctgttcctattcggccatcttggaacggaccacttctctactctttttttttttttttgatacggactctcgctctgtcgccgaggctagagtgcagtggcgcaatctcggcccacttcaagctccacctcccgggttcacaccattctgcctcagcctcccgagtagctgggactacaggcgcccaccaccacgcctggctaattttttgtatttttagtagagacagggtttcaccatgttagccaggatggtctcgatctcctgaccttgtgatccgcccgtctcagcctcccaaagtgctgggattacaggcgtgacacttctctactctttaaaggccactctcaggtcctttccatgtgagttccatcttcatacctactatggtgcatttaatccttctagtgctccaaatctctgacttcctttctgcaaccaaccagagaaaactcagattttaaagggcacatgtgaataggttaggctgggcccactagcataatcctcccttcttaaagtcaactctgccagataacatgacctatcataggagtaatatgtcatattcacagggtcaaatatttgaaagacgtcttagaattctgcttaccacaaactgtctttttcccactgttttgaagtgctacctatgccaaaaacaaaatagtcatatatatgtgtatatatatgtatatgtgtataatatatatgtatatatatgtataatatatgtgtatatatgtataatatatatgtgtatatatatgtataatatatatgtgtatatatatgtatactatatatctatatatatatatctatatatatatatacacacacacacacacacacacccctatatatatatagtccggggtgagtcatatatatagtcatttctgggaagagtttatgtagaatcaatatttcttccttaattgttcattgaattgactaatgaaatcatcttggcctggggttttctttgtgaagagattttaaattacaaattccatttctttaatatatgtaagactattcagggtatctgtttctttttgagtaagcttaacatttttgtctttgtgcagactttgtccattttgtccaaggtgtctacattcatgacataaagtttttcacaaaattatgtgattatccttttgatatctggaatctgcagagatgtcacctctctctttcctgatatttgtaatatcttaatatcttttgtcttctcacatttttttccctgatcaatctggctaaacacttatcaatttgattgttttattgaagaaccagcttttagttccatttattttcttgattattttattggcttcaatttcattaattaattgcattaatttctggtgtgaactttatttcctgcctacttcagagttaactgctcttctctttctagtttcttgcaatggaaactgaaataattgattttgtaatgtaagtttttagcgttataaatttctctctaactactgctttggccctgtcccacaaagtctgatatcttggagtgtgacttgcttctttcacttagcataatgttttcagggttttttcatggtttagcatgtgccagtgcttcattactttttattgatgaataatatttcgttgcatgactttaccatgttttgtctttccattcatcaattggtggacattcagattgtttgcactctttgactattatgaataatattgctgtaaacactcatgtacaagttttttgtggacttatgtttctaattctcttgtctataggtggaattgctgggtaatatggtaactctgtatttaatattttagggaactgccaaacagttttccaaagttcctgtaccagtttataattctaacaacaagacatgagggttacagtttctccacatcttgtcaacactggttattgtttgtctttttttattatagccatcctagtgaagtagtatctcattgtggttttgattatatttccttgatgactaatgatgttgaacatcttttcacatgcttattggccatttgtacagattgaatatcccttatctgaaatgcttgagatgagaagtgtttaggatatgggattttttttggatttggaaatatttgcatatacataatgagatattttgggaatgggacccaagtctaaacacaaaatttacttatattttatatacacctcatacacatagcctgaaggtaactgcacaatatttttaattttgtgcatgaagaaagttttgactgcaacccattacatatagtcatgtgtgaaattttccacttgtagcatcatgttggcactcaaaaagctgaattttggaagatttcagattttatgtttttacattagggatactcaacctgtacatcttcttaagaagatatttagaaatgtctgttgcaatcctttgcccattttcaatcagattgtctttattattgatttgtaagagttctttatatattatggctagagatctttatcagacatatgatcttttcccattctttagattgtctttttactttcttgatggtgtcctttaaagcataaaagtgttagttttgatgaagtccaatttatttatttatttttgtcacttgtgcttttgatgtcatagttacaaaccattctgtaatctaaggtcacaaagatgtatttctctttcctactgagagttttatagttttagttgttacatttagggctatgatccattctgaatttatttcctatgtcatgtgaggtagtgatccagcttccttcttttgcacatgtatatccacttgtccaagttccagttgttgaatgtttattaattttattatctttgtcatttctgcatcagttttgactgatcagtttttctcctcatttgggttgtattttcttgcattgcatgcatgataattttttattggatagcttacattctgaattttaccttgtcagatgctggatatttttgtacttctataaatattattgagctgtgttatgggacacagttttgttatttggagacggtttgatactttctggtcttgcttctaggctgttagttggtaccagaatggcatttggtttagggctaattttactccaccaccaaggcaaaaacctctctgagttctctagttaccagtccccaacctttttggaaccagggaccggttttgtggaagacactttttccctggaccaggctgggggaatggtttggggatgattcaagcacattacatttattgtgtactttatttccattattattaaatgttaatatataatgaaataattatacaactcaccataatgtagaaaagtgggagggagccctgagcttcttttcctgcagctagacaatcccatctgagggtgatgggggacagtgacagatgatcaggcattagattatcataaggagcacgcaacctagatcccttgcatgctcagttcacaatatggtttgcactcctctgagaatctaatgctgccagtgatctgacaggcggtggagcttaggcagtaatgcaagcaatggggaatgcctgtaaatacagataaagcttcacttgcttgcctgctgctcacctcctgccgtgtgacacagtactggtgctgctctagtggatgcattgttggttgtgacgttctctggtggactggtagaaacagtgactattctcaattcagggattattccctctaattctttcagatgattccttcacccagcttctcaaaatttctcatacaattgtgctgatctgcacctagctgaaattcagggggtcccctctgcagatctctggagcgttctctcactcactacagctttctccttctacaactctgccctaccaaaaaccactgcggtagcctccccaaactatcacctctatctccttgattacaaatgcattgttttaatcaggtgtgttaacatggcaagcatggagacaactgcctttgaaagaagagctacttagaattcttgaaaggagggggcattgcacactaggcagggcctcatggggaagcacccagttggggaaggaggcagaaggagcacaggagagcatggcccagagccttcattgtggtccccatgggaaggaagggatgaggcagtttaggcagctgagcaggtttagttaggattggctggtatgaaaaattttggtgggctttgagctataggagtagttcctagatgtcttgtgtccagccctgaaataattcccagcaggatttagagtgatttagagtatttggcttgttgtgtgagagttttctaagggaggtggttggtgggtatggcctttggattggttgtttgctcaatatgaaagaaatgttcaccgtggaatcatttgctatctctaagaatttagctagtcatgggaggggcagcctctccccgacaagcaaggcctccaagatgtcaaagcatcataaaatgaagacaataaaaaacaattaatgcacttatcaactgagggagattaccaagctctgcttgtacttctccttcttgcactgtagcctgaaaacttttcaaatgataagctgagacaatcataagactcctctcattcgtttctcttttctcagggattgctgtctttttgttgcccaatatccagtgtcttgaaaacttttttcttcatgtattttatctttttttttttttttagttgtttcaggattttaggtaggagggtaaatccagtccctcttactccatcttgttcagaagtagaactatggaaaatcatttccatttgaaattaaaattcagttgagatttttgggaaccaataacagtttaaacaggtttggcttctatatcgataattcagcagtctttattaacagattggagtgttagagcaaggtagcgaaaagacagagcatctaagccaagacaaaggatgggtgggaagacttcaagtagacagaatgccatgaacaaaatggctgaggatgcaaattttatgtgtttagaggataagtagctcacattcactggaaagcatgagtctttaaatgaagccaagcttcaacataggttgggatcagattttgtagagaaggctaatgggagttataaagaaaatgagaatttctctttcaataaaatctgtcttttcctcatggtgttccccaaacttttttttctcctaagcccccactaatattcatttttcattccttcaccttctcctaatatctaatccatttcttagctctgtaaggtcggccttatttgtagctctagaaagaacttcactgctcagtaaggtagacattagccatatgtggctatttaaatgtaaatgaattaaataaaattgaaatttcagttccttattgccctggccacatttcaggtgttcaagaggcacatctagccaagggcctttgtattggttggatagcacagggaacatttccaccatcacagaaagttatattgcatagcactactctagaatgtgctcagaggcaaaattttaaatttcatatgcggtataactatgtgaaaactaagacttaacaataaaattttaaagatttaaatgaagtcatcaaaatagtaatattgattatttttcactaagttcttgctaatcatttcttctactcatataatttctgcattttatatacagagcacatgtttatagtaggaaaaattatgtctttgatcatttattctttttcatactataagcactttaagtctcattctctcccccactagacaatataatagtattctaactagtctcttagaaaataatacaaattgaaaaagagaaaggctatagaagaaaaatgacagaggattagtctaagagagccaataccctactagtaggagttccagaaagaggggatggagaaaacaggggaagaaattaccaaagaaataataaaagaaaattttccagaaagaaagttggtaagtccaaacagtgaatgggcccactggatttccagtctaattaaggaatagaagacttgtattagggcatattcctatgaaacttcaggattctagagctaagacagctgagtttgaggataaggagatgggataggggcaggacaaagggaagtagtcacattccaagaaactaaaattgaaatcataaaccttggatgctggaagataataaacttgagggtaagcccctttcagcttaaaattctatatacagccaaactatgtgattcatgtgggaaaagaaacaaaaattagacatgtaaacatctataaaaattcctgtgtatctttttattagttactggaaaatgtgcttcagtaaagtaagggaataaaccaagaatgagaaagtcatgaacagaatccataaaacagggaatccagtccagagaagtggcaaagggaagtccaaggatgacagctatgcagcaggcctggagagcaacccgtccaagattggatcaaaagaatggaaggctctgtggggggagggacagaataaatgaattattggatgtgtttgtacatttgggaataaaatctgatgcatttttgaagaaagaattttcattgtctactcatgagaaaagaaaatcaagtaaaggcaacaaataattctaggaaagacaaaatgatgtacaaagaaagaaactataacctatttgaaagggaggcagggaagtgagaggagaagaaaggacaggcagatcacctgggattccatcaaccagagataacgtgttattattttattgtttatcttttcaaataaatctgtaccatacacataatgtatctttacaatagtgggatcatactgtactatttcatggtttgttttttgtcagttactattatttttaaatatgtatttgacattatatattctgcaggataatttttaataggttatagaataattaatttagtgaatagaccataatgtattaatcaaatctctgttgctttaatttagttggtccttataaattccctgaaatatagtaaaacaaagacagttctgattttggaaccgggacttagagtcttatagtccagcttcttagtatataactgcgactaaatatcctgttctgatttaggagattaggccaagaaaatgcagaatatttactcctatatgtactcatgctaatatcacagacagacaagaatgattaaagtgctactttttaggattatatcatggctatatttaagggagcatctcctaccctattctctgtctagagtgctgctaacccaagtatctgcatggtccattttctcatttcattcaagttcttctctgttcacacatccccttatcagggaggtcttttcagtgaattttacataaaataggccacctctgtcactgcacagacttatctcctaagctgattttatttttctccatagcactttctcaccatctatcatcccaacactaaaatataagctcaagaatagtgtttctgtcttgtttgttgctccatctccagcgcctaaaataaggcctggcataaagtaagtaggtgctcagtcatctttgaatgaataaacaaatgaatgagttaattaactgggacttagaaaacaataggaacaacccaagaaggcagtgaagggaaattctaagtcgacagtggtccaggttagagcagaaggtctcagggtcctggaaaggaggtctccaggaagaattgactcagaaaaatattgagtagagttaagagggaaaaaaaggtaactgtaacgaaaacaaatgttggaggacagagaatggaagtgtaagagtggaagtgtggttctagataccacttggctcagcagtgaacaatattcagaagtaaaggtgtaagtatattatttaagtaagaatagaataattcaaaataagatataaacatgttgagaagatggcaggaaggaatggtagggctgtaaaagggagctaaatcctcatctttcatagcaactcagcaagggtaatcaataagttatcaagaaatgacaagatgatcgtaagtgtttagaggtttgaagataactggtggaaggacagctaaaagagttcagagaggcttcctctaggaaacgggtctagaaatgggaaatgatggaaaagaaaactatggtttggcactacaaccatttctgtgatatttgatatgaaactatatatgtgtatgtgtgttaccttgataaaactttaaacaaggaaagcagaggcaaaatgtaaaaattaataatctgggagctgggtgcggtggctcatgcctgtaatcccagcactttgagaggccaaggcaggcggatcttctgaggtcaggagttcaagaccagcctgaccaacatggtgaaaccctgtctctactaaaaatacaaaattagcggagtgtggtggcgcatgcctgtaatcccagctactctggaggctgaggcaggagaattgcttgaacctgggaggtggccgtgagccacgatcgtgccattgccctccagcccgggcaacaaagagcgaaactccatctcaaaaaataataataatctggaactaaaattccagatggttgaagcaacagggatggaggcaggatgggaggaaggcatggggaaagtgcaagtatgctaaggtcatgccttgtttagatgagtaattccagacagcaagagaaaataaaaagtaagtttgcagtttttaggtaaggctaaccactagataaataaaaatggaatttatactttcagattgttaatgaaaagaaatttgttaaatcctgggtggggaggaaaattcatcattcacactaaagataagaggcagaaataacaagaaagcgtagggtatataaagcaagatgactggcgtcagaccaaatagctttgatctcaatatatgtgaatatgtttagtccttctatttaagaaacagagactttcaaactgcatttttaaagaagtccacttacatgatttcaagagacatacttgaaacaaaatgacaaaagattgaaaatgaagggaaggacagatgctggcaaaaaagaaagcaagataagaataataataccagccaaaatggaattcagggtacaaagcattgaatgaaaattttcttaccagtacaagaaagccacataaactcatgttatctctggcgttcttcctctttcctaggtatttgacatcttgaaagtgagcatcactttgcttattttgcagccagtgtaatgggactaaccctattgaaaactcctggagaactttaaacgtatttttaaagataaataatccttttagttgtttcctttaaaaaaaaaaaagccagtatattttcatgttagtaactgtttgcattttcttggtatacatgatttattggtaacaatttgtacttctaagccttaaatcgaaatagcacatattggtctggtaaaattgcacacatcatctgctgtggtatctgacattgggctgtggcactgttaaacttttgctatggagaagccagatgaggttggaagaaggttcttttaaatgaaatgctcttgtttccagagactgtgtgcatgttgcctgactcacattcctctgttggcctcaccagtatctctcatcagatagcacgtgccaaaagaaaggaggaacatgaatttactaaaattaatttgaaatttgtgtttgttctatatattctaaatgtttgactttttattttttaaatgtagctaatgctgcctaccttgggggccaagaaatgatggaggtggtgaagagagatgacgaaaccataaaggagcatttatgtaaggtaatcactttagtgctgcaaggggatagataataagtagatgggcagagatacgagggcaaaggactagaactagttagaatctgtaagactttaagggttggtagaatgacatagagttctacttccagttaaaattgaaattatccctgaaagttgtgtagagagtagtaaagctaattgcataataacttatttttttatcacctgtttttgttgaattaattttagaatcaatacttttctattttgtcaatgcattttagcctctctaggccttctactgagaaaactccataatatttatagaataaataatgttggaatataaatgaaacagtggaaaatacattatatgttatatgatctcatgactagtgagcctttcttattctctaatgtgttagagtaggaatgtcctgctctgaccctaagaccagttttgtgaaatattcaacatttgggagttatgctgcaaatactagaatcttgcacacacacatctggaagcaccaatctctgaaactataagagtagggtttagtatatgtctaaggtcaccctagaatttggatgactgtggtactcctgtggcatcatttgtctggctgtccgttctgagtaggacagaactgtactaatattatagccactagccacatgtggttatttgtggctagccttaattgagttgtgccataagtgtaaaacacacattggatttcaaaagtttagttcccccagaagcaaagtatttcattaatttttatattgattacctgttgaaatactaccttagatatagtggattaagtaaaacatattattaaaagtaatttcacccattcctttataattttttaaacattgtaactaggaaattctaaaattgcatatgtaccttgctttatgcttctgttggacagcattagtcttaaactttacaattggtgctgaactatgatacctgctgaaatgatccctgctgagtggcaaactctcataggactcaggagcaatccacaagtgaaatacgagataacccactggacttagaatgtctttataaaccttgatacatttgacttaaacttttctacattgttaattcttaattccataacctcccagtacaattatcttaaaacgagaagtgtatatgttcttaaaattttttttttagaatattgaaaatattcacccagagaggacttttgaaaatgccagtgttgttttgtctcatggccatagtggtcatcatatttctgaaatagcagttggctagagattgaaatttggaaaccagaaggaagccctcactagccgaagggagagtgctggggcctcaggagggccccctctccagggctttcagctacttccagtcactgagcgatgtgaaaatacaagaaaaacagtattttattttccatttaaactgtaagtgaatctgtttcaaaaatgcatttaagttcttccaggttgggagttcataaaaacagctcaactctcagttaataataagactggcagatgctcacttccaaaattcacacttgctgaacaactagacccatcatgtgtcagagtctgctttaccacctgtggaagccagctgctgtaaaatactcatcatttctggattcagcttgtgtgttgtgctcagaaaaaggtcaaagaaaggtgctaacttattcctgtcccaagtgaaatccatatgcaagtgtaatcattcccagatagagggctgttcatggtaattatgtcaggactgtaagtttactgaaattttatggggaaatacgggggtgtaatggtaaatggtagacatttcaaggttagtattaacacacagtcacaggaataaactttttcaactccaggcaatagttttgtttttgagatagcattaaatatacttctagaatatggggaaacaaagcattgtttcatttaatcatgcaaaactaccttgcagttaattcattatcctttctaccagcaaaattcaagctctccactagaataatacaattacagctcctaagtgaaactaggtacagagagacaggaagtttattgcaactttttgtttctgtaataaaaagaggaaacatgctgtaatttaatattggtagaagttgaatcaacatatgtcccagtctgcttgagaaaataaggaaacttaaaagtgcacatagttctaggaagatagtgggcattgcttcctgccttccaaacacccccgataactggtcaaactaaaaccaatgcccgggattagaaatattcctatttaggtatcttaatcgaggatactctttcccatttccacccaaacaaaggcgttcagaaacttcagaactatccaggactgtccagtgtgaatagtcatcaagccacacattttgttgaaaaatcatttcctgtatctcagctattcaactaaaaatagttctgaaaaatatatctttgtgccatccagccagaatgccacaggaaagttagtctaaaaataagctttctactgtatcatgcagacagcattctacttctttctcctccccaagagaactatcataccataatctacaggctttggttctaaatccaaattttctaccactggatttccatttgacacaagaagagagctttttatatgcttgaggaaaatgggcatttttagctctaaaagatctgttgagctgattatcctccttctgaggtccagtgactttatacacagtattggacataaagtaatttattttattaaaataatttttctttcctggagcaaatataacagactcatggttgtttccaaaggagtataccatggtttatggcatcataggttatttctttttcctttttttgtttttttgagacagagtcttgcactgtcgcccaggctagagtgcagtggcacgatctcggctcactgcaacctccacttcccgggttcaagcgattttcttgcctcagcctcccgagtagctgggattacaggtacccgccaccatacccagctaatttttactagagacagggtttcaccatgttggtcaggctggtctcaaactcctgaccttgtgatttaccggcctcggcctcccaaggtgctgggattacaggcatgagccactgcgcccggcctataggttattttgtcatttgactaaatcctgcttgtctagtgtcatccccaagaggccttcccagtccttggttttggttagatgttactccctatgtaaagttatattgcatttatcacacagtatttaaacaatcaaccttcacctttccccacgttgaggtaaggagctgtgtcttcttcgtcttgatgtcccctagggcctagcataattcatacctggtaaacagtcagtaaatatgtgctagacagatggatagatggggacgccattaactagagtgtggattctaaaccttttttgtgccatgcatctctttcgctctctcataaagcttttggattctactcacaatgatgttaagtgcataaaatacacaagattacaaaagaaagaagttgttggataatgagatataatagcagtcagaatttttttttaatttgtaatgataagtataatgttttagttaccttgagcaagttagtgtgatttaaaaatacttatcatttttatagatgacaaaatataggcattactaatattgtagcttgttgcctgtattcctaattgaaagaaatactaaattttggttagagattaacaaaagtaaacatgtaaatttttccaaagtttacataaccccttctccaaacctctggacctgtacaccgcaagcaaagaagccctgcgttagagaaactagaaaaggttaggtagcatgatgttgtggcttaggcactggcctgagaacaaaaagtcatgatatgccacactgaagagactgttttggggagctattgaagggtctaagcatgggagtaacagggtgacagtcaaaacatttgacaaccatgtgatatagggattgaccaatcagaatgtatgccagctatgaacagccagttcaggggcaccagttcatatcagttagccctaggaatttggtgagattaacaaatgagagggattatcttgagggcaaatgtgtggtataatactagaaaaggatgaaatatgagttggggagcctgtttacaaagcttttataagaactaaggcattgggattgaagatggaaagatttaggagatagaatcaaaggtactgagtactaacaggatattggggaatggagatggaggaatctaagattatttctttgtatctggacttggtaataagacagggaatatgggaagagaagcagcagcaagttatgggagatggctgaacaagtggttcattttggtacttgtatttgagatgccagtgggacatgcaagtggatccgtgtctggcaggccctggatgtatgggtgtaaagcttagaaagatatttgaggctgacttttggttggggagtgatgaggctgtagttaaagccaagagcatgggtaatagcagcctaaagaagtatacagaataaggagagaagacttctaatgattgatcattagggaacccagcttaagggttgggaggaagacgaggagccactgaatgaataagatgggaggggaggtaagaagggtgggaaggagaaccaggatgaaataaaccaagggaagagaatcaactgtgcgttttcgccaccccaatcccagtttgtctggaaacctctggagtattctctgtttcatgaggcacctggtgtgtcagaggcaaataagaggtcagcactcccttgttctgtcactgttctaagccataagggatgcatgtctcattcattgaaaagtgaactcatgtttggtttataaacttgaagttttcatttcaaacccacttagggggggaattctaaactgccatgaccacgtttggcccaggcttacggaaacagctggtgtgtgctactgccagactgaatctgagcatcactatcagtaagtaggaatctgaaattgctccaaagagaacacatgaagtgcagctttcagatgaagttaggcagtggtaggggggctgcctgtaaggtggtgctgcccctgcccccagagggccaggccagggctacagtgtggcttgggaaaggggcaagtgtcctcaagaacaggaactcctctgctattgctctctccccatccctcttagcctgccttagcccaaaggtgtgtgttgcctttgggagcaaaccttgtgcagttgtttgcagattggggcatgcaaatccttctgacatgcacatgtcctgcctgctgcagcataggaaatgctccctggaccagctcaccaggcctgcctttccgccaagcctcggtattctgaaacggattgtgttagttctgcctgtttaatttaaagcctgtccagaatgtcataatcatcctgaaaatagataggtttgtttttatctcaatattgtgaccttgaaagctttatttgggcaattgtgtgagcacactctggggttctgcagtggagcctggtgactgaggggaggcaaacgtgctggagagctgggctcccagagtctcagccaagcttcaaacaccaaatccacccttgttcatgaccctgcttaagttaccggacctcactgtgcctcctttattcatcaataaaatggttaataatagtatgtagcctcatacagctattccaaaaatatgctataattcataccttgtaattcagaccttataagagtatctccgccgggcacggtggctcatgcctgtaatcccagcactttgggaggccgaggcgggtggatcatgaggtcaggagttcgagaccagcctggccaacatggtgaaaccccgtctccactaaaaatacaaatattagccgggcatggtggtgcatgcctatagtcccagctactcgggaggctgaggcagaattgcttgaacccaggagggggaggttgcagtgagccaagatcatgctactgcactccagcctgggcaacagagcgagactccgtctcaaaaaaaaaaaaaaaagaaagagtgtctggaatgcactaagcattcaataaatgtttttattactattacaaagttagttatagcctagttatgcttctaagcactttaaaaagactatttgcctaactgttcctcttctcacatccccttttcagatactttcattgtgttaatgaaaggtattagtgatgctgagtatgtggccaagagaccccggaatgcccaatgccattctaaacaacagccaccactccccataagatgcctcaaggagctgttgtataggaaccataatgaggggaaaacacaatagtacttgatttttaccaaggcttgggcccattattctagtccagagaagtctgatgaactggacttagcccttctctcagttagttgagtaaaaccattccagtacatttgcccccttcttggggcacagatccagggaaggacagaaacacagaaggagactggcgctcagggcctcttactttgccagagggcctcgccagaggaaagcagaggccctgggttagcatctcagtgcagtctcacgtgagaaagagacaagccagtcacttgatggcctcgtggcttgtatgtgggagggagaggatcctggccctttacatgttagccacacggaaaggagagtgctgctctgcacaccgctgtatacacagatggttgttccagctactggagagtgagccacacagtgccccataggacctactcctcctttggcgctcccattcccaccgctcccctctgtgcctgcagagagaagcagggttcacgggcgggaagcatttgtgttttcacctccatcctcagccactttttaaaaatctttggagatttcagttctcattttctcaagaatggtaattgagccagttaggaataaacggaagagaggaaacaaggtaactggaaaaactgaagtccctaaaccatctccctttctttagcaattctgcaagtccctaaaaacagaggctcagaaagactgcagtgaaatgttgacactttgcagctgcctgtgtccccaacagggataagattttttaagtaactgaaaggagatgcttatatcacagaatcggtttcctttaacattgcaagattggggcttacatgtctttgactctgaggggaggggagaagtggaagcctgctgctgtcatccagactgtctggactctccccagaaatgggcatgcattggaggacctaacagtttatatcccgagcccgggaaagcttcaaggggatgaaaacaggagataaaggcagggtaggggccctagctgggaagtagggggcctgtatgtgtaggtactaatttgatcccttggtattcaaccgactgctttatatctgaccttttgcttttttcacaaacaatgaaacaagcaaaaaacctgctctagtgcaaattatttcaaagaaggaaagaaaacctggagaaagcaggaatgacatatttttcttagacctctggaagaaaggccaagaagatagatctctctcagaatctgtgtcactcctctttggtcactgtctctagtgctggcttcctggttgccctgccatgcagcgtaagctgccagggagctacagctgttgatgaagtgctaacagaaagccttgcattgctcagaaaagcggtgggcattaccttcactgctgcaagaacccacaggctcaccctgtgagctcaccaggaagaaaagtaactcccagaatgtcggtgcctttcttcatttggaagatgctcaaccaaggatagccaaagggcactatagcttaggctccaggtctcctttatgaggaaaagtaggttttattataaaagtggaagtatagaatccacaccaagagctgactgttagtggcggcttgaggatagggatgtgcttcactgtttatttggttggcgacttatcttctaccccacctgtctttctctacagtcatgtctggggaatatgacatgtacattttttagataatgagtaagtatatggtaaaacaactttgttttatattttaaaaaatgtttaatacttatacattttctgagcctatgtcaaaaacaacttatcagaatagaatatattttctcaaaggctaatgtaaggtcatgtggattctttttccttgagcagggcacagctcccacccacccagcccaccattgcccagtctgtgtcgaggagctccctttgtcctcacctgtaaagcagcagcctttaagagtgcccaccatgtggaaagcacttgatacactttgttttccagtcctcagcactagcccacaggtaactagttctgtcttactttacagatgagtaaacaggcacagggaagctaagtaactggtccaggctcacagcaccaataaatggcagaaccaagattccagtccaggtggatatggctcagggacctgtacagtcttaacactgtactcactgcactacgctcttcttggctgcataaggagcttgagtagtttcacaaattactttagaataatataaatacaattattttaccacactgtgatataaagacattatgagaagccctttcactctcagcatgacacccccagaaatgccgtttaccaccctgctcaggcctgcactatatcacaaaacaggcaccccacaaattgactacccaaagtagtctgtgccaaaggctcatcaagctggatttctcgttggaaacatttcaagttgtattgatgagatatcgtttgtaccaaacttgacttcgtggtgaattatgatttaaagagcttctaaaattcagtttatccataaggttaacaccaacaacaaatatatatatgcaaaaatatatagagatgcaaaactttcattttattagcccttttattcctgtaatgcctgtagtcctactgtcctattgaatagacagataattcagatagagatttttatgtgtggcttttaaaattgttattattttaagatgttgctatgtcattgaaagtgagttttgttattagctaaatcataagatgcttctaatatttctttgttcttactataaatcctctattagtaatgcataaaagcatgcaactccaaatgtatactaaaacaaagctttgttcatgttcactccctcagggcagaatttgggttttcctgctttggggtcccgtagggctttgtccatacctctgtctgcctgttgtatttaagagccagtttatataggtctgttctctcgcctagtctgtgagctgttccagggcagagaccatcttacacacttctgaatgtcagccacttagcctagtaccagatatgggatggaatcagagtcatttttggtggaactcattttaatctatcagcttcagcaattcactgtccaacagtgctgtttgtagaccccccaaaaagtggggaaaaaaaaacacacagaagaaaagacagatgtggggacaagctgcagcaacctgcagggatattttaggagggccctgtccccttaggtgcacattaaacagttaaagggaagttcatctataagcccagagaccatagtaaccataaatccactttcctgcagaaaacacaggaggaaaagccaaagcatggttctggagaatcaaaatctagactgaaaaaaagttaaattttgtgcttaatagaaaacaatgggttacttaacatgacaatttggaaacagaaaaatttctatctcaataatgtatactttttatcaactctcatgagttccaaaacaagtgctaaggataaataaactacaggaaataatttattttcttctaaacctttgaatgtaaacatcctgctgattgcctgcgattctttgttaacaattccagtactttcatggcagttatcacccccatgacacacagtgcctcagaagagctacatagactgtgagaaggctttcagtaaaggtagttgggaaggctgggtgctgtggctcacgcctgtaatttcagtactttgtgagggtgaggtgggtggatcacttgagcccaggagttggagaccagcctgggaaacatagggagacttcgtctctacaaaaaaaaattaaaaattagctgagcatggtggcatgcgcttgtgattccagctaccctggaagctgatgtgcgaaggtcacttgagctcgggaggtcaaggctccagtaagctgagatcacaccactgcactctagactgggcccagagtaagactgtctcagaataaaaaagtaaataaaaataaaggtggctgtgttagctcctgttgacaactctcacactctattagttttcatatccagtttaagacctgccagttgtcaggttttatgtttttataacgggtctatttactggaattgtaagtagtagcaaaaggtacaagttaggaatgttgtctgtggatttgtagcccagctcttcaatgcaaaattgcttgaaataagcaggttaatcttgctaagcctcaatttccttttctgtaaaatatagatacaatactttccttagagtattgttgtgaggatacaacgagataatacatagaaagtgcttacttagcacagagcctggccattgctctcggcccattggttcatcatggtgcattgcgattcatttttgcataccgataaataaagagtatgcactgttaaccactatgtttttggtgtccagttgtttctctttctttctacttcacccctcctcccccatcccccgccagtgccaccacacactccatactttctcattttcctgttcagggctgcaggtgcggagttctccggtcagatctattgcctgtgatttataatttatagggaaaaggaagtatctcaagccagtgtatgtaaaggcattagataaccatgtgttttacttgtaagccaagactttcataggaagccctttagagaatatatagcctgaaaaagaacttgtaaaagaaaacaaaattttacaaaacgtgagcccacccccatcatcagttaggcgtttaaccaaatggggcccacttcaaacgtttaaggattgtagagaatcgagaaataaaatcagataagcatacgggaggtctagactcctcactgttctgctgtcttgaacactgacaccactctttgttgaggttcctagcacatgccttggacagtgtgtgccccataattacttggacatatttgtctcttgataccctgaggtgggtgtcgggtcccttaatccatgttgatcacccctgctcaaatcactgccttaactgcatgtacggggatggtgtttgctcagtgctgagggcttatcaagctggacttctcattggaaacatttcaagttgtaattgcatcacagaaaagtaaatggtacgttcttcatggaaacagtctttgaaatgtcagacagaaagcaacagcggtgcgtacagtgacgcttttcttgttgaggaaactgtattagatgaggtcttttctgtctggctttcctttgagctgactgccattatcataggacttcacactgtagcttgtactggagtgagggtcctagagtagctttctcagggtccagtgatcttgaggcgagagcatgccctgcagcagaggaacagacctgacaggtatgaacccaagtctgactttccagatttctcagcagtgttccctgctctgaggaagtgctgagtaactgcatagcgactgttccctatcctattccctgaatacaatcgaaaagattgctggtggtaaatatagggagtagcttagagagagcctaatgttatcagcactattggtagataattaatacctgcaaatagtttgtactcttgacagtatttcaaggcaaagctatagcagggtagttgctgagagatccggggaaacgtgtttttctactagtggaaagaatagtctcccactggttgtgaggttgcagcattttagagctacagaaagagctgagaccaggaggaagaactaggcaactgctaggctctcatattctctaggaagcaaaagaagttcttactctgctaagaaccatggcaaaatgaattctggctttaggggctttggaatgcccagaaatggttggagtgaggaaaagtaggagaatgcaaagaatgaattaagtgataaatctgtaagttgcaggtcctctgcagcgtgcaaaactggaaccccaggtaacaaccaagaaaacctccatgaagctggaatactatgcagtcataaaaaaggatgagttcatgtcctttgcagggacatggatgaagctggaaaccatcattctcagcaaactgacacaggaacagaaaaccagacatggcatgttctcactcataagtgggagttgaacaatgagaacacatggacacagggaggggaacatcacacaccggggcctgttaggggatggggggtaggggagggatagcattaggagaaatacctaatgtagatgacgggttgatgggtacagcaaaccaccgtggcacgtgtatacctatgtaacaaacctgcacactctgcacatgtcccagaatttgaagtataattaaaaaaaaaaaaaaaaaaaaaaaaaggaaacctccatgaagcaattcagagtaagtctgccacttgaggtttacttgttcataatttactctctggagtactatgttaaattttttcctctataaagtgtttttaactaaccatctaaatattggttaaggcatcatgttattgtaatgaaggccattgttttcgtaagatcagtctcatctgtcccatattcaggtcatggatttaataattgatacactcaaactatccagtgagcaataacgcctgcttccctgcactctcctcccccagcacttgatcacctccaatccttcttctcgttgtggccagagtggttttcctgacatagggacctcagcatgtcacttcactgtgcagtcttttttgccttgtggacttcgggataaagcgcaacctccttggcatgcatagaagatgctgtccatgacctcatccctctctgcctctccagtcttatctcccaccaccctatattccagccatgtggaattccagttccccacacatgccatgctctttcaagctttggtttgcttggtcttctccccacagtgtgctgccccagcttgaagactcaactgaggcatcaactctggggaatctttcctgcctactacttctgaccagctgcacctcacctgagctctcaaattgtcttgtatacatggggtccccttctcccctccccccaagactgtcttatctctattttccaggttcctaatacaaagtaggtgctccatttgtatttgatgaacaaaggaatgagtaagcaattcagtgtctgaatgaaggagcacatttggtatattagggaagctgcaagtgactacagctggccaactaggggctggagctaggcatagctctgtctttcagtgataacagaggtcaaaggatccttaagatttagttcttggtttttgtagaaattgccactatctgttcttctgaatataagatgttgctttgttgcctttatttttagaactaacagaactagaacatagcagtttttcagtgaaacacagcagcctagagcaatatacatatatatcacatgcaggtttaggtagatatccattcagggtcttagtaatgccacagaggaggctctgtctccattcagctgcttgctgtcaattgaagtatgattattgcacttccccactgaatcaacatacaggctgcatagagccttttcttagaaaggtcataaactctctcaggattctgatcacatttcatcagctacattggaaagcctgagtctatctgatctgtgtttgtattcattcaacaaatacatcccatatgactaccatgtggctatttggaaacaactaagtttattaactggtcactagtcattcagtgactatgtctcaataactgtcttcgtcatcctcaccggccttcattccagtgtccatcccaaccttagtacacaaaactttcctggtaagtcgtttcagtgaattatgagtgatctatcacacaagagtctcccagcatggggatcttcccaccaaattcttctaagtgcactcctgtacatcgtgaagccttgctgccttgagagagccacactctggagagagcttagggactagctcccagggtcaggcgtaggtgctgtcctcagagcactgccggctgctggtgtcatatctgtgtcaggaagggaacgtgttttctaataaaaggtttttgtcttgtctttcagcttacattttattatggtactatagatccttggtgtccaaaagagtactatgaagacattaagaaggattttccagaaggagacattcgactctgtgagaaaaacatacctcatgctttcatcacccattttaaccaggaaatggcagacatgattgctgactccctaaaggatgacttgtccaaaatgtaaattggcctgaggaacaagcccccactgccagtacatggaggcagtcagtgtactagacttagtaggtaaatgtttaattttgaagactgatattagaaatgaagaaagtgagaacctttgtcttacaaaccaactctccgctcgccatgttataggctgaagtaaacacagttgatgaatcattccataggtttaaccatacattttccaagactcagggaacacagtgatctacacagagtcttgtgtttgcacaagatgcccagtggcaccatatggtttattttggtaggcaggatctttgcagatgaaaaaaaaatctacatgtacttgattttaattgagttacattgtagaataggctcctctggaggaaattatgaaatacctactagaaaatgtaaaataaatcagtgaatgttaagagtatagttagatatgtgaagtgtatgagattatgacaaggatacactcatgttccaggagcaggaagtgaacctgggtctcctgtaagacagaagatgaagatgagcccaggctaacttagcacagatcttggctgagatcatcaatgtgacgtctaatgtacctgcactagacagagaataaagttcaccagacattactctggtcagctaaccagataaagaattgttgaaggaccccaactgtgcctcctgccacaggacaaccagcaagttctatgctgagccttagcctcccaggttataagctccctgcaggctcctcctctccagagccaggatggagaggcactgggctgtcccaaagcaggcttggatgtgccaacgtacagttgctccttctgtaattcttgcactaaaactccattaaagaccatcaatgagccaaatagtgtgctagccattgaggatggagttcttagctacttaatgattcttttcttctggaaatcttctagtgaataatttttaaaagcttcttttaaactgctcagtaaaacattgccatacattaactctccatttctgcattaacttcatttgctggaaagaaattattttgttaatgaaccaaacccagccattaagttatgtgaattcaccttctctagacacattgaggtatggcagagaagacacatattccctggcctagagtgggctgacaatattgctgcctcccctaaattgactcaatcttgagaaccacatactgcagtgacagttgatcatggatcagaaatattcctttttctcctagaggaaatccctcatggcattatcattccctaaggacaatgagatgtccctccgctcaaatcctaaagccccctgatgaaagatttggctctgatttgctgccaacttattggtaagtgctgaatgagttactgtgctttggcatagcttctacatcacagcaagtgacttctcagaggggaaaagccaagctccagacaaggagtgctgttagcccaaggggaagagctaatagatacataggccgtaagcacagggctgtacacagatcctttattggcatctgcatgagaggcctagaaatcggatgttagaagctaggaatcatggctctgagcgccttgcatacaggagatactcactgatactaaatcaaggcatgtaaacaatactgggtaaatcatacctaccagaataaagagtaacattcagagcttttcttttatctgttattttaaatgttactccatatttcaaaagtctgcacgtatgaaattgtgtcttatttctggtttttagagcctaagaaagatactcattcttaattcctatttatcatctgaaaaccaaatgaatttttgaaataaatgttttaccagcatttctgacctggtctggcctgatctctgtgttgggcaagagagggtacaatttgagcagttctcctgagttagactcggctcaaagtctctcttttaaagtgaaaagccacctttctcattgcttttttcataggtggaagaatcagatttcaagagactgaagttcattctgtttcattagggattagactaaaatggacaaacagtggaagaaatccattttccagaagcagctctgcctgtatgtcccagtcaaccacatggatggtctttgtgaaagttttaacttcctgcagagttaccgagtgctcagcgattgagctttgaccacacccgtgtttgttcctagtctgttcccagccataagcatctccacaagccctctgtggcttgtgtggcctgatgtccatggccaccaagggcctctcaccatacgcttctccactcaacctttggagagacacggaccaccaaaggcttgatttttcttcatcctacattatattcaaaacaaacaggctgggtgccgtagctcacacctgtgatcccagcaccttgggaggatgagctgggaagatcgtttgaggctaggagtttgagaccagcccgtgcaaaaaacgagacctcgtgtctaaaataattttt

SEQ ID NO: 15664 - DNA, 139117 bp, Homo sapiens; identical to SEQ ID NO: 1210

SEQ ID NO: 15665 - DNA, 139117 bp, Homo sapiens; identical to SEQ ID NO: 1210

SEQ ID NO: 15666 - DNA, 136477 bp, Homo sapiens
acttccggtctcgtgccgccttcccaggaccctcagggagagcgggcagccttccaggtggacaggtgaggtacagcttgccgagctcagggtgactgcccaaaggaaggacgggtgggcaggcacgcgggatctggcgccccttcttctctatggttcctcgcagagcccctgttgccctgggccagatggcccgtagcagcaaaaataatactgttccgacagctcgcgagttcggagccacttggcctgggagtcccttgagttgcaggccgggcagtcgctcacccgagcgcggtaatgcagcatttgaacccctaagtgtagcccacctgtagggagtcttatggtgcccccgcggaggagtagaggccaaaaagttgggcagctggccgggaagaactcgctaggaggggtcaaactctgggccgggagtgttctttgcccccggcgtttagtgctcacgccgccttttattcacgctgaagaccttaaccgtaaaccctcatccttgggtcttagtttggttttgttccccacgcaagacagaatgcagattggaacactttattccttggttaattcgtatcttccctcgcaagtagttaccggacacctgctttgtgtcctgtgtaccaaacacaagagttgatagtcctggccgggcgccgtggctcacgcctgtaatcccagcactttgggaccccgaggcgggcggatcaggaggtcaggagatcgagaccatcctggctaacacggtgaaaccccatctttactaaaaatacaaaaataaatacataaataaataaattagccgggcgtggtggcgggcgcctgtagtcccagctactcgggagactgaagcaggagaatggcgtgaacccgggaggtggagcttgcagtgagccgagatggcgccactgcactctagcctgggcgacaaagtgagactcagtctcaaaaaaaaaaaaagagttgatagtccttgagttgaaagaacaaatctgtatggagaaagagatacaaccaaaagaaacccagaagatttagaagcatctccagaatgtttattctcaaaagctgttttttaattaaacttctttctgaaactatacgtaggagtgtctcttgtgtgtttccccatttttccacctgaaggttaaagacttagaaacctgctaaggcccctctttccagcatgtagcattctagggggataatcagggcaacacagtgggtgcccatctaaaattttatattttaatattttgctttttgataacttaatgccttcagactggaggattttttctttcttttttttaatttttttaaaattatactttaagttctagggtacatatgcacaacgtgcaggtttgttacatatgtatacatgtgccatgttggtgtgctgcacccattaacttgtcatttacattaggtatatctcctaatgctatccctccccactcaccccaccccacaacaggccccggtgtgtgatctcccccttcctgtgtccaagtgttctcattgttcaattcccacctatgagtgagaacatgtggtgtttggttttttgtccttgcgatagtttgctgagaatgatggtttccagcttcatccatgtccctacaaaggacatgaactcattcttttttatggctgcatagtatcccatggtgtatatgtgccacattttcttaatccagtctatcattgttggacgtttgggttggttccaagtctttgctattgtaagtagtgctgcaataaacatacatgtgcatgtgtctttatagcagcatgatttatattcctttgggtatatacccagtaatgggatggctgggtcaaatggtatttctagttctagatccctgaggaatcgccacactgacttccacaatggttgagctagtttacagtcccaccaacagtgtaaaagtgttcctgtttctccacatcttctccagcacctgttgtttcctgactttttaatgatcaccattctaactgctgtgagaagatgtctcattgtagttttgatttgcatttctctgatggccagtgatgatgagcattttttcatgtgttttttgtctgcataaatgtcttcttttgagaagtgtctgttcatatccttcacccactttttgatggggttgtttgtttttttcttgtaaatttgtttgagttctttgtagattctggatattagccctttgtcagatgagtaggttgcaaaaattttctcccattctgtaggttgcctgttcactctgatggtagtttcttttgctgtgcagaagctctttagttaaattagatcccatttgtcaattttggcttttgttgccattgcttttggtgttttagacatgaagtccttgcccatgcctatgtcctgaatggtattgcctaggttttcttctagggtttttatggttttaggtctaacatttaagtctttaatccatcttgaattaatttttgtataaggtgtaaggaagggatccagtttcagctttctacatatggctagccagttttcccagcaccatttgttaagtagggaatcctttccccatttcttgtttttgtcaggtttgtcaaagatcagatagttgtagatgtgtggtattatttctgagggctctgttctgttccattgatctatatctctgttttggtaccagtaccatgctgttttggttactgtagccttgtagtatagtttgaagtcaggtagcgtgatgcctccagctttgttctttttgcttaggactgacttggcaatgcaggctcttttttggttccatatgaactttaaagtagttttttccaattccatgaagaaagtcattggtagcttgatggggatggcattgaatctataaattaccttgggcagtatggccattttcacaatattgattcttcctatccatgagcatggaatgttcttccatttgtttgtgtcctcttttatttcattgagcagtggtttgtagttctccttgaagaggtccttcacatcccttgtaagttggattcctaggtattttgttctctttgaagcaattgtgaatgggagttcactcatgatttggctctctgtttgtctgttattggtgtataagaatgcttgtgatttttgcacattgattttgtatcttgagactttgctgaagttgcttatcagcttaaggagattttgggctgagacgatggggttttctgaatatacaatcatgtcatctgcaaacagggacaatttgacttcctcttttcctaattgaataccctttatttctttctgctgcctaattgccctggccagaacttccaacactatgttgaataggagtggtgagagagggcatccctgtcttgtgccagttttcaaagggaatgcttccagtttttgcccattcagtatgatattggctgtgggtttgtcataaatagctcttattattttgggatacgtcccatcaatatctattgagagtttttagcatgaagagctgttgaatcttgtcaaaggccttttctgcatctattgagataatcatgtggtttttgtctttggttctgtttatatgctggattacgtttattgatttgcgaggacttttttctttgttaaaatgttgctctgctttcagcattttctcccttgtagtattaccataatgtatttaagattgagcacttaattctgaagtcactttaagtatacctcaaccaaagggaaattaatatattatttctaatgagtgtatttaatataggtaagtagtttgtacacttgtgaaattcttggcattaattgatgtccagaagctgaaagctactctctggtacattaaaaaaaaattgtgtgtgtaattacaagaaagtttgatgtcacagttgcaaaggagttgtgcaaaacaaattgcctttttccagtaaagataattcagcaagttcatcttgagtgtagtgtgtggtttcgtttttaatatgtcctcagcagtagtcatagattttatcttcatcatttaagctttattttctggcccacttgcacagatttaagaaaaatctcactggggttagtgtgcagtcattcagacagcaaatacagcaaaagtaggtgaaaatgtaaaagtcattaaaagaagaattgtgaaattgctcatctcgcaaccacatcaagcaggagcaaagacaactacacagaatcttggtgtaacatacactcattaccacttggactttctcctacagtattttgcagtttgttttttggattctttagtgttatataatatttcaaagtaatatgtgactgggaaatattggaataggtatcagaagactgtagaatttattttgccatttaaatgcttatgtccttgaacaaaaaatgtaaacatctttgaccttcaatttcttgttctattaattgcctgctttttaggtctgatgagaaaggaagagaatataatttgcaaataaaaagaagcaaaaaaaaaaagcagtagttttattgcaaggggctagatggtgatcaagttaggatatagaaaacaattacttgttcttacatgttattctggagaaagatgagatggatacccatagttacagcagaagcgtaaaaagaattctgtttatgcatcatctgtttatgtgttgactttcacctgtatgttttcaagtttatatagggctatgtgctaagattcccaattttcccctttcataccacttattataccagttgcaattaaatacatatataattattaataacttttttaaaaacctttttgttttgagagaattgcatattcagaggaagttgcaaaaaactttacagggaagtccttgtgtacccttcagactgcctgcctcaatggtaacaacttggataactgtggtacgatattaaaactgggaaattgacattgatacaattcacagagtatatttccatttcaccaactttataaggactcatttgtgtgtgtacacaggtctatgtgtagcttcttataactaccgtaatcaagataaagaattattccatcaccacaaggctcccttatgctgcctccttatagtcagtctatcttgtcccagccctatccctaacccgtggcaaccactgctctatctctataattttgtcatttcaaggatattgtgtagatggactcataccgtatgtaactttttgagatccatccaaattgtgtgtatctgtcatgcatttctttatttattgctgagtagtattccatgggatggctatgctacagtttgtttaaccattcattcattgaagaacatttgggttacactattataaatagagcttctatgaacttttgtctgaagatttttgagtgaacatacatttttccccctctgggataaatgcccaagagtacaattgctaagtcatatggtaagtgtatgtttagtgaattaatacttctttagcttgttgatatggtgagttacattgattttaaaatgttgaacacaactggtataaatctcacttggttaaagtatataattatatatttccatattctatttgctaatattttgttaaggtataggtagagaggtgtgagaggttaaggtataggtatgagagatgtgttgtagttttttgcttgtttgttttgtactgcctttgtcaggctttggtagggtaatagtattctacatggtttttagtgataacccttgtttcattattgctactgtattagtaatttgtgtcattttatctttttcagtgatgatttgctggttatagtgacctttttcaaagaactcgctctttatttcatctttgtctatttttatatttttaatgtcattgatttctgctcttatatttattattttcttccttctcactttaggtttattttgcttcttgtctagtgctgtgattattagtttaaggtctttctttgtttctaacgtaagcatttattgctataatttccctcttggcattgcttttgttgcatctcacaaattttgctgtcttgtattttcatttctatccagttctatatagtttaaatttttccttagaaatttgcttgacccatgaaaatatttgggagtgtgtcatttagtttccaagtgtttggtgatttacctgttgtttttctgttgttgatttctagtttttttccacaatgatcagaaaacataagctgtataatttttaatttttaagtttcttttatgactgagggtatggtgtatcttggtggatgttccatgtatgcttgaaaagaatgtgtattctgttattattggttgcagtgttctatacatgtcagttatgtcctgttcattgatggtggtgttctgttcttctgtgtcttcttgatcgtctaatagttattttcgttgctgaagatcccaactataattatggatgtctctgtttttcctttgagctctgttggttttggcttcatgttaaatatctgttgtttggtgcatatacatttaagatgttttcttgatgaattaatccttgtatctttgtacaataattttctttgctctgaagtctacttaactgatggcagtgtagccatcactacttaaaaaaagtagttagtatggcatatcttttccatacttctgttttcaacctaccaatgtcattatgttttagtgaatttcttatagacgctatatgcttgggtcttttaaaaaagaaacttctctgccaatctctgtcttttaactagtatagttatatcatttacacttaaaagtaattgctgtgttagggcttaagccagccattttattatttgttttctgtttatttcctgtttttcatatctgttcctcttttctggtctttctgtaggttgcttgaatattttcagaattctatttgacatgtttatagtgtttttgagtatctggcttagttaaccttttttagtgtgctttgggtataacaatagatgtaacaacttatcacaagggatacttttattgccttttgccaattgaagtttagagacctttcttccatgtaggtcctttctccttttccctttttaaaatttaatatttgtattttctctatacaccttgaacaccacatcaaatgttgttataacgtttacttcaactatcaaatatgatttaagaaactcataagatgaagaatagttcattttatatttaccatgactattacccgttccagtgttcttcctttactcaaattaaaccttattgatacatcatttcctttttgtttgaggaacttttttttaggagaacctcctaaagatatgtctgttagtgacaaattagtttccgtcatctgagaatgttgttcccctttgttcctgaagggtggttttgtcctatatggaatttggccttgacagttctttttctttaacatttgaaaaatgtgccatttctttctggcttccatgatttctgatgagaaatctgatggcattcaaattattgttccccttaaaggtaatgtgccatttctctttggctgcttttgagatttttttctttgtttttaattttctaaacttgacttatgatgtatcttttatttttattttttcccacttagggtttttctcagcttcttgactctgtagatttatgtcttttgtcaaattgtgaagttttcagctattatatctttatttttttcagcgccatactttcttctcttcctctaaaactctgattggatgaatgttaggtcatttgttattgtcctacaagtccctgatgcctttcttgtttctttgtctgtttttctgtgttcagactaagtaaattctgttgatctgttttcaagttcactgatcctgttctctgtcaattccactccactattgagcccatccagcaagtttttaattttaattagtattttttctattttgtaattatttttggttcttactttttaaaacatttcatccttcaaggagagctactttcaatatacatggaatttcttggaaaaactagtaacagttttaggttatttgtatatatgaactaatgttactcaagattttaaacctctgcagagttatctctgtaattagcagatgaagcatgaacatacataatttttttctctttttgtctcaggtaattccttgttacaggccctaataaaagggaaatggggaaggaaatggagaagagaatttaggccttggcaaattgaaaattgtctgtagtatctcactgacaggtaaagtaggaattttgaaattagagaaaaggaaccaggaatgaagatgaaatgaaaaatttatatttacttcactaaaacttttaaagttgtcatatagtttcagatttaaaaagctatttcttccagcctaggcaacatggtgaaaccccttctctaccaaaaatacaaaaagttagccaggcatggtggtgtgtgcctatagtctcagctacttgtggggcggaggctggaggatcacttgagcccagaaggttgaggctgcagtgagcgaagattgtgcccctgtattccagcctgggtgacaaagtgagatcctatctcaaaaataataataaaaataaataaaaaatcaaaaagttctttctcctttccttcatttcccttgaagaatactgaagattttacatagatgacaaattaggtaaatctaagaaaaaacaaaaattaagtagaacaggtaactttcagtggccatacttgagatttaggttatattgactgctgaggtttatcagtttgattcctatccctacaatataattaaaaataaaccatggaccccccccccccattgtcagactcactgacagtataacattgtgattaaaaagctctttctcagtaagtatgaaaagttaatgcatgaaaaataatatatgttaatttagtgggggaaaagatggtttctgtattacagtggtattaacacaagtagctttccatctgaaagaaaataaagttggatccttatataatggattaaaggtttagaagtagagactaataaaaattaaaatagacatctgggaaacaatatgtaaaatatggaaacccagaaaagagttagtatctgcattatacaaagttttcttacagactgataagaaaaagataactcacttggaacctagacaaatgatatgaagagacaatttacagaaaagatagtctaaaaagctaacaaacatgaaaaaatgcttaaacacacttgtagtcagtgaaatgcaaattaaagagtaaggtattttatatccaaagactgtaagacttacaaagtgtggtatcacttagtgatgatagggttgcagagggaaagataccattctacatcgctaaaagaattacattctttttttgagaataatctggcaacatctattaaaattcaaccagtaatttcacacttggcaatctggcctataaaaacaaaagcactggtagatatgaatgtatgtgagaacataggtatttaagggtacttattgcagcattgttctgaaaaaactgggaactaattgagtgcttggcaccagggagatggtcatataacttatggtatatccacattatggaaccattaaaaatgaattacttatataaactctttgacttggcaggatatccatatgttattaagtatgaaagcaaaatgcatagaagtatatataatatgctactatttgtcaaacactggcaactcattcatgaaaaaatacataaatgcttaacatatatttgtgtataattatagaagaatatggaagactatactaagttaataacatgggtttgggagagatatggatggtaaggaggagaggtagagtggaggcatgatgcaaaaggttaaaaaattgtttagaaaaatcacagcatgcattatatctcatttatccatataagtgaaattatatatatgcatataagtagaattttaaaaataaagaacatgagctctggaatctttcagacatttctggattcaaattctgactctgccactttacaacttactagctgtgtgacttaggcaaattgcgtaatgtctttgaatcaattttctcacatattttcttggggtgggaggatgaaataatagtacccatctatagggttgtcatcaggattaaatttagatagcatctgttaagtgcttagcacagtacctggcttacagaaagcactctcagttattagttcttactgttgccttggttcttacgctcttggacatttgttaatatctatttttaaaactttatcaccatcctgccactttcttgaaacactcctcactggcttacattactttacatgtcttagttaatgcctgtttctaattgttcctttttattttgctgatatcttttttccttacctatggatattgctcccaaaatatagcaggggttgccaaagaagcttttgaattagggtgactgggagaatattagtccatatatggcagcagagaagtcatgatgtagggtttatagggttgatttttaaaacaagatgattttgatacttgctctgcagaagttttatgcatcaatgaggcacccagatgaaaatgctcaatagctggaaaaacttgacaggaacttgagaagtagatataaaggattctctcacttggctaattctcgaagtggatgtaatctccaggggagagcatatagagaagggaatccagggcagaaactttggggacagggaataggagaggaaaaggttcccattgaggactgggaggtggcatagaagccaaaatagagaatttctttaagaagctgctggagaaactgtatgtctactttgttctctcttgagctttagttctgtggctcacattgtcttctggccttgttccttattttcttgaaacttaaactacatttgtaactaatcccagcttcctttcctcccactaaattcccttcttttacatttccccctatatgtatgtgaggagtgctttcattcccctcatctttggcatcaaaatctgtcatctctgcccctttcccttccctggttctccatatcattaccaagactctcattcactcctttttcattcccactcttgcctacatttgattgattattatcaaaataatctaaacaggatattttgaaataatctaaacaagattattttgatagctgccaaactctagtgtaatcttgtgttttttctgtctttcatagtcctcttaaaagaactagtttaggccaggtgaggtggctcatacctgtaatcccagcactttgggaggccgagaggggtggatcacgaggtcaggagatcgagaccgtcctggctaacacagtgaaaccccatctctactaaaaatacaaaaaattagccaggcatggtggcaggcgcctgtcgtcccagctactcgggaggctgaggcaggagaatggcgtgaaccccgggggcagagcttgctttgagccgagatcgcgccactgcactccagcctgggcgacagagcaagactcatctcaaaaaacaaaaaaaaaaaactagtttaatccagttaatccagtccctctgccttttaaatccaccagattatctttcctccaacatcttcccaaactgttctgaggaaggagatgaggtattaatgagagagattagtaggatcaccattaatgaaatatagtcaaatcagtttttagaaggttgagtccgggcgcggccgctcacgcctgtaatcccagcactttgggaggccgagatgggcggatcacgaggtcaggagatcgacaccatcctggctaacacggtgaaaccccgtctctactaaaaatacaaaaaaattagccggccgtggtggcgggcgcctgtagtcccagctactcgggaggctgaggcaggagaatggcgtgaacccgggaggtggagcttgcagtgagccgagatcgcgccactgcagtccagcctgggcgagagagcgggactccgtctcaaaaaaaaaaaaaaaagaaggtcgaatacctttttggcaccagggacccattttgtggaagtcaatttttccacaaatggtggggagtggggagtgatggttttgggatgaaactgttccatctcagatcactgggcgttagtttctcatagggagcatacaacctagatccttcgcatgcacagttcacaatagggtttgcgttcctgtgagaatttaatgcctccactgatctaacatgaggcggagctcaggcagtaatgcttgcttgccgcttatctcctgctatgtggcctggttcctaaccagttccagaccatggcccagggattgtggacccctgttgtatactatgtccccctctaaagcattctcagttcttatcggtgtgctttgaaaaagttcctcagaagtaaagcttatgtgcctttgtgtttaacttaactttgcagattgtgttttccaaagatggccacaatagtaactcccataccacatgttctttttacaatatgactttgacacttcttctactgacccctctcagtagaaatgtcacagtcatattgtacaaagaacatgctgtctttgaatattgatgggcttctgtctaacatggaagtgatgctatgtgacttttgagggtaggtcataaaaggtgatacaactttaatctggtactcttgagacatttgctcttggaaccaagccaccattttctgaagaagcttaagtagcccatattggcaggccaaatggagaaggcacatgcaggtgttccaggccaacagcctatgtgacaacagcatcagtcaccaagcatatgaacaaagatacttccagatgactcctgcctccagtgatcagatcacacccagttcttgagttttctcagctaaggccccagactttggatcagagataggctatctttgttgtgccctttctgaattcctgacccacagaatccataagcatagtaaatggttgtcttaagccactaagttttaaagtaatattttagatagcgagagtaactggaacacccaatgtttcctgagaacactttattttcttaagtatggtaactggtagcttgtgatacatgttccttggaaaacctgtttgtggaatttctggttttctaattttttagcttgccattcaaggccttcatagtgaacagtaggacagcttcggtattggcctatacatatccagcaaatcagtctcctccctgaatggtattttatttatagtttctgtatcagtattcttttactcttctagaaagcccttatgtttattcgctgatagtctcttttgtgaagtgcctgttcaaatatcatttttctattgagttgtctcttactgatttgtaaaagttctttgtaaattctggatatgtgcatgttgggacaaaaatctatttttatatcctgtgtgtatatatatatttcctaacaacaggctcgttttcagaatactatacatatgtgtatatatgtgtgtgtgtatatgtatagtgttctcccactctgtgacttgccttctgactctcttaatagtgtcttttgctaaatccaagttcttaattctaatggaggatggaatttgaaagtcttttcctttttttttgagatgaactctcactctgctgccaggctggagtgcagtggtgcgatctcggctcactgcaacctccgactccctggttcaagtaattcttctgcctcagcctcctgagtagctgggattacaggcacgcgccaccaagcgcagctaattttttttttttttgtatttctagtagagatggggtttcacgatgttggccaggatggtcttgatctcctgaccttgtgatccacctgcctcggcctcctaaagtgctgggattacaggtgtgagccaccacgcctggcagtcttttcctttatggctcatgtttactattaccttgtttacgaaacctttggccaccctaagctcataaaggtatgttccaatgttatcttttggaagctttattgttcacgtttcacatttagatctataatatacctagtactatattttgtctgtggtgtgagaaaggagtcaagattcatttattttccacatggatatccagttgaaccagcatcatttatttgaaagaccttgttttccttactcctctgcatgaacgccattgtcatgaatcatgaagatatatctttggatttgtttctggattccctgttcttgtccactgttttgtctatgttgtcttcaataatggtatatttttattaaacctggatatagggtaaagtcctccaactttgtggttgttcttcaaacttgtcttggctattctttttttttttttttttgagacggagtctctctctatcgcgcaggctggagtgcagtggcatgatctctgctcactgcaagctccgcctcccaagcgattctcctgcctcagcctcctgagtagctgggattatagacgcccgccaccacgcccggctaatttttttgtattcttagtggagatggggtttcaccgtgttagccaggatggtctctatcttctgacctcgtgatccgcccgcctcggcctcccaaagtgctgggattacaggcgtgtgagccaccgcgcccggccttgtcttgttattcttgactttttacacttccacatacatattagaattagcttaacaatttccatttttaaaaaaaggaaagggaaaagacctgatttggattggaattttacaaatctaagaattaatttggagtttatactagtgagacttccagttcacgaatacagtttgtcccctcgttatttaatttctctcagtaatatccagcaaaccacgtagctttctgtgtagaggtcttgcacatcatttgttagatttattcctaagtatttgatttttttgatgctgttataagtggtctcttttatgttttattttcaaattgtttgttgctggtatgtagaaatatatttgattttcatatattgaccttttagctaatgaccatgttgcattcacttattaattcaaataatatatgtaagggtttttttttttttgcattttctatgtatgtcatcatgtttgtgaataatcacactttcttcctatccaatctaaatatatttatatctttttttgttttcttattgcattggctgagacctcaagtatagaagtgttgatagcagacctccatatcttgatcccaaactcagagagggtttcaatattttacccttagtaaacatttactgaagatttttaatacttgtattatatgaaaaaaatgaatttcatatttatattttataaaagatttctttatttctcacttgttaagaattttttcatgactattggattttatgaaatattttctgtatcaattgagatgattatataagttttctttattctgttaatgtggtaacttaaactgattaaattttgaatatttaaacaacttctcatttctgatatatacacaatttagttgtcatctattacccttttgtatagcactagatttggtctgctaatattttgaatagtttttgcatctatctcaaccttaattataatgtacattttaaagtaaaaattacaaagaattgctgattgcataaaatgagttgggaagtgtccctctttttctattctctggacaactgtatgtaaaattggtattattccttccttaggtgttaatttcatctggaccaagaattttgtcttaaaatataagtttattaagagtcttctagtctgttttctttttgtatctgttgggtttggtttttttgtttgtttgtttgttttggaatttgcccatgtcaagtttattggcatacatttcttcatatttgtttattattttttgatgtctgtagaatctggagtgatatccttttttcacttctgatattgattgattgtaccatctcttttcttgagaagtcaagggtttacttatttataggtgttttcaaagtaaaaacttttgggtttgctaatcctctctaatgtaaactttttttcctatttcattaatatctactcttcattattatcttttttctattttctttatttggattcatttattttttttctaattccttaggccaaatggctaagtcctttatttgcagccttgttttctaatatatgcatttcaaaactttgaattttcctgcattcgtatctttatctgcatttcatacattttgtgtcctattttctattctctattgcttctctgctttctgcttatttctatattaattattttctatattttattaatttgttatacagtcttataaattctttcagtggttatggattttttttaacatttttaaaaaggttttctggcttttctaattgttctcaatggaagattatttgggatgtacagatcaccagcatgtttatgttggcttctaggccaattttaaaaaatgactaaagtaaaacttctgttaccaattaaaaattttgtttttctgccctgggcctttaaaagtcaaacctgcacttgaccagtcaccatatattttccaagtaggtttaatactagtgcctaggaatagcactaatgaaggttcagacacatgcaaagtatatgctctgctctgtgtcatcgtggcacaataacagagtccacagaatggtccacatttaatattattatgtttaaagtttttggcatttgaggaagttttagaagcttcctgttcatcttacatatgtaataaataatgtaagttatgactggatattgttggtactttaacttggaaagaaaaccatcttattacctctttttcaagtttttttgaaagactgtctggacatttaattgaaaactatttggacattgcaacacaaaccttaaaaaagttgttatcatctacagttcttacatgaataaagcagtattaccaagtagccaaagtaaaatgcagacattttactgtttgctgaagctgattaagatgtattatttataactccactttcaaatattttatttattagtacagtcttactgttctcaatggctaactttataataaataaatattatatttacatagaatcacttaatgtatactaagtatatatttaaacatataaataaatcagcccatgactttatatgtttgtattataaatagtataacaaatattataaatttgaacctctaaaatttatactagtcaaattatctaggtttgtatgagatttaattggaaaaaaccctcttactaaataaaattagaagcccattaagcaaattaaaacctatatttaagaaaataggcttgcctaagttacacagattgtatgcacgcttggtttttatccagcacaagtcttactgcttatgaaaattgattttattaaagattgcttatgggctgaggctgaaggcgtgccattatcctttaccagtatataattacaacgtactctcctttgttaatctgacagttatttgcagaactgaactaccttggattcttaggtagggaagagttttaattctcgtgcctcagattttccattgctgcttttacgtgggtgtgtgagattcagaaatacgagagtgaagtaaaataaacgatgctttataaatacatggaattaggtgcctacaggggaagctatacagcagctagccagcattttaattccatgtttctcagcttattttatttgaggtgttagagttgtacttttttgttttccaatgtttatagactgagcttgattttcatatctagttgaattctcactaattttgtggctaatcaagctcccacaatgtcatttacttgaagttaagtattgatatttatgatttgaatatatttaacaactttatagttaataactttaaattctcttctggtgaaggtattcagtttggccagtgtcttctcagtcagtgctctaatttaatatagtgtttagtgctaaatctaatattgtttctaacacattataaaggtcagaacttacataaatatactgtagtttgtgatagttttggagaatgggctacagtggcatttattagtgaagtaaaaattcagtccataagaaaatatgaagtgatactttatttagtccatatatttttaatggacagtggtctccactttctaagtggggatttttcatttttctaagtattcttaagagaatcagttttggacttttggttaaacatagaggttagaataaatatgtttatttcttcctaaattcactaaattaacagaataaacaataaaggaataaacaaagagaatgaaagaggcaatataacatcaggctagagaagtgaaattttagaaatgttagaaaagaaatgcataaattataaccaacttagagcagttttgatggaacataatatttgatcattatattgagttacaatttatttaattattccttaatatcgagtcatatatataatttttttagtgtctgataatgggttatcataattaagcattcatctatccatgaccatttagttttttcagcttttcactgttataattagcattccatgcatcagtcttaaaatattttaggtttttttcagaattgaatgactgaatcaaagtttataccttttatgagtattgatccatgctgccagattgctttgcaaagccatttttatgattaccatcaatgtgtggaatttcccatttcactacaacctagccaacattgcatttgccttaggatgttcaatctgggcagggacacatagcccttgcatcagttgcttgtctgtggtgctgtgggaaagtgtggcatgacatgacaaattttaccaggtgaagcttagctgtgtgcctttaccactgccaccttataataaagacagatgctgtgagtttagaggaagaggtgatttcctttgtttacctggggtgctcaaggaaggcttcatgtaacaaatagaatttgagctgtgtataatgagggaaagatttataaagaaaaatttgcacagacacatgagagatatatcagtctggatcaaatcagaagacagaagccacatagtaactaaaattgttagtttaacttaaagaattattagggtatgataagagaaaaactatgaagtcactctataaggagaactccaaaagttaccctagggctgaggaaaagtacccaatgaaggacggaattgaaatgaggttcagacctcattgaaagtgtggctatagcccattggatggtagagaaatttgctgcgttgtctgagccaacgctggtgcacaatcacagtgtgagcaggtgagttaagactggtaggagagcatgcagagggaatcagggcagtgcggcagggccacagtaacaacccttggggtgcaagtgagttgaggttggctagttagtagaaggagttggagcaccactttagataccactggaattgcaagttggagaggcctccctgtgtagcaatctagagcactgctgtttacagcttggggcaggacagtataccaagctgctgtgtggaacaaaggtcaggtggctggctggccaagccggtgcatatggtttgaggagaggggctggggagtagccacctggtctggggctcctggctatagtgctgctgctgcctgagtagagagctggagaaagaaagcacacagccgctagccagatgctggagaaagctttcccctgcaggcacctagtactacagcagtgttgtttttcagccttggcattattgaccttcagggctggataattatttgttgtggggagctgtcctgtgtattgtaggatatttggcagtatccttggcctctattcactgtatctcagtagttccccaagttatgacaatggaaaataatctccaaatattgccatatgtcctctgagggcaaattgtctctagttgtgaaccactgcaatagagaaatctcacagcagtggaacagtggaggggtaaaatataagctctccagaaacctgctgagaaaactccttccctccctttccagtgcactgtattgacagagcttagcatcatgtcatactggcaaatgaaaaatattttaaaggcccagatccacttttccagataagacaatgaagaatgaatttggagtagagaggtaataaactgatagctgtacaaagtacagttatgggattaaatatggttggagaattaaatatgagcaaagttatagaagcagaaaagcgtaggggcactagggaaattcaaggacaagaagactaaagtgcaaggctgatgtaaagtggtaagaggagaataagctagaagggccctttgaatcttaactctggagtgctttgagtgagtggaagagaggggaagagaaagacagaaagaccaatgaaggtttgagatttggtgctgtcagtagatgaggaaggcagaggcagaggtggaggagtgatagaaataattgggacctacatttttgcacataactaattactcaggaaatggttcatgatagtatatcctgggttttttcccacctatccatttcataatttaatgtagtgctttaatacataaaatatgcttattggggctggatgtgatggctcatgcctgtaatcccagcactttgggaggccgaggtgggtggattatctgagatcaggggttcaagaccggcctggccaacatggcaaaaccccatctctactaaaaatacaaaaattagccaggcgtggtggtacgtgcctgtagtcccagctactcaggaggctgaggcaggagaattgcttgaacctgggaggcagagtttgcagtgagccaagatcatgccactgaactccagcctgggcaacgtatatatgtatatatatatacatgtatattgtgtgtgtatatagatagatagatatagtatgtgtggatatgtatgtatatgtatatatacatatatatacacacatattcatacatacacacacacacacacacatacacacacacacacacacacacacacatagaatttgggagaagagaagagtaatatgaggaaataagagaccatagggagttcattgtccctcttactcttctatggagtgaatgcaagggcaagccagaacctctgcactttctcaccaggtgaaggtaggggaacctgtctcatggtaatgcacagagctaaaagagaattctagcagagggaatttgtggaagttacggttttgactcaaacccctctatagtctttcatttttccaaggatatgtctcctcctttctaagtactttcgtggcttgttttacgtgtcttgcaatcgtataatccagcatcactgaatagtcttatagtttcccagatgtccttgtggcatttccttctaggtatattgaaacttgcccttttttattcttgaattttgtctttggctcaaggttttacattttactgactcttcatactacttttctccccttatttagaaatggactcagaactcaaggaagaaattcctgtgcatgaggaattcattttgtgtggtggagccgaaacccaggttctaaaatgtgggccctggacagacctctttcatgatcaaagtgtcaaaaggcctaagctgcttattttcattattcctggtgagcgtaaaagtctgggtgaggagactttttgtagatactcataactatgtctgattttaaagtatagagaatttggtaaatatggaaaaccttggagaaggaattaaaatcgcttgacccattgttaacaaccacccttaatattttgacgtctggattttgtgtttttcttctatgtatttacattatgttgtctgttgtgtgtgtgtgtgtgtgtgtttgtgtcacagttggaagtatgtactatatatgcagttttgtaatgtggtttttaaagcatttcttaatatttaaaacttcatcaatatttttgccagttttctaaactttttctgcctcatttcaacatgattatatgtttattatagaatatttggccaggtgcaatggctcacgcctataatcccagcactttgggaggctgaggtgggtggatcacaaggtcaggagatcaagaccatcctggctaacatggtgaaaccccatctctactaaaaaacaaaaaattagctgggcgtggtggcacatgcctatagtcccagctactcgggaggctgaggcaggagaattgattgaacctgggaggcagaggttgcattgcccccagatcacaccaccgtactccagcctggggggcagagcgagactccgtctcaaaaaaatatttaaaaaaataaaaaataaaaaaataaaaattaaaaattagaatattctgatatttggcagctgagtcacttgtaacttttgctagatcattgtcaatagaattagggacagatgcttgagcgattgcaggtattcaaaatgcattttaaattgtgagtttgaacatacatgtttattcttattctgtgaattgccagttcgaaacccttgcccatttttcaattgtgttttcaatgttttccttattgattttcagttgattcttacacaactgtaaaattgtgttatatctgtcatacgtgacaagaatctttcctggtttgtcttttgacatcatttacaatgtttatttggttgtatagaaagtatctttgttatgtggccaaaatgctaagtctcttcctttaagacttcagggttttatgagtttcttagagagggctttcctactccaagattataaaacaattctgccatgtcttctagtatttttacaatttcatttgtgatctttaagttgatgcatctagattttaagggcaggcactgaggaagggatctacttttcttctccctctcctttggatggcttattacatggtccacaaccatttattgtatcatctgcctttctcctactgccttgcaatgctaactgtattgtaaagtagattatcctgtggccaggagtttctttccatgtttttcgcctcttcatgtgttcttcatgttttttaataaatgcagttttatgatacttttacatattttttggaacttgttcatttttattcttttccagaatattctttagcttcttttcttttggctgcagaatatattttttggcttcattaggaggaaaaaaaaagcttaaatgatctttaaagtcaactttcctaaaattgatctcgtaaaggcagagtataatgatagatactaaaggctgggaagggtgcagggctgggaggagggatgaagagagaggtaaacaggtacaaacatgcaagttagatgaaaggtgtaagttctattgttggaacttatttataccaacagaattggcatagtcggcagagtagactgactatagttaacagtagtgtattgtattggtataaagtagctagaagagaggccttggatttttctcaacacatagaaatgatgaatactcaaagtgaatgtactaaaacaccctgacatgatcattacacgttctatacaggtaacgaaatatcacatgtaccccatgaatatataacataaatatcaatatctttaaaaaaaataaataataaccaaaaaatcagcttttctagttccaacagatgttctcagaggcaaccacttttaacactggtatattcctgtgatatttattccacattcttttttgtttgtttgtttgtttagacagagtctcactctcttgcccagactggagtgcagtggtatgatctcagctcactgcaaccctccacctcctgggttcaagagattctcctgtatcagcctcatcagtagctgggattacaggtgtctgccaccatgcctggctaatttttgtagtcttagtagagacagggcttcaccatgttggccaggcgtgtgtcgaactcctggcctcaagtgatctgcccaccccagcctcccaaagtgctgggattataggcatgagccaccatgcctggcctttactcgtttctaaatgaaatacttatatttcttcttcttcagttgtcttttgttttgttttgagatggagtctctctctgttgcttaggttggagtgcagtggtgtgatctcggctcactgcaacctccgcctcccgggttcaagcaattctcctgagtttttaatattagatgttatctattgtcttcctccatgaaagaaaaagattagctttcttatactttcccttctccatgcacaatcatatacccctccttctccatctattttcctagtatgggaatatttcagttttttgttaggtcaatattcagtgcttttattattatgactatgtattatattatattatgtatattatattatattatattaattatattatacatagctaagcctatagggaattgcgcatgcatttcctttcttatatatttttgtttgttttccctgggttaatgatgttctgttatctttttgcttagttttttgtgctttaatcactcatttatcctagaactattctctagaagtgaaaagaatcctttcaatgcatttgagtcatcagtcagttttcagaatgctctgtcctttggctccagtctggactcattgctccccaggcctgctgcacagttgccatcctggggacttctgtcactttcttctggcttggatccctcgtttctcagatcccacatttttatcttagtttattctcttgtttttggtagagcatatcttctagtagcttccttagaagaggtacatgagaagtaacacagcatgctgcaaaatgtcttagactctaggttggaaataatttttctttaggaggaaaatggagggcgttaatggagggcattaatcattgttttccaacactcagagctgcttataagaagtattggtatcatttctgattttcgccttttgtatgtgaagattctctacccacattttcgagaccttttctttgttctgagattctgaaattttacagtgaagcaccttggtgtgactgttttttcatacaaggtacttgggttttggtgggcccttttaagccagaaactcatttcattctaatagcgctttgtttttcttttcttttttgtagtctcatgtttaatggatgcaatatcattttcttttcttttcttttttgtttttgcatttgcaagaattttcactgtgttccttttttcatttgcattagtctttagttttcctcaaatgtctggcaatccttgactatccattcatgtttaagaggaagacaaaaaacaaattggaagctttgcactcagagctggggcttatccagaggtgtgtctagggtgattagccatcctagcttgcctaggactgagaggttttctaggacataagactttcagtactaaaaccatgacagtctcgggcaaaacagaggagttggtcgccctaggtgggcctcatcctaaggtgattgagtagggacccagcatttcattgacggatttccagctttcagtgtctgaagctctttcttttattgttcagttttcctggggaggaatcttccaggctcctgtttgaagagtggaaacctgtctgttaatgttcaaagaggaacaggggaaaggaggtggtagtttcagtgtttggttatgcctagtccagcctcttctcagtatggtactttcattctcagctggactaagattcctgatcgagaatttctctttgttttaaccactaatgggaataaactattcttctgccaggatgtaacagtctttgtggaagtcagtccgttcagcatctattaacataaaaatacatgtacttttccagtagtgaaggagagtttgaaattatagtcatggcaagtgctgtttgatggagcagagatttggaatagcttatagcataggatagagaaaataagtagaaacattatcttaaactcgagaagggatatccttctaaggctagaaagaaggaggtgaaattggttactaaaatggaaaagtataaaggcgtatcagagggaagtgaagtctcctgcttcctgactactgttttttctgttgagagttgagaccatgttttgaatgctaatcatttccagctcatgaaaagatactaggcctgtggttcttaaagttggtgtcaggatcagaagtattgcttgagaactttaaaaatgcagttcctgggctctatccctgaccttctgaaccagaaagtctgggggttgggcaatcagtgttttaacaagccctgcagggaactgtgatacgcatatctgatccagggtgtagtcatgggaatgaattgcttaagtttaatgtaggtgaagttctttggatttcatcataataatgaattatgggacaaagtttttggctcagtcagtccaactggattttgaaatgtcctgacatgacatgacaagtgaaactgtcatttaagggtcaaggctttcagagaaagtgtgagtgactaaaaagttgatagatggaaatagatggcttgagtcttaaagaagaagaggttgttgtaatagtgaggtgaaatagtaagtgggacagacaacccacccacttccccacctggagatagtatttattccctcactcttttatcccaggtgctaggaatactgtgttgcattaagtctttgctctcattgagttatatgtggtgttagagaagagtgactgaggcctctgctgaagaggattgaaaggaagagagcccattacaggggagagccagatttcagatatggtgaggagataaagggagtattcagtgaagacactgagaatggagggaagcataaaacatttgtagtttgatagtctcattgtttatagtgctttgacattttcagatcatatttcatttcctagtgttcttttatgtttgccctgctcattagtttgtgggatttagaattgtattttgtgtgtgtgtgtgtgtgtgtgtgtgtgtgtgtgtgtgtggcaggtttcgggggagctaatctatttacactgtggtaataatcaggataacagtatttcaaggattgtgaagccactatggacaccatgttatgtccgtctctgatagactgacataacatttcattttaaatcacattgcttttgcagctagcaaaattaattcttcacttctaagttagtaatgataattgtgagttttcttttcttttttgtagtctgatgtttaatggatgcaatatcattttcttttcttttcttttttttgcatttgtaagaatttttactgtgttccttttttgatcagaatccacagattgaagaacttttaatttagtttcattttttctgatgaaccttagatcttggatttctgtaaagtaacattgtccttggactttctttaactagtgagatgaacaaagggaatcagattgagaactcaccatagagtacactgaatcataattcttaggaggtcatatggagataacagaaccatgtgaagtatcaagtgctgtgagcacagtggttggagatatagcagataaggctccatgaatgagtccaataggtctgtctacatggcaacctattatatagatactgtgccatattaacttgatatgtggcagttttcgttcctctccctacaaaattaactggaaggtataagtctatacttgcagcattgtatagttggagattattagcagtcagggcctagagatgatcactacaacttctgttatacattgcatgggtatttgactgatttgactgttatgagcatgttcaagtgtgtgtttataacacatttttatgtaaacttttgattaaatattttacttgcatgtctgcattggaatgttttccaacatccttacacctggacctctcccatacccctccgtgtgtgtgtcttttttagttgcataagtgtaggccttttaattttctttgtggtttcttaacaaggaggtttaaatggtgaagtatgaagtactgtatgcaatggtatttaagcattttgcattgcattttccacttctgtctctgttataagttagacctttgtgatacttgctatgcgttcagtttgaaaggatttattgtatgtgagtgccatgtacccaatctagtgctgcttggtgccactggatacagagaactatagcaagtgatggctacttttaaagaagttaaactttcaagtttggtacgttatacatgctacaatgttaagtatatttctgacaggataaaacttccatttttttctgcatctgttgaggatcgtatggtttttcttttacggttggttaatgtggtggatgatgttaatttttgaatgttaaaccaatccagcattcctgtgataaatcccacttggtcatgatgtattatgcttttaacattttgatggactcagtttgctaaaattttgtttagaatttttccatctttgttcacgaggtatagtggtctgtagttttttctttttctttttgcaatgtctttatgtggttttggtatgagggtgatgctggcctcatagaatgagttagaatatatttctttcttgatatggtttggctgtgtccccacccaaatctcttcttgaattgtaactcccacaatttccacgtgttgtgggaggggctcagtgggaggtaattgaatcacgggagcaggtctttctcatgctgttcttgtgatagtgaataagtcttatgaaatctgatggttttataaagaggagttcccctgcacacactccctttctttttgcctgctgccatccatgtaagatgtgacttgctactccttgccttccaccatgattgtgaagtgtcctcagccatgtggaactgtgagtccatgaaacctcttctttgtgtgtgagttgcccagtttcgggtatgtctttatcagcagcatgaaaacagactaatacatttctcttctattttctgaaagagtttttatacactgggcatttttcttccttaaatgtttgatagaattcaccagtgaagctgtgtgggcctggattttctttgtgggaagatttttaacttaaattctaattaatccaatcaatttagggctatttaggttatctgtttcttcttgagtgaactttgatagtttctgtctttctaaaagtttattttatctaagttgctaaatgtattgctatgaaaattttcatatttttcctaattactcttttaagatagaagactttttttaaatttaaatctgattatgccttaaccctgctcaatctcttttaatgttacttagattaaaagccaaattacttatcatggcccaaaaggtatcacatgattgtatttctcttcctcttcaacctgatctcatacaagatttgatatctcttgttatgctttagccacactgatagattagatgcaaagggaagaaccaaggattatggactgtcttccatttcttcaagagctaagatctttatttcttgagggcctttgaattagctcttcaagagctaagatctttatttcttgagggccttctccctccttagtatttattctcttccctcaaattttcacaaggcttatttcttgtcattttggggtcttagctaaatgtcacctcctcagacctttttttcactctattctcttcccttctctatcatgtgaccctgtttattccttttataggagttctcacactctttatctcacctatttagttatgtgttgtatattctcccactagtacataaattccaaaaaggccctcatctgtcttttgcctgacatagtgactttcatacagtaagtgctcaataaataattgagggctaaaagaagctgtaattctgaatagaattaatgaacataagtaattggcatcatcatttacttgatgatgataaaattgtggatcagaaagcttaagaactcagacttaatcccagagatagggagaaaactttgttttatttatttatttattcttcctcatttaaaaaaatatgttaagttctgggatacatgtgcagaatgtgcacgtttgttacataggtatacatgtgccatggtggtttgctgcacctgtcaacccatcatctaggttttaatgcctgcatgcattaagtatccattatctagtactcactgtttttcatatatcgtgtcattgtaacttacatctaaatcatggggttatctttagtgtctccttaatgttacaccagtttttaattgttataatagctgtggtattaatagctgccatttattcagcccctaccatgtgccaagttttgtgcaagtggctatccattcgttatttctaatgaaaatgccaactactttatagagatattgtaagactaactaaaacaaggaaggcagaagatcctacaccggattactgatgttttttaaaaattcagtattatgattttcttttgtatatactttcagtcatcaaatatttatttagcacttaccatatatgtgatgttggctaagttatttaacctctctgtactcagtttcctcatccataaaatggaagtaatgatagtgctacctcatatgataattaaataatatatgtaaagcacctaaacactgcctggcatgtagtaagttatagtacctaaaaatattagctattattattttctagccatatgaagaaatctatgagcaacgtaagacatgtgaatatgaggtataacatattcctagaaggttatactcagtaatataaaaatataaaatttttgtaaagtaatatattaatgagatgaaattttagtcacaatcccaaagagatttttaagaattgaaactagtgaaaataaccctaaagtttatgagaacagcctagaaaatttagaaaaagaaaaagggaagggatttgccctacctgttaacacttaaaaaaaaatgtagtaattaagacagtatggtcctggcagaggagaaaaggaaaaataaactgaattatttggtatcagaattagcaagtgaatgtaaaaatgtagtattgggtctgaagatatttcaaatcaatgcagaaagaatggattatataataaatggtcttggaacaattggccagtcacttggaaaaaagttggattgctacttagtattttatactaaaaagtattctaaacttactgaagacttaaatgcataaaacatgaaacagtgccacccacagcttccatagatgttatagcccctgtgctggtatgcccttcctcccttctttcttccttagctatacagtggccaataaactgaccaaagaatatatttctgcatttgaggaagttttcatcctatttgacaaagaagccaaaagcaccatcacaaaaaggaatttggaacttgggtcactaggtcagaatgcaacagaagcaaaataatatggatgctacggccgttgtatattaccgttatagctagacgttgttgtacaagtttgaatacctaacatttatataatacttgctgtgtttcaggcagtgttacaatgctttgtacattgattcacttagtcttcaaatgaggtagtaccattattacacattttgtggatgaggaaaccaaggcagagggaggttaaatagcttggccaaagctcacacagttggtaagtggcaaagccaagattccaacccaggtagtctggcttcagagtctatgctcttaaccactttactacactgcttatctagcaaactgaaagatataaaaatggagtagaaatcagtgaaattcgacaaggatgacagtggttatttacatcagtgctccagagccatgtcatgtaattgcagagaccagaaagcctaacaacatgaagaaatagataaactgatcagagaaatagatattgatggaaatggactagtagctgtgaagactttatatagatgatgattacaagatgaaaatcccatttcgttgtaatttcccccctacagatctatcagattgaatgtttttaaaaagatcgtttatttattgtttctttatagcaaactcatgtcaaaaataccttctgtacacacataagaaaaatctacatgtacttgtagacgtttgtttccccaaaagatcaagctgtacacctgtttacaattataagtgctagtgataagtgacaaggaaacagtagactccttaaagctctccctgtgcatgcttcttacactattttggctggcttgtttttctggttttcatgcatcttgttaactgagcatgaccaaatcttgaagtgccttatatgcagtattactgattttagacttcttccagatgactttatctggaagacactgaagggtgtttaaatagggtactgctgtgattttaatggaagtttgaagataatctctcttgggtactctgaagaattcagaggaaagtgtgaaaagaaacagacccatcttttctagcctgcgtgtcatcttatgcctgtttattactttgattaatctaaggtctgtgtttcttttcttaggtaacccaggtttttctgccttttatgtgccatttgcaaaggctttatactctttgacaaacagacgctttccagtttggactatcagtcatgctgggcatgcgttggctcccaaagacaagaagattcttacaacatcagagggtatgtccttgttaatatctactttcctttagagtgagtgcagggtcatgtttctagcaagcttgctaaggttaagagttacaccagtggaaacctctgcttgtggcattaggcccatggtgccatattttggtaaacttaggatttttagagacattttaactcttcatgtaattttctgtaagaatatgggtagataaaacaatctatgacttgccttctttatttaccaattagtaatcaactgtgtgttttttgatcatgtattatttttccagggttgttctaggaggaatggtggggaaaaagcagtccccaaccattttggcctctgggaaccagttttgtggaagacaatttttccacagactggggaggggtggatggtttcgggatgaaactgttccacctcagattaacaggtgtgcaacctagatctggcatgcacagttcacagtagggtactcctatgagaatccattgctgccgctgatctgacaggaggcagagctcaggcggtaatgctcactcgcccgtcgcacaccttcatctgtgtggccgggttcctgacaggccacagacaggggttgggaaccccttttataaaccatgttctttactttaaagaagctttttctctcatatttagagaataattaagtgataaaccgtggcctgctaatcatatagacacctaaggggtaaacaaaggagaaaacacagtgtgggttaggagagactttgtggagtaggcatgtgtcttagtcagtttgggctgctatagcaaaataccatagactaagtagcttttaaaaatggaaattgatttctcatagtttcttgagactggacgtccagtccagtctgcactggcagattcgatgtctgatgaaaacctacttcccgattcacaggtggcattcttgctgtcctctcgtggtggacacaggaggcaagccctcttgggactctcgcgggctctaccctcatgaccccatctgatcctaattacttcccaaagacccctctccacctcttaatagcatttgggcatagggtttcacctatggatttgggggccatataagcattcagaccattacagctggttttcacaattgaataaaatttggatttagggcatggaggtgggtgcagaggtacaacagacagaaagagtagcacagaagggagcaagatttaatagcgatgttactgctaagcagggccagtttgagagggactttgagagctggagagagagccaggactccatgctggaaggtttctaaatggaagaagtaataccatggagatgcaaactacctcctttaaatctgtgagaattctagcatgttcactgttccaaaaaataaaaaatgagagaaaaaataacttaaatataagtttataaaacataaacataactttataaaagtacagcatatccaagagttgaaggacactttcaaaaggtgtaacaattggaatgctctataggcattccattcaagggcgttttgtcctagggggtttcctttagttaatttgaggtgagatcgaggtggctgtgacttcattgcccagtttgcttctggttcttgtacgtctctctagtggtatgagcatctttttgtgcttattgagcttctcagttttaaagatattttacaataaagttacattttacatctatagtcttcgttattatatatgcatgattcttttagacattgatgtacaaggttgaacatacaaaagcctgtactctttgaaggctagttttgattatatttatttttaattgtaatctctgacctcagcctctgatcctcatatcagatacaattttttgtttctattttaaaatttgaatgtggtggcaataaatatggctgcatatgtgaactcctctgaatactttctgaaaaacattagtttactaatctgttattaatttgtgtaaatgttgcacgtcagataaacagtatcaatttatctagttttatctaattgttaaccttgtattttgcaactgaccctttagctgcagggagtatgttgtataattttctatttattttcaaaatggattaccttcctttattgtatttttagattaaaaagttatatgtgcttattaaacaatttagtatggaaaactgaataagaaaataaaaaatcggtgtcctgtaagttaaaggttgaaaagaaatactaaaacttcataatggtttaattatgcttaaacattttcagcctaaagcctaacaaacgttagcaccttggcactaagagatgagatttttcaatgaataatactttgtgtaatagctcagatattttctaggctgaagtaagcatctaggaatagcagcacaagggaccatatttttagtgctttttcccctatgtcaatatcgtgatgaagtgtgtatcttaaatgttagtgaaatagttacatttagattttcagggtattttttttcaacatttatttgcttattacctgttcaaaacttgtatttggcatatgttatacattaagaaaatatttagcatagaatttttttaaaaataaatagtggacttccagtttcagctctgacatgtagaacttggagtttgtcacttctctcctcgcaataagaaaaaagctgaggctaagtgtggtatctcatgcctgtaatcccagcactttgggaggccaaggcaggcagatcatgtgaggccaggaagttgagaccagcttggccaacatggcaaaactgcatctctactaaaagtacaaaaattagccaggcgtggtggtgcttgcctgtaatcccagctactcgggagactaagacatgagaattgcttgaaccttggaggcagaggttgcagtgagccaagattgtgccactgcactccagcctaggtgacagaatgagactgtgtctcaaaaaagaaagaaaaaaagaaaagaaaaaagctgaacaaaactaaaaatcatttttcttagacctttcagagaattgaggtcacaggacaaattgtcacctaaaatctagagagacaaggaaatacaatgaagattgtagaagacactagtgccgtttatgtagaatacactacataagtgtagaatacataaatggtgattttgatgaattgctgggggtaaagtacagactattttaaaagtaacaaacttctgcaagcctattcttgggggacttcttcactttcataggtattacttctaggaaccttatcaggtacttttgtgaaaatttgagaaatgtcctctatggttttttgttaggagtggaagagaagtaagcattttgcagtatgtccagaatattctcaataacatggcttactttccaagggaaaaagagttccagagctttatccaacctggggggaagggcagttagccaactccgtcttcccctagccttcatgtctcacatgctggaggagaaaaaaagatgacaaaaacttttgaagatcacagcacaggcattcaggcccactgaaagactgaggtttaatcattacattataggatgtttccctcctcattttaccaccatgtctacaggcctctaccttaataatagttcattataactataggagctacaagacacaaactctatttaagaaggagttcttagggaaaaccaaaggcaatggaggaaaaaaaaacaagaacattagaggaaactgaagtttctgatacctatagctacagaaaacattaagcatagccctggccaggcgtggtggctcatgcctgtaatcccagcactttgggaggctgaggcgagcagattgcttgaggttaggagtgcttgaccagcctggccaacgtgatgaaaccccatctctactaaaaatacaaaaattagccgggcatggtggtgcaagcctgtactcccagctactcgggaggttgaggcaggagaattgcttgaacccgggaggcagaggttgcagtgagccgagatagtgccactgcactccagcctgggcgacagagtgagaccctatcttaaaatacaaacaaacaaaaaaagcatagcccagcttctagtggcattaacatatagcctcacataaaaggtctatttacctcattcctattacttaatacatcatgtccagctttaagcaaaaagtaaaattagaaggcattgtaaaaggtaagaaaaaacagtctgaagagacaaagcaagcatcagaaccagagtcagatatatacttattaccaattttagaaatatcagatcgggaatttaaagtaaccatgattactacgttgagaactctaatggaagaagcagcatgcaagaacagatgggtaatgcaagcagacagtagggaactcttaagaaagaatcaaaaggaaatattagaaaacaccgtaacaaaaatgaaaaatgcctttgatggactcaccagcaggctggatgaagctgaggaaaaaatcagtgggctggaaaaataggttaatagaaattttcctaactgaaatgcaaagagaaaaaaataatttataaaagtacagcacatccaagagttgtgggacaatttcaaaaggtgtaacatatgcataattggaataccagatcaagaagaaagagaaaatggagaagataagagttgaagtacttaatgccagatgacaaaacacaggtctaggaatctcagagcacactaagcaggatcaatactaaggctctacacctacatatgtcattcttaagttgcagaaagccaaagacaaaatcttgaaaataggcagaggaaaaagtgccttacctgtagaagaacgaagatgagaattacagggaacttcttgtcagaaatcattcaacaaagaggagaatggagtgaaatatttagtgtcgaatgaaaaataacacttacctggatttctctatctagtgaaatcatccttcaaaagtaaaggagaaagaaagactttttcagaccaacagcagctgaggaaattagttgctggaaacatcctatgcaagaaatattaaaagaagttctttaggggaagggaaagcgatagagattagaaactcaaatctgtataaagaagagcatcggagaaggaataaaggtttaaaaagtttatttttcttgttccaaattgatctggtagatagctgtttattcaaagtaataaaagtaacagtatgttgggtaattacaacatggataaatgaaatgaatgtcaatcatgttataaaggatggaagagaggaattgggaatactcagttgtaacatacctggactaacggtgaaatggtatagtgttacttcagatgaacttgtgtttttttgttttttttgttttttttgagacagggtctcactctctcgcccaggctggagtacattggtacaatcttggcccactgcagcctcaacctgccaggatcaggtgatcctcccacctcagcctcccaagtagctgggactacagacgtgtgccactacacctggctaatttttggatttttagtagatgcagggtttcaccatattgcccaggctggtcttggaactccttgggctcaagcgatctgcccgcctcagcttcccaaagtgctgggattacaggcatgagccactgtgcccagccaaaaaaaaatttttttaataagtataattattatgagaagaagagagaatgttagatcatttaaaatgctcaattaaagctaggaatagagagtaggattttaaaaagaaagaacaagtataacaaagaagaaacatttataaatatgatagctattaattcaactatatcagtaatcactttatttatttatttagagatacagtctcactctgtcacccaggctggagtgcagtggtgccaacgagactaactgtagcctgaaactcccaggcttaagtgatcattcccacctcagcctcctgagtagctgagaccacaagtgtgtgccagcatgcctggctaatttttatattttttatagggacaggattttgccatgttgcctgggctagtcttgaactcctgggctcaagtgatctacctgccctggcctcctaaagtgctgggattacaggcatgagccaccatgcccagcctcagtaatcactttaaatgtgaatggtctaaatataccaattaaaatacacagattgttggagtggtagggggagatccaactatatgttgtctacaagaaaccactttaggaccaggcacagttatacacgcccgtaattccagcactttgggaggacgaggtcaacagattgcttgagcctaggagtttgagaccagcctgggcaacatggtgaaactccaactctacagaaaaatacaaaaattagtcaggcgtgctggcacgcacctgtggttcagcctactcaggaggctgaggtgggcagatcacttgaactcgggaggttgaggctgcagtgagccgagatcatgccactgcactctagtctgggcgacagagtgagatcttgtctttaaaacaaacaaataaacattttaaaacaaacaaacaaaaactttaagtataaagacacagatatgttgcaagtaaagggatatacagagatataccatggtagcactagtcaaaagaaagctggagtagctattttaattttagacaaagcaggcttcagaaaaagaaaatgtcagggataaagaggagcattacataatgataatagaaccagttcttcaaggaaacataacaatccttaacaaatatgtacctaacaacaaaggtcagaatgcaggaggcaaaactgatagactgcactattataagtggaaacatcagcaatcctttttctgtaatgaatagatccagcaaacagaaaggcagtaaagatatagttgaactgaattgcaccttcagtcaactttatttaattgacatttatagactacttcatctaacaacatagtcttctcaagcacacatggagcattcaccaagatagactacattccgggccataaaacataccttaagaaacttaaaattgagtataaattatacaaggtatgctcttagaccacagtggaattaaactagaaatcaacaacagaaacatagctaggaaatcccaatatatttagaagttaaacaacacacttttaaataacacatgggtcagtgaagtctgaagagtaacataaaaatactttgagcaaaataaaagtggaaatacaacttataaaaattggtaggatatagcaaaactagtgcttagaaggaaatttatagcattgactgcatgtattagagaagaaggaagatataaagttaattacctaagtttctgccttaggacaccagagaaagaacaatttaagcctaaagcaaagagaagaaaagatgataaaaatgggaacacaaatcaatgaagttgaaaacaagaaattattagaaaaaaaatcaacaaaccaaaagctagttatttaaaagactaataaaattaataagcctgtagccaggctaaccaaggggggagaaagagaagacgcaaattacaagtattcagaaagaaaagaagattcattgctgctgatctcttagataataaaaggacaataaacttaacttagataaaagggaccaatttattgaaagatacaagctcccaaaactcacacaaggaaaaatagatgatcagaatagactgtatctgttaaagaaattaaaccaccaaagctgaataaggacaaaacaagaaaagtataggtcaatatccttgagggacatacatgcaaaaattctcaatagaataccagcaaactgaattcaacatcacattaaaaggatatggtcatgatcaagtgagctatcttaagtcatactatagacagaagcgaacatttgaagagaacatgaatggcaactttgaaagttgaaaacagactcagaggatcacccttgatcaggtgttctcaaactttggcatgcatcaaaatcacctggagggtttattaaaacacaggtggctacctctgagttgttgatttagtagatctggggtgggacctgagaatttgcatttctaacaagttcccaggtaatattggtgctgctggtcctgggaccacattttcgggaccacattttcagaaccactgccctagatgttcacaataaacactgatacggaaaaccagtagaaaatatctgtcatgtgtctgaatttttaggaaacagctttaattcttattgtaaattgacatcttattatttataactttactttgaatatgtttatctctagttggcctgcttgtgtactattgagttaataacttagtaattagtctgggttctttgctacctaatgagaatagtgccatctagaggcattagcccaaagggccaccatagcgccaaaggaagctgtggtttctggagagggtgagagggcaactcattatcatcaaggacttattgacaacctactaggttattaactgtcatgctacaagggtatacaaagagttagaattgcttgccagtctccaccttttaggtttgtgactttctgtatctgagtagctcaaaagttctgtgaaggctaagtagggctctgggccttggaccagccccccattcagctagaacagttctgctctcatctgttgtacacattggaggttatgtttgcaaatgtatgctatagtggctttggataggcaacacagatatattatttgctgtccaagattgtcctaaggtactgattttctggcatgcaaaataatggcgtgaaaaatatgtaatcattgagaaaaagggcataagctattaccacacatcaaatgttgaaagtatgttttccttcatattagcacatgttaaaattatgaacagttggaaataatattctagtagaccacattatcacaatcataagttgaatataattggaagaacagatgttcaccaatgtcagaaggggatgattcgaggggaaaaaaagtgtgaaaagaaaatttgaggagttaggagtataaactgttttctggatttgatttgctatagagtcagcacacatgatgggaaattcattatcaactatttcaagtcattgtttagaaagtatgaaatgaaagctagaaatcatgctggttttgtattagcagataaaaacattacctaaaaaagttatacaatcttgcaactaatgatgaatttgagtcatgcttatccaaagaaacaataaactactctcactgcagtcccccaaataggaagaaagagagaaaacccagtggagctttctcttgccaggactgggagtggcagggcaacaaggaggtaagatggaatgactagatgagcccaaggcaggaacaaccaatcaatcaactctcagggctcacagtccctagaaatgaaagcacgtaaatctgtgggtcagaagagcaaaaaaccaaagtgcagagcaagagaagaagttaggaatcaagcaaattgttaagagtcccagggcagacagaagtagggagagtgagcattgcagttaacgtccataacacagaccagattgtgcgctcctctcttggcaatctataggtatcttctcattgatcacagaaccgagtccagactccttggtgtgaagttcagtttcctacttcatttatacccaactttcctttttaaccttatgcttcacctttccatataaccacacatagccacagaactcatggctttttccaagtaacagccatggaaacatggctgtttccaaaatatcactttacaataaaaagtaacacactttttatgcctttttcttttattgtttgctaagtctataacattatgttctccttgctgaatctctctgctgtttcctgctaaggactgttgaagtccttagcagataattggttttagtcaagtggaaagcataatttgatgactgtggttttcaccgtttggagaataataattaaaaattattttataaaacatatgcttggggtttacaaattttgaaatttgttttctaaataagatagcagtgttaaatagaataattatctcccatctccttcactgtaatgcatactttaagagctaacagagttgtaccagtgtttagatacagggagcttacagaatacttagggagggagctggggtttgatgagagtgtactcccacttcagcctagtaacctcaggacagttgtgaaaggaaggccttatggatcgatgaagtaggtaagcctacagaattagggaccacagttctcattgagccaattcactgatattcagtatcaacccacaacatctttgggggcttctgtattccatgtgagaaagaaatcaatggtgattttccctacaaaataggtgtaagatatctaggaacaaccgcatgtcaatgcattcttttttttaaatttattttgagaaatttttaaaaacgtagcaaaatagagttatataacaatcaaagtttctattactcacaattgacagttaacattgccatatttacataaatattttttgttaacaaaataagtgaaataaaacaatacagaaaaaggtttgttttttgtatcccatctctagttctatcatgaatttagagtaaatatttcatgtctctttttatgtttgtagttatatatatttatatatatgtatagcatggtgaacaacatattatttttttgtgtatttgaaagaaattaaggaggaaactttttattttattttttcttaaaaaaaaaggtatacatgagcagaatgtacacgtttgttacataggtatacgtgtgctatggtggtttgctgcacctattgacctgtcctgtaagttccctcccctcaccgccccacccctcaacagccctagtatgtgttgttcccctctctgtgtccatgtgttctcaatgttcacctcccacttatgggtgagaacatgcttcacaaggaaactgtattttcatcttgatcaaagaattctttaaaatatgaaatattattcttagcctttcaatttttacatgcaagttgtttagttattaagatacagctttggagtaatgactgggggcaggatggaagggtttagtagctgagcaaattctggtgtgagatgtagttactgtctgcagactcagtcctaccaaaggcatgtgtagtgctaatctccagtcttgtctgttccatggtcagagatgaccaataaatactgtttgtatgaaaataaatagttgaacttatacatttatattcagtatatagccatatatatatatatatatatgaatggcagttaaatatgtagttaaatttaaactgttttgcttggattcagatacatagttaaatgtatacatttatagtaatatacatgtaataaagaatatcttctagttatttatcttgggtagagtgggaaaaggtacagtactttttatgaatcaaagggccgttacccttctattgtgatccaataaactgtgttcttttctcacacaaatgcttgagatacttaactttggcatttaatgattgtgtttttatctatgtctgtttcctgttagtagattatgatctcctgaaaggcaaaggtagtatattttatttatgtctgtactttcaataataccaagggccaattagtcactgttttctgtcagagtagtcaattcagttcatgtaaaatgaagaaaataataatcatcagatttatctgtgttctgaggctataagggaatttaaaattgaaagcaattttaatgactgcttaataactttaataactggagcagcaaatttgaacgattagacaaaaagttaatgcgaagtactgatattatttaatttctctactaactatttcagaacaagttgtgtgtaccttttgaaataaactctagaaccgttaggtgagctgtgaagtgatatctaatagagatgggtctaagaaataggctcaggttctaagagaaaattgtcaatatgatattggggctggggttacagattaacagcatctcaaggcagaagaatttttcttagtacagaacaaaatggagtttcttatgtcttcctctttctgcatagatacaataacagtctgatctctctttctttcccccacaatttattggtaacaatatggtggattggattgtcatccaccaattcgggcagttctcaatttagaaatctcaatttagattatgttccaaatgtgcttcattgattataacttggagtacattttccttatagaaagaatggtataaatgatttccatattagcattcttctggttttgatacaattgaatgtaattttttctacattttttggagagtaagttaataatttctagcattttctcagaatatattactattaaaataataggaatgaaaatatataatcaagtatatagtcttttaacatttcattttctgctagtaaaataatatctagaattttatttactagtaaaatgaaaaaagataggctgggaatggtggtttacgcctgtaatcccagcacttcaggaggccgaggtgggtggatcacctgaggtcagaagtttgagaccagcctggccaacatggtgaaacctcatctctacaaaaattcaccaggcctggtggtgcacgcctgtaatcccagctacttgggagtcatgagaattgcttgaacccgggaggcggaggttgcagtgagctgagattgtgctactgcattccagcctgggcgacagagtgagactccatctcaaaaataaataaataaaaataaattttaaaagatagcacatttaaattttcagtcattgtacatttttagaaagtactttccccattaatcttaccactttggcaaacactagcaagtactgtgttcttgaaaatctactgaatagttcccagaggtaaagctagatctacctctgaaatattctgatttataatgtcctttaaagtttatctgaaatacaatgttttaggaccttatttatgatgtcagtgaaattttagaatatttagcccattttctttgctctaaccatgtaaatgttcttggtatatatttggaggaggacttaaataacaggaattgaaatgatgacaatcatagcttttatttatctgcttatgccagacacttaaacaacagccattggaggctagcattattatctctattttgtgtatgaggaaactgaagcctaggttaaaggatttgctcaagtcacacagttagggagatgctgagctgagatttaaacccagatgtatctcatctccagagcccgtttatctttgtactgcacctactgtcccaacagaaggaaaacttggatatttccaaatgctgcatattttgaaaaagaacttgggatgcaaatattaacattattgtggttttttatatcaaagaatgatatgatcacttctgggtagagtgattagagaagcaaggtataaactcttcaaacctaaatataatatttcatgcataaaaaggtggatttggagccattagaagtcctaccaaagtcaggttccagattctctctcttcccaattctgtttcatgctgaacttccttgttaagtggagaatggattgtaagctgacctgggaaaaagagtgagagcataacatgtttaacctgggagattaatagtactatggaaatagggaagtaagcctcattgagtcaagaaaaagcttttcaataactgtatgctggactttggggagcagtgataagcaagacctgaattgtaaagtaggagtgaattaggagtagtatagtgagataaataaacagggatgttgtggaaactgaaaagagagccactttactcctcacatcatgaatcataaaaaggtctctcagaggagataacgcttgtttcaagtttgtaggataaacaggacttagactaaaaggggagatgagcacacacacacacaaaaaaaaccatatacaaacaaaacagaagagtagtttttctgagtttggggtgcctcttgaatgagccataccgactgtaattcccatcaatgccttgcaagtcatgagagcaagaaattcagtgttcagtcactcaaattttaggaaacagttgactgtcttgtgatattttgaaatattacaccctgtcattgggttatatatatgttcatagggaaaacctattcaagttttctacactcgtagaatattagagtggccagcatcctcagagatcatctagtcagttccagttttcattcagccataacatttgctgtgtactagtcacaggacacatgaaaagatggaccttgccttcaaggaactcacagcctaagagaggaaataaacatacaaacagacaatgtgcaagtttgataaagtgctataataaaagaggtactgattaagcacagaagagagctcattaatttttcttgaggattagctaggtaaagttttaattaggtcttgaagaacctagaagagcagttcatttgtgacagggagggaggatatttcaggtcaggactgctgattatttaaaagggacagtttttaacatttctacctaagtttttcgatctggattctttaaataaataaagattatctaaaataattaagtcatgtcatggactttcttagttgtctattagtaatataaattagcctaagcagctggttctcaatgtgtggtactgggacccagtgcatcaacatctcctggaaacttggaaatgcaacttctcaggccccagcctagacctactgaaacagaaaccctggggtgtggagcccagcaatatgttttaacaagcctttaaggggattctgatgtatgctcaagtttgagaaccactggcctaagctaacagtaatacacagaattattgaaagttcatggactttgaggatttggagacctgaatttgaatctcacctctcccacttaataagtttgtgactattaatctgtcacctaatatctatgagcattgggattttcacctatcaagtgaaggttataatgtttccttcccaaaattgttgtgaaaattagttaatataatgaatgcctaatattatcactggcacactgtaggctttcgataaatggtaactgctttttatcatgattgttatctttttcttgatcttttttcagtgattacttttacttaatgaaaacgtgctcatatttttgcttttagattcaaacgctcaagaaattaaggacatttatggactaaatggacaaatagagcacaaactagctttcctgagaactcatgtgccaaaggacatgaaacttgtgctcattggccattcaataggcagctatttcacacttcagatgctgaagcgagtccctgagctcccggtaagtaggtctccagaggtaactgtgggtgctggactgtgtgcctgcacaaatcctcctcacctttcctatgttcttttgtctcttgttcagttgataaatagaacagagagagggatatttgctttctgcctttatccttatctccatattacgatgggcttatgtgaatgtatgttcataatgtttcaaagaataatgctgagggagataagaagtttctgaaagaatgcctttgaatctagggttatcggagttcttatgttacacattacttgctgttttttataaagaaatatttaagagcggtcactaggtaagacctagacaagaatctgtcttttgtgggaaggtattttgtaaatattcttgcctttttcagaaggaagaaatgtatcatcatcatcactgataggcaaacagctgtctttatggaacactacatctttattaattcataagttcagattcttacctattctgtatcttggcagcctttttgagacacatattcacaaatgcttgcaaatatttgttggataccactgtgtgccagatattaagtgaggcgctagagacgcaaagacctatttaaagtgcccaggaaagcaagtgaactataagagatataaaacaaaacaaaaaaattgtactttcactagcatataccattgaaataactcactgaatggatgcaattcacaagataattcatttctttattcaacaaacatatattaagccctttccatgtgtcagatcctgtgctatgttttgaggacatcccagagagtaagacagtctttgaagtaggagagcctggagtctgcttgaggagacagtctaaccaatagatgtgatacctactgtcttgtttcagttcagggggtgtgggagcatggagtgctggtaaacctagtaatctgaagccaagataggacgtgatcgcttcatggctgctttgtgctaggattttgactgtttctcactccgtgggataaaatatcttcagtggggtctcagagctcactaagcactcgctccttttcttgccagcttcacctgcttgcttcttattcgtaattgcccttgggaaatgtacaactatagcctccctcgctgtggtttttgatactaaatggaggttttaaattattattgggtataagaaaatatgtttttcatttctaagtgtgaattcaataaattcaagattgtactctgttctctgtattattgtctactgtgttgggtgttttttccctaaataaggtgtcttaatcagaatgcaggctttatttttccttttagcattttgcacagcttctaatctcttttgtgccttcgaagtctcctctagtactgtgtcatgtggttgccatctttatggtgtccagctctgcctcttagtggttctacttgcacagttgctgtgagttctggcagtagaatcaggacacctaggttccaatatttattgtccttttttttttttagtctgtctgatcttagacaagttattgagtctctactttagttttgagtctcaacctcagtttcctcatttgtaaaatggggataatatgttcttcaaagtatttttgtgaggaattatataaagcatcaagaatggtatctgtaactttaaagttccaaataagtattagctattattattattagggaaataactctagagtcattgtctcagtcattaggttaactattgtattaggtatctattgctgtgtatcaaattgccccaaaacttagcagtgtaaaacaatacacatttcttcactcgtagtttctggtcagaagtctggccacagcttagctggattctctgcttcagggtctctcccaagattttaaccaacatgtcttccagggctacagttttatctgaaggctttagttgagatggatctgcatccaggctcactcttgtggtttttgacaggatcccattccttgagagttgttggacagagagccttcattcagcagtggcatttggggggaggccaccttctttaacgtgtcggcctgtctagctgacttcattagagcacacctggaagaagagtcaaggaggcagacagcctgctagcagatgaaaatcacaggctgtaacccagttacaaagtgacatcccatcacgtttcctgtattcttgttagaatcaagtcactaggtctagcccacactcaaggagagataattacacaagggcatgaatactaggaggtgaaagtcactgggagctgcctcagagctgcataccccatcattctaaaattaggatttcacttgtgtgttgtgcagtcaagaacatggacataggatgtacataaattgttgcatttatttactggtgtaggcaatgacttggacctgtcaaataaaatgtagcaaactgacatgaaatgtagttatttgttgttagttgttccaggtgtcttaaacactttaaaaacattaaaaaggatacttgcatatttgaaataatagcattactgttctataaacataggaaagaaaatattcattttggagcccatcacagactattattaacttaatcacagatctgttttggtttttgtgtttgcttcagatctgttctgcatgtgatgtgtggtttctcttttgtgtgtttgaaaatgattgttcaatacattgtcttgaacctttctctctttttgggcccatattcacaatgtctgttgggaaagaagtagaatgcatctcaaggttaatgtgctttcttatagctttttcagcatcataactttctaattattgtcctgccttcaggtgtccttgcttttgcaggaatagtggtgaaaaggggaaacaaagatgaaacgtgaacttaacctactctatttgtggagacacaactcaaactgattatagagttttcagaaagatatgtgaagctgtgttttatcttcttaaaaagggtgtaagctagaaaataatgtgtgcaataaattgtccaaagggtgtaagctagaaaataatgtgtgcaataaattgtccaaaaggtcacctcttttggggggtaggaggggcagtgaacatctgtatgatttttaaattattattcagaagctttatctggtttcaattaactacattgttgaaattccctaccccatccccagcccccattaaacacctgggtcagtgaatattggtggtgtgatccctgccaaagtgttgaaatttcagtgtctctgggctactctaagacaccgcagtgcctgcatgcctgaagttagcatgacatgctccatttaagatgcatttgacaaatatgtttgtgtaagccagaatgttacaatccttaatcattttgccaaaaataagttagctattatgttttataacatatgaagtgtgataataagaaacttgtgtttccatctcttctgttattttttactggaatatttgactcttgtaagattttgaggacatatgtgtagtttagtagctagctggtttatttagttttattttggttcagctctttgtaatattttcataactaattataggcaacttggtcttaaatcattttaagagacttattgtatatgtcagatatactgtctgacctgtattttaatatactaaaaaaaagttgcccctttaaaaaaatctggcatttaaagttgtttatctaaacaaattccatacatagaattagagatattcttcatatattttgaaattagtgctcagtatagggaatttaaagagaaacttgagcaaataggtaattgaaagactgttaaatagtagctatcatgacttacaataataaacataattgtttttagattcatagaatcttagaactgagataggctttagagacaatctggccccatctttcattttatcagtgggaagtgagagaaaggtcccttgccagtattcagccttggctctgcctgaatctggggtggggcatactggtattagctgtgagtataaaaagaatccaagaaggtattgatggctccttcaacctgtggatgatagcagagcctatagctattacagtgtgccctgcagtgtacacaactgctaagttcgtgtgactcattgtgttggtgctccaagagtaggaaaccccgtgaatgctctagcaatttcaggattgtgtgttggggtggggggagaataatacagaagcaaaaaagtagtaatcttatctccactatctagaatcttctttctcttatcaaccctctatatgttaaaaatgtgtcacctgattttgccagtaaatctttttcataaagttcaagtttgggagttgagttgaaagcccttgattcttcactgagtcttggggtgaactttaattaatataactttaattttcctctaagaatttatataacctttaatgataacatgttctcctcttcgaaggatatcagatccttcacaaacttaattttttatattatttggccttctgtgcataataacacagagtttcctttgtcttctggttagcaaaaatgtcttctctctgaatgaaatttctggattacttaaactcactctcttaagtaccagactattttacccaactggataaaaatttgtctaaaatatattacttacttatctgccttcagcaatgcatattgactatagaggaattttttcttagtgatttaagggcagtggtaataacactattattttgatagtgttatgctagaataaaatgtaatcaaaaggaatgtgcctgtgtcctgaaatttcttaggtgataatgctttttcattttttaaaaaaaatgtttcatgtatgtctattttagtttttctatctcctctctcagtgttaagtacttcttctcttccctacttctaatttattgctactaatttgctgtgggcagagaaaaccagtaactacattataatttttttcagtaggaatgaacaggtcctaaatagataaaggagtaaaattgacagcattaaatgtgtggacattgttatcactcagcctttttttctcttcttttgagatcctcaaaaaggatgttttggggcattttaagtactcaaaattttagagactcaacatacaactatagctgagaagtttgcaaaactttactaaaagaattagaataacatgttagatcatatatgttttgattcaggaatatacctcatccatactaaggaaaaaatagcttcagtgttctccaacaatgagattattgagactgtggtttacttacactattctgctgagccttcatgtctgctgtcaaagtaagacatgcttgtaagaagcattcatattatgtcactcagctatgtttaacagttgagataatctggagggagggagaagaataggaaataactcatttgtcgtagtaaattttgtcagaatcctatccctagattcaagtgacaagtgacaagacacggaaggcaaaatgaggcagtactgtaaggctcagaaagttttgtggagagggttgtcttctacctgggaagctcagaaaaagcttcctggaagagcttcagggccactgaaggatgagttgtatctggaagtagaggattttatatggtggctagggggtactgtgcattctaggcaagggagacagcatgaagagaaatggttttcatcactgggcacggggagagggcagtgggtggtgtgactgggttgcggcagagtgtgcgtggaggggtcgatcgggcatgagattcaaggttgatagagatggacaaaaagctgggctagggagcatgggctcattttctggacagcagaaagccattgaaggatctctgatgatagcagtcatgcatcaggtaaattaatctctcagagaaaaggaaaatgagatggagatagaaaaagtgcagcataaaaagtgaagatccaggtgacaggaaagtttactagtccaaataagaaataatgaagacagtgtaagggataaaattgcccagggaaattgttgagaaaagagagaggccatagatgtgtatcagcggaatgatttcatttgccataaaggagtgttacaggatctttggggtgttgctgttctggccagaaacctgtggttggcggaatctttgcctgagttttgctcgggcccactgggctcgttccaccgactctgcctgacaggctatgctcagctcatgctgccggcctggatcctatgcctccaagggagactagagtcaggcgtggagtgatgaggggtgtgtgtgagcgagtatggggtccagccactgcacagtcagacatgctggctgctgccatggggcaggcagctccaggtgccagcatgggtgtcagctctctgtgaggctgcagctggaccaggcacactgtaagcagcttccccagctggcaccagggaatgcggtggcacccagaagcttagagactccaggaaccacaaggccccaaagagggagtcacagctctggctcagggagctcccaggtctgggctccctgaagtgctgcagattttctctccttctcttcactcgcaacatggcgagcagggggcatgtttcagctttgtttgtgttacagcagctcttttagcctcgccactcatcaggtcctgagttcttgttctgcgaccaggaagaatgaggtttgcagacatgcagagggtgagcaagacagagaggagctttattgagcaataaaacagctcagagaagacccgcagtggacagctcctctgtgtagccagggtgtcccagtgagtgttcagctcctagcagagagggtagctcctctctgcagctggtcatcccatcctgcagctctcagcagagaggaggccctgtaggtggcttctctgtgcaggcaagtcatccctttgtctggatctcttggcagagatagtagctcctttctgcagcaggtcatcccattgtctctctgtcctctgctctgctctggctgagcccagggcttttatgggcctcagagagaaggaagtgcccactgattggtccatgggcagccaggggtaggcccagaaagggcaccacaagtcccctactctggtccctgggactggcagcctggcccctagccttcaaaccctccctggcctgcaggtggggcctcaccggagatcctccctcttctgcccagtggcccatctgcctcctgccagcatctaaggcacccaggttgcttgtgccaaggggcacctgcaggccagtgctgagccgccctcaacacaccccctcaatttcccctcatgcttgtcagcacccgaagtccagaggggactgaggtggcagggagctggcatgtcagtgctcctcaagtgtgtgcacacccagccgggctgtgacagtgaccaggcttggccccaaccctactccaagatcagagcgggcaccaggagcagggagaggtcatggagtggagcaggcctctccaagccttcaagggcaagggaggggggacttcccaggcccccaagggcacagagaggcctgggtccacagccttgtcttgggctgctgcctgtttctggctctagtggctccatggagcatgaagcccagctgcaccccctcacagcctggggcaggggctctaggtacttgctgggcccaggccagtgtcagggtaggggcaacatctccatgagctcccccagtggccctggcattcaggggcagctgggagctccccctcgcccagattgtggccctgcccagtgcgcacctccaggaatggattgcaggccctggtctggccgtcaggagtgtcaggcctggtggtcaccctgatgcagggcagaccctggggacagagccctgggcggccctgcgcagagccccctcctgaggcacagaaaccctccactgctggccggtccccgaagcaggcgtcacagtcagctgcctcaaggacgtggggcacaggggacccaccaccgccattgcagctcctgtagccacttctgctgccaccgtctatgcctccccactgtggatagccccctgctgccatcaggaggggaaagaggtggaagtcacagaaagaggcagaagatataataattttccaaactattggctgcaatccattaatggatcccaaaatcacttcagtgggttgcaaccagtggatcagtcaagacagtagactgtgctataataacacaatgtcagtggcttttaacaacaaaggtttgtttcttactcatgatacaaatcctttgagggtaggctgcccctatgaagatctctctatgcaagctttctccagaatccagattgatggagtagcctctgcctggaatattcaagtcccatggcagaggatataaagtgaatagtgaaccacacctacattttaaaacctctgcctggaagtgaaaattttcactcctcaaattttattggacagagcaaatcatatgaccaagtcagccatcaatgaggctgtgaagtacagtcctccccagagaatggaagcgtctgtttgtgaccaatgaaacagtgtttttaaacaatgtataataaaatcaagtaaaatagaatagaataaaaatatattgcagtaaaggcatgtattatgaaacttttgtttcactttgtgtgtgtgttgataacatagtagattataatgtcgaatgtatatcttactgtgagttaaggtaaaaaaaaaaaaaagtttgaaaaccattcatctggactagagtacaccacagcagctaagaacagagcaagaatgtcaagaaaggggtagatatatggaggattacagatggccacagatttttttgtcattcctctcaagaaatgaaacctgtttcccttcccctttaaatttaggccaagcatgtgacttactttcaccaataagatacagtggaagtaatgtacttctggtagcttcaagtccaggccttaagaggactaggagcttctatttcctccctctcagaagccagctgctgtgtaagaaagccgactgccctgagaccacgaggctgagagaagcccaagctagctacgtaggaggatcatgaggcaccaggcctgagtgaaaccttctcgggtcttccagcccatctcagcccagcccatccgccactgaatgcagcccaatgagtgaccccagcccacaccacatggagcaaaagaaccatccaactgagccctatttgaattcctgacccacagaattgtgagaaagcaaaatcattgtgattttaaaccataagtctagagatgctatgttatatagcagtagataatttaaacaaggtaacagggttgaatgtaacaaatgttgaaggcttcaggcttctagagtaaaaggttcttggtgtcctcgaagacagacttttagtgaaataatgggacaagggggttgcaggaagttaggtgataaatggatagtgattccactggccagtgaaggagaagaacacataataatttaaggaagaagctggtcaagggaactttttttcctgtaagtaggggagaatttaacatatgctgagaggaacagcccaagcgtagagagatgtcgaaaatgaaagacaaataggaacttttgttggaacaggtttccttccatttgtcttttagtctacatacttgaaaacttggaaaatggaatttttcttaatatttatgtctttgcaaaagtggtttaccccttccctggggtgtagggggaacatatattacatatttggttctccttttccatctagaaaaagtctagctcaatttttaaaattgatgttattgtcattactaacagtgattatacctaacattcatttgaaatttataaaacgtgttcacatgtaacaaggtattttaacaatctgatttttcccatcttaaagatgagaccgaagtgccaaggagccatgtgtccaacccatatgtcaactagtagaaagtagcagagctgggactctgtattctgttttctaactttcccactacctgttttctaggtgagttagagaggtgatgattacagatggttagactaagttgctttcacaaatcaccaaactatttggcctaaacttaagatttctatttttgcttttttaatatttgagttcttcaaacacacagtgagtgttttagtaggaagcaggtgaatgcattgggaggagttcagagagaactgagagaaatgacagcatgtgtgagtgttctggagcataggagataaagagactgttgaggcctgggccaagggcagaaattaaactgaaaagatagtaaatcagagtcctagaattgagctgggaacagaaggactatgaaggaaattggaggattctgcaaacatagtgcatagtagtttgacagttacctctatgtgacccattaataaatcctgctgcgtgaaaaacacaggcttagacaatcagcacctaactactctgatttctgaaagattttccatttcagaaaaccgtaagtctcttactctaagtttgtattgtagatgatgaaatgctatttttccaatcacttatgcatttatttaagtatatatgtatctgcatatttgtgcgcacacacacacattatcttttctgagttacccagaataccttgctaaaaactagacacatggacagtttcaacttttcaacttcagccatttttagttatctgtgtatttttttaaatcctgaaattgctttcaaagtggaaaaattgtgtgggcttttttcatcttttcataactcaaaaacgacttaatatgtttttctcaaactttgcaaaaaaaaaaaaatcacctttgggctgaaaccaagcatggaaaatttcaccacaaagggctaattttttggaaagctgcaagaaagtgaaaacgggtttataatagaacattcttcatgcatgttaatacttagtactttatctaatgcatttcatctgagaatttctgaacacttttcagatttaaatattgagccattttaatatttgtgtaccaatgatatattgtcagatatcgaaaagttcccccatcctctcagatgtctaatagcttgggaattagtgagatgtgtttaaaatgacaggtggggcaaatgaagttaagtggctgctagccagagaaagctgtatatttactgcccaacacattttatcactacctcttcttggcccaggagtactgtagttgtaagtaaaatataatagatgacactgggcactaatttgaataagccaacatgtctcaaagtagtatcaacagcacctgtgatcttgttagaaatgcaaattcttccccctcttcaccccaaggggtggggctcaccaaccagcatttaactagcactgcaggtgattctggtacatgcttaagtttgagaaccacctacctaagctttccaaaagcttggaacagaatgcattgaaatgctgtggacagttaaatctgtccttggtctttctgtgatgtcagctctgtcttctcatatcccttggaagcaggaggaatatgaatcaaattctctgaaggaaaggtcttctgtgttaatgtgctctagttctttccacctatgacgttgtccataaacacagagactcccttgagtaaatgtgctgatatcagcttgttcagggtaacagcactaccaagatgtattttctcatttccttgaattattagggtcaaaactgaaatgggactataaatttctttcttatttctttggaatcttttaagttctaagatggtatcagatgtgtcagtggaagttgattgaagctctttggtgtgtaagttctcaatctgacgctttgcagtagacctctgcatttcagcaaactccatggtctgtatttttgtgtcttcaggcacggaaatagttgtttacgtggcattgtaacaagttttgaaaatattaccctggtgatggaagtcactagtctgtagtatgtgggcctttagctaatccttttagcttaggttaatttcttacaataaataatttgtagaaattcataaaaaggacagcaagttctcaaagatgcaaaggatgtgaacagataattcactgaagaactaatatatcaaaaagtgtgtgcctaccacaatgtgtgatagtgtttaatgaattagtatatagtagtatacttaatgatgtctgtttatattgagtatggtagtatttgctaatgttcatttgatgaatgaacctcaacagttatcaaaattaactattactattacatagtctaaaagaaaagttgtgttgtgtatgtgtgtacttcgatatccattttaaataagtttgaacaggtaaataccaggtggcttatagtagttttctctggtggttaggggtaaaggatgtattggagtgaaaactctacattgtttctgcttttctttataatgaccatgtattatcagaaaaaaataatttccattaaaaaagtattcataccctttgaacctactaattcttttttttggaatttatattaagaaaacagacaaagatagaaaaaatcatgtgcaaaactattatctattataacaaaaaattggaaacatcctaatgtccaaccttaaaggcaaggttaggtagagtatggaaagtacagccattaaaattatatttgcaaaagacattataatacataaaagttaattatagaatattaaggatgtcagaatacatagagaatgtgtgaatacaactgtataaaaatcacacatggaaaagcttgataattataaaatgaatttagtggttgtatttaagtggtgagtttgggttttttttttctattttttatttttgaattttctgtaatgacatatatttattcactattatagacatttaatggtcatgcatttttctctctctttttttttcttttaaggtgatttgttcatgttactttagagcagaaagttgttccaggatagatcttttttaaaaatttaattttggattcatagggtacatgtacatgtttattacatgagtatattatgtaatgggggggattgggcttccagtgtaccagttacccaaatagtgaacattgtacccagtaggtataaattatgtttgctttgtatattgtcaagttcagtgcagtccttcttagggctcaagttatcctacagggcccatattaaataccaaccttcttaagtccttctgggtacaagatagtttataaatagacaaaagaacaaataagtcattagccaaatgtcacttcctgcatgaaaactttgctgattgctccgatagaatataacttctgctacttttgggccaatgatattgtctcctgtagcttttctgttgtggcttgtagcttaagtgtaatttttttttatagccacaagaacaagagctggcttgttttctttgtacccttgcaagttctagcatagggtcttacacatcccaaaaggaagacatccattttttttttcatttaattaaattaaactatatgaaagttacatcagcagcttctgctggtaaaattctcacttggttcataagtgccactgacttcttctgttcatacagattaaccactgcattgaccttaaggaaacagttgtcttgttcgacagtgaaagagaatacagatcagcagcaagagttagcagctatatacatccaaaggagcaatactaattcagcttctataagatagaattgaagaatattattatggtctcggaatagttgaagatttcttaaattggatagcacaaatgtttgtacaaaatactgctgtaagtgaaaggaaagagcttaggggtgtggcggacagactttagggtgggtggcaccccatgatcctcacctcctaatgttcattcctacacgtaatcccctccataagtggatatgactgatgacttgcatctaaccaacaaaatatgataaaggtgacagacaggaagcacatgattatgtgtatgtgatttacatacctaagattgtaaggcctgtcttgcagaagtctctctcccatgctggctttaaaagcaaactgccatgttgtgggttgtctatgttgggcggcctatatggcaaggagttgcaaggggccactagaagctgaaagctgccttccgtcaacatccaacaaaaaaactgaaatccttgatgctacactacaaagaactgaatcctctccacaaccttagtgatttgtatccttccccagtcaagcctcagatgagactgcagccctagctgacaccttgattgcagtctggtaagatgctaagcagagaacccagctaagctaggcctggactcctgatgtgcagaaactgtgcaatatcaagttcgtattgttctaagctgcaaagttttagtaatttattacatagcaatagataacaaatcaagaagaaagtaaaagggtaatagcaactccttgttttctttgcaggaaaacccacctctaagaccagtagtggccctaagttagtatcagcattgtagcagtagcagctagcctagccttttcccctgtcacttttccctgcttttacactatcttacccactcttcctactccactcaattacctagacttttggtcttccttgcaatttttttattaacattacttctctccccacctcaaaaaaaagataatttgggttgttgataagcatgtcttttgatagcttgcctggtgattatttgatgtaataacaaaatcacaggttgggattcattagcatcattcatcctactctaggttgaagcagatcttatttgaaagtattgccatattcaaatctcatctgaccaagaggttaatagtggtaggatattgagaggccctgtggtatgagagagtggcccatgctaaggcagaggtgatacatttgtgaattcccttgcatttgtgtggatataggtctgaaaaatgtcgcttgtacctggccacactgaagccttgttcatagaagagcacattcatagagcctcagtggacagactataactatcagagaagacataacagggaggggagtggaaacagatgaacaacattctgtgaaattgcctctttttggcttttgtttagttcagatagaagcttctttctaggtctgtttgtggagatgagaagtatgattgtgatctttaagaaaggaaaaagctctctaatatggttaaccagcatgtatgaggttgttttacgctcacttccagcttgtatggaaaatctgtgaacaatatgcaatgtaggccacaaaaaatttcctgaaatggaaaaagcctagcaggcactaaatgaaagctaggcactaaatgaaagatgcttcacaagaataaaatgtggttgctttgagatctcacattccaggccatttcagactaattgtatttgtttgggaagaagcaagattgtcaggtatcaggaaggtgtattgatacataaaagatggaagccagcgtcatactgcaaacctctccctaggaagccagacagtaaatcattttccagggtcagtcatatagagaccagagggagcatgcatgaatgaagacacagtctagaaactccatttcaacaaatagtttctcccctcaccagtactgttatgggagcttctgcaaaaagccaaattgagtgttagagattcagccttttcccctttcataatctactacccttaggaagatgctgaggagcttcttataacctcttacaaaggagaaagtctctgagagcttcagtaatattatattaatgtcaatagacattttttcagaagagatttcataaaaacttaaggacatattctggttatctgggtaccaggagggttctccttaaggcccttgtttccttccgttcatagttgctgtgtttgccttacagtccctgcacttagggctccatcctgactttataatttctcattgtctagatatatattttcctatctatgtgcctttgttgagctacttcctttctgctttgtcccacaccatctaactgatgcctcctgttcttctggaaaatcatctcaaacatgagctcctgtgtgaactctttcctgattcttcccagtcatttttactctgtccttcctttggtaacactttttctcataattcttctatattctaccctatattataggcattgcatatttctttgatttttcctgttagatgtttcagctttccttttaactagagcataatctgcatacagtaactcttttgtttgtctccctgcctcgttctagatatttcttctgacttaacattctacttcactaatcctcacttgagctatgtataaacacctttaaactcatctgttacatcctcaattttagttattctattttttgcctataaaatttccattttattgttataattactaattcctgcaaatctccatcttgtcatttaatatcttgatcatattatagttattttaaactccctatctgactttattctcctttgtaccatcaacaatttttaaaattatcattacttttataaaagttcagagatcatatatttgacatgaaaataaataaagattgtgtctgataattccaacatctaagtctcatgtggttgcattcctacttcagctttttcctttgctttggttatattatcttgtctatccgtatgcttgtgtattagtccaggtttgccagagaaacaaccaatgggatgtatgcacatggaaagaggtttattataaggaattggctcacatgtttatgggggttgacaaatcccaagatctgtagtcagcaaactgcagacctaggaaagccaatgatgtaattgtagtttcagtccaaaggtctgagagccagaatttctgatggtttaattccagtccaaaggctggcagcctcaggacccaggaagagctgatgtttcattttgagtctgaagacagaaaaaaaaaaaagtcctagcttgaaggtggtcaggcagaaggaattctcttttattaaaccttttggttctagtcagaccttcaactgattggatgaggctcactcacattagggagggcaatatgctttactcagtgtaccattcaaatgttaatctcagccagaaacaccctcacacatccaaattgtttgaccaaatatctgggcaccctgtggcccagtcaagctgacatgtaaaattgaccatcacagcttggcaagtattttttttaactgaatacctgacattatatgtgaaaaattagtaaaacaatattagaatcttatcttcctccagggaggatttacctttgtttttgcaattattcttagggtaggtcactttgatgccattgggaattgggttgaatcaaagctatctttggaggggctggcctatttccagttcatcgttacttctagggtatagtcctttaatagtttccactgaaagcctagagtgccttctcttttatgggcacacaattcccaggtttttccttcaagctcacaagatttttcagaaactctcttcagcttcttggcttcttagctactgcttgcaaatcagcaaataacaaagaaaagctacttcagcactcctctctgaagttcctttttccctagcattttagccttcaaatctcctctgcctctgatgccttcaaggggactttaaaaaactttcccaacttttctaattgttcttggcaaggagattgctctccaacaagatagcctgccatcttcacctcctatcaacaccattagcagctggtgctgagctttaagttcttccagctctgctattgagaagtatgtcatttcaagtttttaattatttttgtgaactgttttcttcctctggaaagttttagaatattcactttattgtcagtattatattttctgatgatattccttggactatttatcctttttaatccagaaactggcatacttacacactgaaaactcttgtatttttttctctacttgttttctcattatttgtgtgttatactttcagaaaagattttcttgatttattttcttttccattatccatttctttcaatttttagttttttgcaatgagaaataggggatattttccctactttatcttccaattcatctaattaaacttttgattttggcatctatgcaaatagtttctaaggaatttcttgttcttttcttcctttttgtaatatcctttttatttttacttcatgggtctctctttctctctctctcaggaaaacattttttagagtttttgggctcctgcattgtctgtattcattctgaattcctttcttcatgcttttaaaaaaagtactgatctgtctcttgtaagtgaagctttcctcaaatgtctagtgcttattcattatccactcatatttaagaatgaggcaccaggctgggcacggtggctctcacctgtaatcccagcactttggaaggccgaggtgggtggatcacctgaggtcaggagttcgagaccagcctgaccaatatggtgaaaccccgtctctactaaaaatacaaaaattagctgggcatggtggcgcacacttgtaatcctggctacttgggaggctgagacaggagaattgcttgaacctgggaggcagaggaggttgcccggagccaagaccgcgccactacactctagcctgggtgacagagtgagactccgtctcaaaaaaaaaagaaaaaaagaatgaggcaccaaaactatcaggaggttttgtatgggagtgggtttggtcagctggtcagctgtactacagggtaatttggacaggtatccaactttttttggtgtggtattctccagtgtacatattttttctggagccattaagtctcttcagaaaaacattttcaaaccacttatctaacacacagcatcctgaagcaaacagctcaaggagctggagtttgcatgggagaatgtcttagcatttagtattttggctttcacttatattgtttttatgatgttccttttcccctgcctttttctgtgccctgtgtctccagatcaggagcctctttcttctatttctacacagaataaacctccaggccatgatggggttatggagaagttgcttgagggtattggatgaggcaagtgtcccaggggactggctgcctctcagccagcctttcattcatcaagtctgctctgtgccctgcactgttactggcacctgttatggtcttggatccatctgtgaacaaaataggaaaagaaacaaaaaacaaactgcttatgcagaatttacagtttactaaggagagatggtaataagcataaaaatgagtaaattaatatgttcaaaggtgatactgccttgatataaagagtggagcaagataaaggggattggaagcaccatggctgggggatagagggcagtggtggactgcaagtgatttttaaaactttttatttggaaataatttcaaacttagagaagagttgtaagactaagaatagtgcaacaacatgagatacacttttaccagatttacctgttgttaatattttacctcatttgctttatttgctcccctacacacacacacacacacacacacacacacacacacaaacacagacacacaatatttcttcttgaaccgtttgaggataaattgaatatattattgccccttatccctaaagacctccttaagatgttcttaagaataagaatattctcttaatcaaccacagtacagttatcaatgtcagtaaatgtaatattgatgtaatactttaatctaccttgcatattcccattttgtcatttggcccactaatgtccttgatagcattttccctcttccactatggtctggagaatcaggtattgccttgaattttcatgttcctttattctcctttagtatgaaacatctcaagcatattcctttgttttttcataaaactgacattttgaagaatataattcctttttaaaaagagattatcctgattttgtatttgtctcatgtttccttttgactagattaaggttttgcattcttagctgtaaaataatacctcataggtgatgctatgtccttctcagagtaggtcacctgcaggcacatgacatccagctgctcatcattggtgatattaatttcaatcacctaatcgagatgttatgcagaatttctccactgcatgctttactttttcttttcttttcctttttttttttttttttttttgtggcgagggtagttggagtcttgctctgtcacccagactggagtgcagtagcatgatctcagctcactgcaaactccacctcctgggttcaagcagttctcctccctcagcctcccgagtagctgggattacaggcacttgctgccaggcctggctaatttttttttatttttttagtagagacgggtttcaccgtgttgcccaggctggtttcaaactcctgagctcagacaatctgcctgcctcagcttctcagagtgctaggattataggcatgagccaccgcgcccagcctgcgtactttactttttcttagcaatgaataaagagtctatggggaggcacttttttttcatgtcaatatcctcctcttcaacgaaattttctcctagattcaacatccattatttatccttgcctgatccaatctttaccaagattttctaactgtagtactttcttcacataaacccattagaactcaatattcttttataagcaagaaccttccttcttatgtatgtttaatttgtatatatgtatttatcagcatggacttatgaatttcggatttattaaaggtatatgattcattaccatattgattttggtgataaaattattccatatttggccactgggagccacttaagtcgggctcctgttgtaactgcaattttaagcaagatgtttattaggcatcatagaagtgacctgctggaggtagagttagccacatggctatctagggtacaagggttctaaacagcagaatagttattacaaaggctttaaggccgtgagtatgcctgtttgagaaacagcaaggccagtgtgactggagcaaagtgactaaggtgtgaagtaataagacagggaaactttcattgcatttgccctccccacactcttctatatcctgtggtccagaagaaacattaaatacacccttatacccaccaacaaacgaagaagtaaaaactgccattaagccaacttcttgaatttattttgtatgttgtaaaatccagatagctacatatagatgtgtactttttgaaaatgtatcccatcagccagtgatagttgtatttccatggagattattccagtcgcctgtatttgaacaattatacaggatctgactgtaattagaaaaaggagatgggcccaagtcaacctagtacaagtttggatttcacattttaaatcattggttaaataaaaacaaagtgaagatgaaaatgtttcttttgttaaaaaagataagaaaatataaaattggagcttttattaatttatacatgtctcagagaaataatagtcacagagaagtagcagacagtggcatgcacttattagcttctcacattattatattacactggaaacatgggctgttactgtacagtgaaactagagtttaaggtggagaaccagattgacctgatgcatgtgtttatgagtttcacattgaaggtgcctggtttttgttgttgctgttgttgttgttgttgttgttgtcgttgttttctctccaaagaatacagcttagaatgagtgaggcaagctcaaatcatgtagctgtaactgtcaacttggtgaatttctgagttatcagaaagtgagactctgggcatgatgaggccataagtcagggaatatcagcaaccatcagaagctggaagaagcaaggaatggattctcccctagagcttcttgacacagtgcagccagggcatctttatttcagcccagtgatactgatttggcctccaaaactgccagagagtaaatttttgttatttgaagccacccatttgtagcaatttgttacagcagctgctggaaactactacattgccattgacacttgatcgctatttcagtacgaagacctgtgtatctgtcttgttcagtgatactgatttggcctccaaaactgccagagtgtaaatttttgttatttgaaaccacccatttgtagcaatttgttacagcagctgctggaaactaatacattgccattgacacttgatggctatttcagtaggaagacctgtgtatccgtcttgttcagtttgggggaaactttcatgcattatttctgtcatgttcccttccctccctccctgtcttttctttctagaactcacttgataggacattagttttcctgggttgggtgtctgattttctttccacctgtttatctctatgctttcagtggaatttttttccactcagtctttttcactgatatttttaaattgaagtataaatttttttttttaaatactactgtcttgaccaggcacagtggctcatccccgtaatcctagcactttgggaagccaaagtggaagaatttcttgaagtcaggagttcaagaccagcctgggcaacatagtgagaccctgtctctacaaaaaatacaaaaattagcctggtgtggtggcgcacacctgtagttccagctacttaggaggctgagacaggaggatcacttgagcccaggaggttgaagctgctgtgagctgttatcattgccactgcactctagcttgggcaacagagcaagaacttgtctctataaaactaaataaatttaaaaataaaaaaagaataccactttgtttactgcgtgtttcttttatatcccactcatcattgatacagtattttctcttagctctaagcaaattacaatttcgtctgattcttcattgtcttttcctctgagttttatatttgttgtgctgtctttcatgttagaggctttacctaatatctgtcaatctgttgtttctttatagtaaggaagtttttccccctgaaatcaatggatgaatgggaattatatttttaagttattagaataagttaaaaatgtgtaaatagaataaatgcatttgcagggcatttactctcataagactgagggagagcatatgtgtgtattgtggcttattgttacaactatctcctagattcattgaagatagaagttacgtttgtttcatagtctcctcattggcttgtagcaatttttcaaaagaaggaaggaaacatttttaccttacaataaaagtctgaaaccacatattttatggtgatctataggaggactaactggaaccagtcacagggtactgtccctaacagaatgtgcatctttcatgcagtaattatattttactagtggaaactacattccaggaaacctttacataaaggttttacaatgttgaaaataaaagatatgctttttacctttaaaaagaaaggtggaacttaattgagaatattatagaattatttcaaaatcagactgcttttaaaaaaacttcaacttttattttagataccgggggtacatgtgcaggtttgtcaaacgggaatattgcatgatgttgaggtttgcgatacagatcctgtgacccaggtagtgagcatagtacccaataggtagtttttcaatccccccatcctcaagtggtccatagtgtttattgttcccatatttatgtccatatgtgctcaatgtttaacttccttttgcaggtgagaacatgcagcatttggttttctgttcctgcattaatttggttaggataatggcctccagctccatccatgttgctgcaaaggacatgatttcattcttttttatggctgcatagtagtccatggagtatatgtaccatattttctttatccagtctaccactgatgggcatgtgggttgtttccatgcctttgttattgtgaatagcacaacaatgaacataagtgcatgtgtctttttggtagaatgacaaagttagtctttgatttaatggtgacaaatgtgcttaattacttaatgcaaactttgctgtatgcatttgaaaagcgtcagttagttctatcaattggaaatattagctgtacttactgaacaactgtctagagccattgagttaggtgaatttcttggttactgactaacacagagtatatgatcctcagtttcatcatagagcatattcagataccgtggaggcacttttgatggacaaaggctatcagcaatgctatccagtcccattagggaagttaagagtctccccagagtctgttgtcctttctctgagctctgcagaagctgagacctcagaagtttagtaaggcagcccgggcacagtggctcacgcctgtaatcccaacactttgggaggctgaggcaggtggatcacctgaggtcaggagttcgaaaccagcctagcctatgtggtgaaaccccgtctctactaaaagtacaaaaatcagctgggtgtgatggcatgtgcctgcaatcccagctactacggaggatgaggtggaagaattgcctgaacccaggaggtggtggttgcagtgagctgagattgcaccatggcactccagtctgggcgacagaatgagactttgtttcaaaaaaaaaaaaaaaaaaaagtttagtaaggcagacgtaaaaatcaggaactaaatttcggttattgctgagtctgggagataccatggtaccaccaggagggatgctacccttatgaacctgttctgtctgggagtaaatgggaggaggaaacccccttcagagacctgtgaggaagaaataaacatcagatatgtcttctttcctgaactaagcaggacagatcctaacctgttctgttatcaaagctgatatggggacttatacacttcagccatttgggcctaaccttttctctgtgagttaactgcttatattcccaaggtttagtctctatctcatggggtcttagctgccctaactgatggatttgcttcttaccacataaaattgaacaagaaagctgtactctttgccttccagttgacttcctagacgctgagagtgtcctggggcagcttctgtggcagaaatcccttgtggctggggctgtgctgtgtgccctatacatgcctctggctatgggcctttgcattatattattcatccttggcctgaaaccctgtcacggatacctttgcctcatcttagtactggtataaaatggcattttagtatatggaactgaagtatacatgtttcacaatatcttttagtaaagttaaatagggaataatttttttactggtttcactgaataaccctgtattctatcatcagcactttgcttgtgtactcagtgtttgtcaagaaaatttctttctgagctgcttttcaaaggttccttgacccttatagagaagaaattttgagtgcctatttagtatgtttctattttactcttcatttcccatgtcctgatacctctctaaatatctctcccactagactttatgatctctgaaggcagggactttgtcttgtcacccctgtgtctccagcactcagcacagcacctggcatactgtaggtactcagtatatcttcatgaatgaacaaatgaacaaatgaatgaacaaccagtagatctaaggaatggctccccctcccagtcatgctaggcctgcgcttttaaatattggggtttttaacttagaacagtcccagtgccattgccaaagatagtggtggggtgtgtgtgtgcttcctgacccatacatagcactccagctccaactttatgccaagtagcagtttcttgatcagcagagccatcctatcacattctgtgtagctttacctctaggaaccatgagaaaggcctgttattgccaaaggccatagtagtcatgtgagaattttgtagctatagaccttaaggtttgctattcactattcactgaattctgaggctacctggagaacactgtttaattcaaaataacaggtgcttcctaagagatagttgtactgcagagcagcaggtaaagaataatttgcagtgagcctgtgagcatcattgttttctgaatgagctgtcagtgattctaaatcagaagagcccaaaacgaagtggtttccacaagatttcaagctgaggagaacagcattttgcatccaaaataaaataagtgcagagaatataaaatgataaaagcttgagaagaatgggctataggaagatattgaagctaagtttcaggtgtttgtgcagttataagttatgtaaagacctctgcaaatatgcaaacattccttattattaacaaccgtgacatgaagattaaaagtattaaatggctttttttttcacattcaggtaattaaagtgtagaaaaatctctgccccagaggtctgaatataattcacatgaatggaaaatggcaaaagtggttagtttcttgagtaccatcttaactgaaacatactaaaatggcataattttgtttcagtaatcagtagttgaaagatctcatgctttacttcttaggatatggatttaattatttctggagctaaatgatttgagacacttgtaaagattagcccatatctaacaataatagtagtaattggttcaaccataagaaaattgcctccaaacaataacaattacaaataacttattttgtacgtaaatatatagtatatataaaggttaatggcatggattcagaaatcatcctgctttaattcatatctctgtcactttgtggctgaacctcagttttctcttcagtggaatgagggaacttcataaggtttttatgtgtattaaatgaaacaatatatataaagtgcataagtgtagtacctagaaaatagtaagctatcactactactgttaatccaagtacttccctgcgaggcatattcttatctttctgacatatgaagtttttaagacagagtagaaaatctcaaaaagcaaactcttgattaaaatataatggcatttgcagtttataaactgcatacttagtaaataagcttactaagcttgtgtttccagtgtgatcctaaggagaagaacacatggccttatgggaagaggagataaactaaactaggattacttctagacctatgttttgacagctagcaagtttatctttgaaggctgtctggttgacattgcatgttggctaagacatgccttacaaatattgcagtcacataaaaagagaaactgtgtgctatttttttgtttgttttctgcttgtacggtggagaagcaccctgccataaatacattgggtgggttaaactaataaacaaataggcagggtggcagtgataatgtttttttgaagatgttgaagtactatttgtcgcagcttcacttagtcataacacataggcaccattgctgctctcccagaaaaatggatgcatctgtaataagctatataaacaggtgaagtctttcaaggattttgaagatttactgtttttttaaagcctatttaatgaaacaggttgtgcacaatccacacctaagcaccatacttcttaccttgtggccatacctcaaattgtttcttagctccttttctaaaaaatgattacaacaataataataaattcaagaaaaataagcatcaaaatactttcctctaacccctgcaaatgtatccagtataaaaattcccagtgtgcatatttaccttcctgtactgttcaagaaaacacggttgtgcttcattatcaaaagttcattctggtagataacagaagagaatgtgaaatatgcgaaaatgttttcttaggatagaatgaattggctaacatgggagttctttttttaatgagatagtaacataagaaaatgtttggtcgtgtacacagatttggaaaccttcaccacacagctgtgttatcaaattaggcatacttccttgacttaggtgatttttttttttaccaatatgaagaatgaaaaatttttattactgtgatttatcaaatttggactgcaaatttcattgaaattatcattacaatatctaggaaaagtgtcacccagcaggtaataattgttgttctccaaaggcaagagaggaaaaccagtctcatcaactaagtattagttgtgataaggtctttggtcttcttatatttttacaaggcagtgacgcattcaatgtacatattagaacttccttattgttttggtccattcccattatttcagactgcattttaattctcaatttgttattgatatagatcaatcaaatataaccctgtggttgcttatatatttttagagtttcccttacatgcagttttgcttaacatgggtcacagtaaaggatcgtttataaaagtaatggattgtttcctgtttctgccagctgatttgatcaatctgaagttccttatgtactatgggttacataaccagtctggaatctgtgtggtacattcttctagtttggtattaactgaattaatcatttatattctttaaatcattgaggacattttagtaaacacttgaactgctctcttcttcaagtactctgctccagcaatactgttcacctggctcttactcaaacacaccactttagctttctatggcctctgcacatgctcttccctctccccacaaaatttatttttccaagcatctcttagctcaccccctaactgcctttgcacaaatgtcacctttcatcaaagcctttcctgaacaccctatttaaaactatcccaccacccctagcaatttctagtcctcttttattattttatctgccccgtcataggacttgtgacttactaccatcatacatatttgattcaattattatttattgcttaaattgttatgatcatttattataaatcatgtattacagctaattaacatacatatgctcagtcatttacttgattagttattagcctcaattatatcttattttttaatatatatttttatttgacaaatagaaagtatatagattggtacaatatgatgtttggaaataagcatatattgtggaatgactaaatcaagctaagtaacttatgcagtaccttacatgcttatcttttgttgtgataagaacacttgaaatctattctactgtcttagaaatttaaaaatgggcaaaggacttgaatagacatttcttcaaaaaaaatgcaaatgaccaacaggtatatgaaaaggtgctcaacatcactaattatcagagaaatgcaaatcaaaaccacaatgatatatcacctaacacctgttaagatgtctattagaaaaacaaaatgtaacaagtgttgataaggatatggagaaatagaaatctttgtgtgccttgtacactgttgcaagagcattagtagaactactttggaaaactctttgtaattatctactaaagatgaatatatgcctactatatgacccagtgtttctactttgaagtgatacagccaacagaagtacatgcatacatgcaccaaaagacatatacagaaatattattaggacttctggtttccagttccacatgtagggagcttagaagttgccactccaaccctaacaagtaaaaagctaagcaaactgagaaatcaattcttatcggacccaggataggggaggacacagggaaaaccactgtccccaaaagactagagagacagactggcaaataccgagagccacaagttactagagcatgcagtcacaaacagaaacccccacaggaagcagtgccatggtagaaaaacctgagctgtaattgatgaattataggaggttcagtatgaacaactctgaaagttttaaactccaggaggacccactcatggggaaacaccacaattttgttagacttacctacatgagctcaattagattctccaagtaaatattgcagaaaaatccctatgtgcttctggcagggggaaggtgaaatgaaccattttgaaatatgccagagcactgtgctcttcttaacaaggtctgcccccaggagaaattagttagctaaatcctaacctgctggggtattattagagcctgacccaagggaagggaaatacctaactcttgtcagctctaaccttctgcatcagagaagggaaatactaaactccagacaactctagccatcctgtcctaccaaagaggggagaagaatactgaggaaacacttagaagtttgtacaccagaggcatatgcttactaaaagactgagacttaatcataggatgatagaatgtctcccctcccctttcccccacctaactgctacattgctaaaagctgatttataaaagttccttttacctggtacatcatgtccagctaccaagaaaaaattaccaggcataccaaaaggcaaaaaaaaaaaaaaaaaaatctgaggagaatagagcaagcttcagacccagacagatagggattctggaattatcagatgaggaatttaaatccactatgattaatatactaatggctataacagataaagaaggcatcattcaagaataggtagacaatgtaagaagagagatggaaatcctaaggaaaaagcaaagagaaatgctagagagtaaaaacaccgtaaaataaaaatggctttgatgggcttatcagtagattgaacatggctgaagaaagagtctctgagcctgagaatgtctcaacataaacctccaaaattggaaagcaaagaaaaagactgggaaaagaaaaaaaaagaataaggactgcaggacaactacaaaaggtgaaacatatgcataaggggaatactagatggaaaagaacgagagaaagaaacaagaaatatttcaaacaataatgacagagacatttcttaaattaatgtcagacatcaaacttcagatccaggaaactcagaaagaaaataataggggtttgaaactcagatctccataaagaaaagaagagcatcagagagggaataaacaaagactaaaatgttcatttttcttattcttaattgatctaactgataagtttgttcaaaataataatagcaacagtgctttcgattttgtatgtttatatgttatatgtatgcttacatataagtgaaatgaatgacaacaacacaaggagcaggagggaagacttaggattattttgtttttgtatgatacactacttataaagtggtatagtgttatttaaaagtggacttgggggtgcagcgcaccagcatggcacatgtatacatatgtaactaacctgcacaatgtgcacatgtaccctaaaacttaaagtataataaaaaaaaaaaaaaaagtggacttggactagttgtaaatggatattgcaaaatctagggcaaccactagaagaattttttttttttaagtataactgacatgctaagaaaggagagaaaatggaatcacataaaatgctcaattaaaaccacaaaaggcagaaaatatgtggaagatgaaaatagaaaataatgacaaatgtggtctatattaatttaactaccagtaatcactttgaacatcagtggtctaagtgcaccaaataggcctggtgtggtggctcacacctgtaatcccagcactttggcaggctgaggcaggaagatcacttgggcccaggagtttgagaccagcctgcacaacatagggagacagaccatctctacaaaaaatttgaaaaattagccaggcgtggtggtgtgtgcctgtagccccagctactcagaaggctgaagtgggaggatctccttgagcctgggaggtcaaggctgctgtgacagagtgagaccctgtctcaaaaaaaaaaaaaaaaaaggaaaaagaaaagaaaaagaaaagcactaattaaaagattgttagagtggatcaaaaaacaagactcaactgtatgttgtttacaagaaccccactttaaatataaagacacatgtaaatgaaaagtaaatggatggagaaaaatataccaagctaacactaatcaaaagaaaacaggagtagctatatttcagacaaggccgacttttcaaagcaaagaaagttatccagaataaaaaaggtaattacgtaatgataaagaggtcagtcctccaagaagacataacagtcctttacatgcatgtgcctagcagcaaagcatcaaactatgtgaggcaaaaactgatagaactacaagcataaatatatgcatccactatcatagttggagatttcaacacccctttatcagaaatggacagatccagcaggcagtaaatgggtaaagacctagttgaattcaacaacaccatcaatcaacttgatataattgacgtctatagactacttcatccaacaagagcagaatacacattcttctcaagatcacgtggaacattcaccaagatagaccacattatggtccataaagcacaccttaacaaatttagaatagaaattatataatgcctgctctcagaccacagtggaattttactagaaaccaataaaggaaagataactggaaagtcccaaaatacatggagattaaacatggattagaaaagaaattccaagataaattgagaaataattttgaactaaatgaaaatgaaaacacaacttatcaaaatttataggatgctgcaatgagccaggatcgtgccataaaataaaattaatatatcagagatgtatgtactccatgtccattgaaacacccttcacaatagcaaagttaacagaatcaacctaagtgtccatcagcagatgaatggataaagaaaatgtgtatgcactcaatggaatactgctcagtcttaaaaaagaagttttgtcatttgcaacaatgtagatgggcctggagaatattatggtaagtgaaataaaccagacacaggaagacaaatactgcatgtcctcacttatatgtggaatctgaaacaacagaacttataaagtggggagtagaatggtggttactagagtctggggtggtgggcagtgggagaatgaggagaggaatgttagagggtacaaagcctcaaatagacagaagtaataacgttttttcctttgggatatattgcacagtgcagtgagtatagcaaaaacagcctttataacaaatgatgctggaacaactgaacgtccatgtgcaagaaaatgaatctagacacagaccttatacttaccacaaaaaccaactcaaaatggattatagctctaaatatgaaacacaactataaaatgactagaagataacataggagaaaacctagatgaccttggatatgatgatgactttttagatacaaaccaaaggtacagtccctgaaagaaataacagataagctgaacttcattaaaattaaaaacttctacagaaagcagggtcaagagaataaaaagataagtcatagactgagagaaaatctttgaaaagacacatctgataaaagactaatccaaaatatacaaggaactcagaaaactcaaaataagaaaaatataaaacctattttaaaatgggccaaaaaccttaacagatacctcaccaaagaagatatacagatgacaaataaacatatgagaagatgctccacatcatatggcatcaaagaaatgtaaattaaaatgacagtgagataacgccacacctgttagaatggccaaaattcagaacactgacaataaatgctgaaaaggatatagaaacagcaggatatggagcacctctcattcattactggtgggaatcaaaatagtacaaccaccttggaagacagtttggtgatttcatacaaagctaaacatattcttaccatgtgatccagcaattgtgctcgtaggtatctacccaaagaagttgaaaacttagtgcacatgggcatttatagcagctttattcataattgccaaaacttacaagcaaccagtatttccttcagtaggtgaatgaataaatacactacggtacattcagatgataggatattttttagcattaaaaagaaatgagggggcctggacatggtgggtcacgtgtgtaatcccagcactttgggaggccaaggcaggagaatcatttgatcccaggagatcaagaccagcctgggcaacacagggagaccctctctctacaaaaatataaaaaatgagccaggcatggtggtgcacacctgtagtcccagttacttgggaggccgaggtgggaggatcacttgcactcaggatgaggctgcagtgagctgtgattttgcctagttataggctgagagggtggtgagtggtggttcttctcactctgaagagatctctagtcattctaaaacccattcatttgtcattactatatagaagagacaataagtaatggacctatcctttaagaaaacctctcatcaaagtatgcttctttattgcaggtaattcgtgcctttctgctctttccaacaattgaacgaatgtctgagtcacccaatggcagaattgccactccacttttgtgctggtttcgatatgttctctatgttactggctacttattattgaaaccgtgtcctgagacaatcaagtccttgctaatcagaaggggccttcaagtaatgaacctagagaatgaattttcaccattgaatatattagaaccattctgccttggtaagcacagattttaaaatgtgtatgtttattcttgtatcacaaaatgtttacacaatactctctgacagtggacaaatatcaagcaagcaattatttactagtttttttttcctcttccaaaagtttaaaactagaaataaataaaattagaaatagaatgaattttttcataagaaattagaaaagcctcatcaagctttaattttaccttatgtttctgattcttcactctagctgcagcacagtgagaaacacttcttccgcatatagtacatagtatatatggagtccctacaggaatccttggtgtgcctgttagcttagtgggagtactttacgaaaaacagcacaaggacacaaagcctaatattcttgtagagttaacaggttgtttttattttcctcctttaaatgttttgggagaatttaaatcatagaagtaataaatatttgtcatggtaatgtattttaatactgggtgctttgctgatttttatgaatatgctaggaaatgtttttgtgactttactttttggcttcaaaagttgttttaaaatgtagtctatctttttagatcatactattttatactacatttataaatgactttcataataaagtaatcctagtttcttaatctataatgtggggataacaatactccgtacttcaaaaggttattctagtgttaaatgtgataaaatatccaaagcttctatctagtattttatttataaccgacctccaatgaacgatgtaacaattagttgcagcagtagctgatggcactttctaagcttttacctgtgttcctcaaaagaactaataaggtttagtattgctattgtccccattttagatgaagcaactgaggtacaaagaggttacatgattgcccaaagttatacaactagtatgtagtgttgaaacccaggcattctgccactgtattgcatttcctttcaccatagctggtgctgttgcccttgttaatgataacagcaggactcctgaataaagttttccatgctcagctgtattaagaatgccataaggtcacatgcctaatgaactagaaacaagttaacagccctgcctgttcaattgtgcagctgcagttcatatgggaggtgtttttctaaatatgtaacaagaagcagtcctcaaaaatacaaggttcagtatatttgtcctattgatagattttttcccccttccattttccctccaatttccattctttaatatacccttagcatagtggtttaaaaagatgagataggaagagggaaagcaagggctaaggacagtcatagaaattgccagaggttgatgttggaaatatcccttaaagaccatttggtccaactcctcatctctccaccatattattaaggaaaggggtcccgatccagaccctaagagagggttcttggatctcgcgcaagaaagaattcagggtgagtctgcagtgcaaagcaaaagcaagtttattaagtaagtaaagtggtgaaagaacagctcctccatagacaaagtaggatattcctgaaaataagaggagggatgcacccaccctaggtacaatgcttatatatatagggagatgtgttctgctacaagggtttgtgataaaggattaattttcttaattactgtattttgcaagaatctatatattattattattattattattattattattattattttgagatggaatctcactctgttgcccaggctggagtgcagtggcgcgatctcggctcactgcaacctccgcttcccaggttcaagtgattctcctgcctcagcctcctgagtagctaggactacaggcaagcaccactgtgaccagctaatttttttattttttttagagacagagtttcaccatgtaggccaggctggtctcaaactcctgacctcgtgatccgcccgcctcagcctcccaaagttctgggattacaggcatgcgccaccatgtccggcccaagaatcgatatttttatcttaaaagcaaaattaggaatgcctttgttctccagatatcaggatatctggacactcccaagtctgagtctgttttagtaaacattattaatttgttcccttaactttaaacatctagaggctcggaatgccttactttctgagaatacagtccagcaagtttcagcctcattttcctagcccacactcaaaatgaagtctctctggttcacacgcctctgaaaatattatggaacagatgcctactggtgaaaatagtactgacaggaagtcacaaaccctcaactctcattttggttctgccctagagtcactctgtggcttttgtttagttacttcccctcgttggttttcagttgttgactaaatcaagagttagggccagtctacctttggaaattacttgagacccaatggaatcaacatttgaaattctggcaaatatatgtaaaactctccacatatactttgataagatcattttacgtctctttacaggtttgtttgtctctcccagccccttgttgctttttgtcattttctttttgccttgtagaatgtattttataaagcattcttcagttatggattccattttcctcctgggacttctgcttccaggaagatagagtaaatggactttccactatttctcctgctaagtactaaaaaccatggatattatctataaaacaacatcaagaagactatacaaggtagagaatagaaagcaggctatgtagggactttgggacccaaggaacaaacacagtggtgagttctctgggttttctttttaccacatatatcctagatttggagccagcaacccagaaacaccaaagagtagagacttttaaaggtcctaacaaaagcctactctctctagcccaaagaccaggaaaggagcaatgttttatagagtaggaaaaaatagtcttctccctactttgtatagttcttacttggggcagatctttgttacaaaagacagattaacaagaaaaatgtataaatttattaacatttatatttcatatgtacatgggagatacccagagaaatgagtaaatctcaaagaggtggcttctgagttcagacttaaataccatcttgaactaaaacaaagaaaagaggtcagtaatgggaggtgaccaagaaaagcactgcacacaagacaagtttgttgtgcagatttaagttagtgccctttgcgttgataatagagtccatggtgatttagaatcatccttcatggtacagagaggaaaacacccatacaaatggaaatgtcctttatagatgtcaatttccctttaaaaagggaacttctccatttttagagcttctcctgtgtcttcagtttctcaaaatactcagtttaaaataatccttttgcccaagacacatctttagggatggtatattttggtcccctacagtcattttgcagcagtgtattctggttttcaatactttctttctttattattattattatatattttttgagacagagtctcactctgccacccaggctagggtgcagtggctcaatctcagctcactgcaacctccgcctcctgggttcaagcaattctcctgcctcagtctcccaagtagttggaactacaggtgcctgccacgactcccagctaatttttgtatttttagtagagatggggtttcaccatattggccaggctggtctcaacctcctaacctcaggtgatccacctgccttggcctcccaaaatgctgggattacaggcgtgagccaccgcacctggcctctggtctttaatactttctaaaagaaacatttagacagtaactgctctactctactccagccatttccagtcatgcctgcaaagattgagtggactttaccctctccccagcagtaatgaagcaccccctctctttccctgctctacggtactgtcccagaagaggctgagtagagagcgaagactttcatcactgccctgcagtaatggggccaccatcaccactacccccatattatcagtaaaggtcatgtggggagaagtagcaagggactcaccacttgtcccagccaagatggtaacagtggaagcctagtacagagtcagaattccttcccctacccagcagctatgaggagccccttcatcccttgggtgtcaacagaagtcaaatgggtaacttagactctaccctacgtggccatagtgaaaaaaacatctaaaacataaagtttaagtaagatccagaatctcataacataatactcaaactgtccatgttttagttgcaaatcacttgtctaacaaaatctcaacttgactggaaaaaaaaaatcaatgccaacaccaaaatgacagagatattagaattatctgacaataactttaaagcagccactataaaaattatttaatgatcaattaataaacatgtttgaaactaatgagaagatagaaaatcttaggaaagagaagattaaaaaaaaactgagtggaaattttagaacaaatttaaaatctcaatggatggaaccaacaataaaatgaggagacaaagaggaaagaatcagtgaatatgagattagattaatagaaattatccaatagagagaaaatagactaaaaaggggaaaaaaaggaacagaacctcagggacctgttggactacaacgaaagatctaacatttgtgataacactagtcctagaaatagagagtaggtctggaaaagtgttcaaagaaataatggtcaaaaactcccaaattttgcaaaagatatgaatttacagattcaagaagctgagtgaatttaaaacagaataaacccaaagaaatctatactaaaacaccataaccaagcttttgaaaactaaaacaaagaaaatgtcttgaaagcagccagaagagcaaagcggtacattattcatggaagaaagtctgtttgaaggacagctagtttttcatcagaatccatggagacccaaaggaaaatgacaaaatgcaaaatgaaaataactattaatccaaaattctgtatctagcaaaagtgtctttcaggaaagaaggggaaatttaacattctcaaatgttgaaaaactaaaagaacttgtcaacattagatctatcctaaaagaataactgcaggaagttctctcaacagagaggaaatgataaaagaaggaatctgggaatgtcaaaaagaaagaacagtgaacaagttaaaatgtggacaaatgcaactttcttcttctcttgagatttctaaattatgtttaacagttaaagcaaaaattatagcactgtctcttatggttctaaacatacacagaggaaatatttagggaacgattttataaatgggggagggtacagggacataatggcaagtaaggtttctacactttacttgaactgtaagatgtaaccatatgtacatagtaataagtcatgtatatatgtaatgtagtacctagaacagccatttcaaatgctattcaaaagagatactcaaaatcaccatggatagatgaagatggaattctatatttagaaacacattgattggaagaccagaaaaagaactcagagacatgacagagaacaaacagaaaacaaataataaaatgatcatccatgattatattgaatgtaaatctaaatatacaattaaaagaaattggcagggtagattagaaaacatgactcaattgtatgctgtcctcaagtcttagtttaaatataacaatataagtaggttgaaagcaaaaggatgagaaaagatacattatgcaaacatttataagcaaaggaaaccaggaatagctttattaatatcagataaagtagatttcagtgcaaagaaaattacctaatagacatttgtagaacacttcacccaaaacagaattgatatcaacatgttgatatcattgaaaccatacagagtatgttcagtgaccacagtggaatcaaactagaaatcagcaacagaataacaaaagttagatctttaaatacttggaaagtaaaccgcacacttctaaacaactcatgagtcaaaaatggaaattacaaagaaattcaaataatactacatgtaattaataaaactatagctcacaactgtaatcctagcactttgggagtctgagatggaaggatcgcttgagcccaggagttctagaccagccagggcaacacagtgaggccctgtctctataaaaaatttaaaaattggccaggcactgtggctcatgcatgtaatcccagcactttgagaggctaaggtaggcagatcacttgagtccaggagttcaagaccagcctgggcaacatgatgaaaccccatctctactaaaaatacaaaaattagctgggcatggtgtcgcacacctgtaacaggtcctagctagttgggggactgaggcaggaggatcccttgagcctgggaagtcaaggctgcagtgagccgagatcgtgacactgcactccagcctgggagacgaagtaagatcctgtctcaaaaaaaaaaaaaaaaaaaatagccaggcatggaggtatagcctgtagtctcagcttctttgggcaggctaagatggaaggatcacttgagcccaggaggccaaggctgcggtaagccatgatcatgccactgaactccagcctgggtgacagagtgaaagcatctcaaaaaaaaataaaattattaataattaataataaaactgaatcaaaatgaaaatacagcatattaaaatttgtgggacacagctaaaacagtgatgagacaaaaatgtatgctggtgtcagaaatgattacattagaaaagaagaaaagtcctagtaacctaagcttcaacctgaagaacctagaaaaagaagagcaaaataaacccaaaaggaggaaaaggaaagaaataacaagaatagaaattagggttaggagcagtggctcacatcttgaatgccagcactttggaaggctgaggcagaaggtttgcttaaggccaggagtttgagaccagcctaggcgacatagtgagaccctgtctctacaaaaaaaattgaaaacaaaaacaatagagaaaatcaatggaagaagaaagtggctactttgaaagagtaataaaattgacaaacccctagcaagactgacaaagaaaaaacagctgaagacacaaattaccaatatcagaaatgaaatagaaaatatcaccatagagcctgcacccatcaaaaggataataaaggctactgtgaacaactctacacatataaatttgacaactggaatgaaataaaccaattcttcaaatgtggacacactaccacaattcatccaagatgaaatagaccatttgaagagccttataactttgaaggaaactcaatttgtaattttaaaacttccaaaaaaagacatttagaggctcagatgatttcactgaagaactatacctaatgtttaaagaaatactaacacaattctacctattttttaaatagaaaataggagggaacacatcccaattcactttttgaagctagtattatctaatatcaaaaccagagaaaaataatacaaaaaaagaagaaactacaggccagtatcccctatgagtatagagacaaacatctctaataaaatattagcaaacagaattcagcaatatataaaaagaattatatactattctattaccaaatgtgatttattccagggatgcaaggctagtatgatattcaaaaatccattaatataatctaacatattaacaggctaaagaagataaaccacatgattctatcaaccgatgcagggaaaaaaaaatattttgaatgcttttcttctaagactagaaacaagacaaagatgtctgctctcagcactcttattcaacatagtgctggacgttctagtcagtccagtaaggtaaggcaaggaaataaaagatatacagatcagaagagaagaaattaatctcgtttgtagatggcatgattgtctgtagagaaaatcccaaggatggttctgcggctctgccagggaataaaaatatatcaaatgattaaaaaaaaaaaaactaaaagaaaaaaatgacaatcccaaggaatctaccaaaaacaaactttgagaattaatacaagttcaacaatgtcacaggatacaggataagcacaaaagtcaatattatttgcatacactagcaatagaaaccaaaatttaaaatataatgtacatttttagccagtcggaaaaattaaattgttaggcataaatttagaaaaacatatacataattatatgctgaaaatgatgactattaataaagaaatgaaagaagacctaagtaaatggagagacatactgtgttcatggattggaagactcaacatagtaaacatgtattaatgcactctcacactgggtaatttataaagaaaagaggtttaattggctcacagttccataggctgtacaggaagaggcatccacttctgcggacgcctcaagtagcttttacttatggcagaaggcaaagtgggagcaggcgtctaacatgggaggagcgggactgagaaagacaagtgggagaggtgccacacactttaaacaaccagatcttgagataactccatcattatttctataacagcaccaagggggatggtgttaagtcatgagaaaccatccccatgattcagttacctctcaccaggtcccacctccaacattggggattacattgaggacatgagatttgggtgaggacacaaatccaaaccatatcagatgtcaattcttcctaaattgatatgcatattaaacatagttgctatcaaaatccgagcaagatttttttgtagctatcgacatgattattctaaaatgtatttggaaaggcaaaggaataagaattactaagacagttttgtaaaagaagaataaagtggaaggagtgagtctgtctggttgcaagatttattatgtagctacagtaatcaaaactttgtgatattgataaagggattaatacataaatcaatggaacagagaagagaacctagaaatagacccacacaagtgtgcccaactgatttttgacaagagggcaaaagcaatttgataaaagaggaattgccatttcaacaatgttgctggagcacttggctcttcttaggccaaaagaaaaaaagaagaaggagaaggagaaggagagaagaagaaaggaaggaaggaaatgaacctcaacctaaactgtaaaccttacaccttataaaaaggttaactctaaatgagccatgaattttaatataaatcttaaaactacaatccttttagaaaaaaagaataaaatattcaggatcaggatctaggactaggcaaagactagctgggtgtgatcacagtgagatatcattacacacctatcagaatggctaaaataaaaaaaatcagcaaccataaatgctggtaaggatgcagagaaactggatcactcatacattgctgctgataatgtaaaatggtgcacccactctggaaagcagtttgacagttaaaaacctaaacacgcagctaccctatgacccagcagttaacactcctaggcattcatccctgatatgtgaaaactggtgttcagagaaaaacctgtatatgaatgtttattgtagttttattcataatagccaaaaactggaaacaacccagaggtattttcaatgggtaaattattaaacaaactgtggtaaagccataccatggaattctacttgataataaaaaggaacagacttttaatacacacagcaacctgtgtccatctccagagaattatgctcagtgaaaaaaagcaacccttaaggtttacatactgcgtgattccatttatatagcattcttgaagtgataacattatagaaatgaagaacagattagtggttgccaggggttaaaaattaaagatgaaaatttagctaggcatggtggcacacacctgtagtcctggctacttgggaggttgaggcaggaggatcgcttgagcctaggagttcaaggttacagcgagctgtgattgcaccactgcacttcggcctgggcaacagaggaagaccctgtctctttaaaaaatacatacatacatatcctggctgtaacattatactgtggttttgcaagatattaccatgggagaaactgggtaaaaggtacatggatttctctatattatttgttacacctgcatgtaaatctacaactatcttaaaataaaagttgaattaaaaacaaaaagcattctccagctagggataccactttcctccctgggataggtgttcccctcatcctgacggcctgaattaggagctccttgtccttgagacattgagaaggttgaggacccagagtcccagggctgaggacaccattagatatgcagctgtacttatgcctctttagaaatattttctaaactcaaatcaggacatgggatataaattttatacattttttaaatttatatatgaaaagtctagctatgacaaattattcttaacggtatatttactaaatacataatatgtcacatataacatataatcaagtgcttaatgtttttaattaaaacaggaaattatgtaaaggtattttccactttttctgcatcagagttatatacacttcaggagaagtaggctccaaaagctgcacttgaaagaaaggactcttccttttaattgcaataattgacctcctactgcatcttccaggagactgaagtttaggcagcagggagcaagacagtttaggcataagacatatttccctccccaatccaaggcaaccagagttttatactacattgttgcttgaagaaccctgggcttcctttctcacacaaccctgatatatgaaatacattttgtaaatcagactgaacattcagctacatgtcttcatctctgttctaaataacaaactagcaaacaaatttttggagcacagtcctcctatttcttacatcctttccttttctgatcttttaatcccttggctctaatctggccttctgatagccaaataactactacttcagtggtctctgatttttttttttccccataacctacccagtgtgtgtaaccttgggtaaaggaaaatgaggcagtagttagttacctgtcttctttcttctttgggttattggttcattccctgcttgggttcatagttcacttcctagtagccagcctcttccctctagatccccagtgccacccctgcctcctcttgcaataaccctcacagaagctgccttcgcccaggcttgcccttaccatcactatggtgattcctagtaccttgcttcccacaaagagaaagtcccaactgagagagcaacactcaacagaagactttgggagatgatcagtgggctctgctagagtttatactccatgaatagtggacataactaatgttcataccagctacttgcatcggcataattttcatggttacacaaagagaggggttatcaagggaaaagaagatcaggtcagagatcattcccagctgggaatctggtccagctggatatttccccctggcccccacagacctgtttctctgtggcttgactatcatccagacaacgaccttttaacctgccagcatgccttttaggaggctttgcagtgtttgcagattatgtaatgtctgtgcttcagtagaaatcttacggaaacaaatggaggaagtttgctagtccaagcagtggataataaatcctgccctatctagatagaaactggttttctgtatcctttagtttatacacacatttttgttgttgttgttgtaagctctgaaaaattctaggaaccaaaatattcaaatatttcaaatcctgctgcccttttggcaaagatggcacatcctttcctgtaggcttgagttctggggcattagcgttcttctctagtatgagtgagtgaaatgtcatttcctatccagcattcagagaagagtagccctacatcagttagtgtacattataaactttaccacagtgttcatcaatgtcattttgttaactaggttattttaaatgttatttttaaagaacatatatggattttttcttcagttttaattctggaatgtttgctactctgtattttctttagatgttcttccacttcatgaaaaataggcttttcactgagacagctaagttgattttctgatcaaagctaaaagaaaatacgtcttagttcagcagtatagcaagtcaaaataattaactttaaaaaatattctagggtcttttcgttagttaggccaaattgatattttatttcctttcagttacctaactagaaaaacatagcacagagacatagggaatttctggtagattacattactttgttgaatatattcttgtaaaataaattttcataattttttcttcccttaatatggaattagctttttaagatataaaatgaactattaaatgagatgacaacataagcatttgcatcactaaagaatcataaatttcttctagaatatttttaactcaatcccagaataatttttgagtaagacgaaaccagactctcatgttaccttacctattctctcatttatctgagcagcttatgaaaatatgtttataaaacccaactgtggcttttatttatttatttatattagagacagggtcttgctatgttggccaagctagtctcaaactccaggcctcaagcagtcctcgaccttggcctcccacagtgctgagattacaggtgtgagccgtcatgcccggccccagctgcagcttttaatgattcatgcaagtataacctaaaattcaggaatgaaggaaaaggtttttttgtttgtttttgtttttgtttttcggtcagtgttaggatttaggacaagaggtgattagtgtggtactaggatataatctctggtttagaagttaatagcgcaatgaatatcttattttttctaaagaaatttttatatttcaaaattaacgccagtctaaaaagttgcattattttttaaaatcatacaacacctccagttgtttttcactttggtgaactcagtgtcgcttaggtaagattatctgtttgcagactaaattgattatcgtaatgaccacagtcctggcttatagagaaatacataataaactatgttgactacgaaacatttctccaaattatgcagaaagtttagaatgggagaattatttttttaggtctagttttcactttgttgcaacttggcaccattggaaaggtggaaaacaacctggaaataaataaataaccgctgaagaattttcccttggaagaaggtttcatctgggtttctaagactatctggtcctacttaaccttttgacaaaccctgctggtatagcctttctgagtacccagccttactctgcctacagctgtgttggcatgtggggctgctcatgtctccagaatcttctagtcttgcagctcgtcctcaaccctaaattttgttcccacacagccctgcttgacttgaaccttcctaacttccctacactcagcacatcttgccagcctcaggaatagtcagaatatgtgctaggaggagctttcctgtgaaaggctctttttcagtcagctcctaccctgcctcctctcaggcaagccctggatatgtgcagatgccactttctcccccactcaagtaccagagcctgataggcagttaagcacatcagcccttgtgctgtgaccaaaaacacccagaatattcaaaggccctatttctattcacttttatcatctgggattgagtttgactatagataacagaaaaccaaattacagtggcctaaacagatagggatctatttttctcatgtgccaagaaatccaggcataggcagtccagaggtaaataacatctcaacagtgccatctgggacatgggtcgtatgtttctactctgttgtcctttgcacatcacataaacctttatccttgtggtcatcatctcatggtcacgtcatggctcctgcaactctagacctcatgtctaacattcagccagaaagaaagggaaaggggagaaaggcaaaaggcctactcctgattaggctttggcttatttaaaaagagaatgtcctccctaggaacttttagattagtagccaaaatatcccttactctgaggaatagagaaaagccatatgttttgatttccccatgactcagtagagtcaatcaagggaaatgaaaatttttgttggcttttaggtagttacattgcgtctactacatccacactgcaagatggtcttgagattcaacatccatggacttaatctcagaatagcccacctaccaaacactgaggtaagacagtcagtccaccagaactaaaatccatcgttgccatgttcctgcagaatgccttcaggcgttgtaacccttggcaagataagctcacagtgaggtctaccgtttatttcttaattgtgacaggtcttcttcaaatcttgtctaaataagtacccatccacagtagagctcatctcagctcccaagattattgtattttttattttaaagggagttttaaaatgtttggcatttcatcggtattaatgggcttactaatgattattctcctcagccaccccccatcatggtgctgaatctaccaaagccttttcctaacctgtcaaaccttttcatgagtactttaagaaagtgatttttccttgtaaacgtggtggtatattttggacatgtagaatctgtcagaccttttaaataagatcaaagtgactagaagtagtatctcagtcaccatagaccaagagtaaaactcacatatatattgcggtatatacacccacaatggttgatttcctacctcccaaattcacctgtcataatgaaaccatgcccatctcctgtaattccccttgcttcagtaccaacaagtccctctcctcaataatggcaaagccaaacaaactggggcattctaatatgaatcatactagtggtactaggctacgtaccaccaaaacagcagcacaacttggcttgccaccttgcagttctactttagaaaactatttatgcatcaccttccattttatgattagttgtggtttaaattgcctctacattgtctctggctcttataactagtgtgtatgtggcctagtttctgactagtcccaacaggggctgttagacttgtactctggccttcagttattcatctcacttttataccagtacctgccagcttggcttaccagtgtcagtgtgcttcagcctctagttctggcctccatcatgatgtcagctcttggaccacttcctccccaccccgctttccaaagcactagctgagtaaccttctctgtcagtctcttcccatttatttcacttaacaacccttccttactgatacctgctgtgagctaactgttcagataagcactggagagaataatgaatgaaatatagttcctgcccttaagttacttacagtgggatagaagagaaaaaatatgaagaattttaatatatcatagggctatcataaatcagatacaaggtatgaatggtaatgagaaaggagagatcagttctattaatacctaggtaagtaacagaggagaagatgaatgaatttggacttgaaggtgagttgggatttttccagacagacaaaatggcaccaggataggcaattagaaggcagccttctgttatggattatgtgtacttggagaattgggtgataacatttgacctgtgagatgaatgccctattggtcttccagctttagccctcactcggctatttcaaaccttttagccagcataagttaaagttgtatagtaatttttggacattaagcaaatcttagaaaataatgttagtaaataacattagactcttcaattagtcttttttatacctgtgtttaatggagcaaaagtaaagaattaacattcttccaaatcattctctttccttcatgtttttgtttccattactactgctactagacatttccttcactgtagtgcttgaaattctgagttctgctggatttccaggaatgctgttgacagtcattgccaagagaaatgtgttttccacttaggaaattacacttctatttggtattattatttctgaccactatgttgtattatgagcatttctgaggaatgacaaagatggcttccttggagcaattactggaaaagaagctggtgttctattaaaaaaaatatatgcttagataggaaattaccaagaaataaataagggtaggaataaaggtgggatggagtacattccctgatgaaaaaatttactttcagaaaataggactccttacaaattatttgaatttttaagtttttttttaatttaagaatgacaaaaaagtacttaaaacataaatgtgtcccttcatgaattatcacaaaacaaacttctattaactgccacccactcaagaatcaccattgcccgagtctcagaagacccccttatgcttctgcccatctcacttactccattttcccaaatgtaactactactaacatctagatgtacctggttttggactttaaataactggaattgtataatgtatacttgtttgtgtctgacttctctcagtcaacattgtatgttgcaactttaattatttcatttttattactaaatacttttccactggatgaatgcactacagtgtatttatttattctatgattgatgaatacttgggttgtttccaatgtggtactactaaaaataatactgtcaagagcatttttatgcttgcctttcagtgaacttatgcacatatttctcttgggtccatccagagaggaaatgcagaggtcatatggtatgcatatgtttagcttcagaagacaatactaaatggtttccaaagtggttgtaccaatgtgtactcccaccagcaatatatgagtttatgttgcttcatttgctcaccaacacttggtattgtctgtattttttgtttttgctatgttttgtaatttgggtcaatctagtaggtatatagtgccatctgatggtgttaaggttttctaaaaaatattttgagattgttctttttctttgattacataatagttgtacatattttagggtacatgtgacattcgaatacctgtatacactgtgttatgatcagattagggtaaatggggtatccatctcttcaaatatttatctttgttttaagaacattacaattcttctcttctagctattttgaaatatacaattactataattttcccactgcattatcaaatacaggaacttatttcttatatctgattctgtttttgtaccccttaaccaatttctctcatctgttccaccccgcttcctttctaagcctctggtagtgaccattctactgtctacccctgtgagattcactttttttttttttttttttttttgagacagtttcattctgtcgcccaggctggagtacagtggcgcaatctcggctcactgcaaactctgcctcccgggtttaagcaattctcctctctcccaccttcccccgccagtagccaggattgcaggcgcacaccaccacgctcggctaatttttgcatttttagtagagacggtttcaccatgttggccaggctggtctcgaactcctgacctcaggtgatccgcccgcctaggcctcccaaagtgctgggattacaggcgtgagccactgtgcccagccgtaagattcactttttagctcccacataggaatgagaacatgcaatatttgtctttctgtgcctggttttcacttaacataataacctccaatcccatccatttttctgcaaatgacaggatttcattctttttatggctgaataatattccattatgtgtatataccacattttctttatccattcaccaactgatggacacttagattcattagtatcttgggtactgtgaacagtgctgcaataaacatgggaatgcagatacctctttgatacactgatttcctttcttttggatatagacctatcagtgggattgctgaactgaactatgtggtagttctagttttagttttttgggaaaactctaaactgttttccataatggctatactactttacattcccaacagtttacaggtattcccctttctctgcatcctcaccagcatttgttattttttgtctttttcttgatagccactctaactggagtgagatgacacctaattgtggggttttttttttgtttgttggtttgtttttaatgttttatttccatagattttggggaacaggtggtatttggttacacgagtaagttctttagtggtgatttgtgagattttggtccacccatcacccaagcagtatatagtgaacttaatttgtagtcttggttttgatttgcattttcctgatagtgatgctgagcattttttatgtacttgttggccatttgtatgtcttcctttgagaaatttctattcaggtctttggtccatgttttattcagattatttgtcatcatgctattgagttgtttgagttccctaaatatcctggttattaatcccttgttagatggatagtttgcaaatattttctcccatgctgtagactgtttcttcactttgttgattgtttacttttctatgtgtagctttttagcttggtgtaatcccatttgtctatttttcgcttttgttgcctgtgtttttgaggtcttacccgaaaaaaatctttccccagaccaatgtcctgtagcattccccctaatgttttcttttagtagtttcatgtcctattaaagtctttaatccatttgagttgatttttgtatatggtaaaagataggatcgatctagcttcattcttctgcatatggatatctagtttcaataatgtttattagagagactatcctttccccaatgtgtgttcttagtgcctttgttgaaaacaagttggctgtaagtatactgatttatttctgagttctctattacattccattggtctgtgtctgcttttatgccagtatcatgttgatttaattactatagctttgtagcatgatttaaagtcaggtagtatgatgcttccagctttgtttttttgtttttgttttttcctttccttaggattccttagcaattcggcgtcttttgggattccatacaaattttaggattgttttctccatttctgtgaagcatgtcattagtattttgagagagattgcattgaatctgtagattgctttgggtcatataacatttcaatgatattaacccttccaatccatgagcatgggatatcttttcctttgtgtgtgtgtcctttccatttctttcatcagtgttttatagttttccttataaagaaaaacttgttttgttaaattcacttcttttgttaaatttattcctaggtattttttagtagctattgtaaataggattgctttcttgattactttttcagattgatcactgtaaacgtatataaacactgctgatttttgtatgttgattttgtatcctgcaactttactatctttatttatcagttctgagagttttttgatggagtctttaggttttactaaataaaagatcatgtcatctgcaaacaaggttaatttgacttcttcctttccaatttggatactctttgtttctttctcttgcctaattgctctatctaggacttctaatactatgttgagttgaagtggtgaaaatgggcatcttgtcttgttagatgttagtggaaatactttgttcactgttcagtgtgatattagctgtgagtctgtcatatattgcccttatggtattgaggtatgttttttctataccccgtttgttgagagtttttattatggagggatgttgaattttatcaaacacttttccagcatgtattgaaacaatcatatggtttctgttcttgattctattgatgtgatgtatcatgtttattgatttgtgtatgctgaaccatccttgcctccctgggctgaattccacatgatcatggtgatcttttcaatgtgttactgaattcagtttgctagtattttgttgaggatttttgcatttatgctcatcagttatattggcctgtggttttctgttatattcttgtctggtcttggtatcatggtaatgctggcctcatagaatgagtttggaaatattccctcctcttcaattttttaaagtagtttgagtagaattggtattagttcttcttcagatgtttggtagaattcagcagtgtttctatcaggtcctggactttcctttcatgggagacttattattattatttagatcttactcattatttgtctgtttttctatttctttgtttcaattttagtagattgtatttttccaggaatttatccattacttgtaggttttccagttcattggcatgtagctgttgatagtagtctctagtgatcctttctatttttctggtaccagttgtaatgtttccttttttgtctctgattttacctatttgggttttccagcatgttggtattgtctatctttaaaaaaaaaaaaaaaactttttcattttattgatcttttgtggttttttagtctccattttatttatttctgttctgatctttattattttttttattctacaaattttaggtttgatttgttcttgcttttctggttccttgaagtgtatcattaggttatttatttgaagcctgtatttttttgacataggcatttattgctataaacttccctcttagtcctacttttgctgtatcccataggttctggtatattgtgtttccattttcatttgttttaagagtttttaaaaaatttctctcataatttcttcattgacccattggtcatttgggagcatgttgtttaatttccatgtatttgtacagttttcaaagttcctctttgcaaagattctagttttattccattgtggtcagaaaatatacttaatatgatttctattcttttaaatttgttgagactttttggtgacctaacatatgccctatgctggagaatgttccatgcactgatgagaaaaatgtgtgttctgcagtagttggatgaaatgctcataaatgtctgttaggtccatttggtctagagtatagtttaactgcaatgtttctttgttaattttctgcctggataatctatctattgccaaaagcaaggtgctgaagtcccttactattactgtattgcagtctacctctccctttatttctgttaacatttgttttgtatatttgggtgttctggtgttaggtacatatatatttattaatgtaatatcgtcttgctgaattgatatctttataattatataatggccttttttgtctctttttatagtttttgacttaaagtctattttatgtgctataaatatagctattcctgctctttttaaagttccatttgcatggagtatctttttccatctcttcacttttactctatgggtatctttataggtgagataagtttcttgtaggcagcatatatttgggtcttgttttttaatccattcagccattctatgtcttaattggagaatttagttgatttacattcaatgttattattgataggtaaggacttaatactgtcgttttacttgtttgcttgttgttttgtaaccctgtcttcctttcttactctctttatttgtggttgtgattttctctggtagtgtgttttaactcattgcttttgatttttattatattttaggtttttgctttgggttactatagtgcttacaaaaacattttatagttataagaagttacctataactaagctaatgtttttgtaagcactcctgtagtcccagctaattgaaggctaacgtgggaagatctctagagcccagcaggtcaaggctgcagtgatctgtgattgcaccactgcactccagcttaggtgacagagtgagaccttgtctcaaacacacacagacacacacacacactgatagcaacctaactttgatcacaaaaacaagagaaaagaaacaaatacaaaacatgtacacattaactccattctccccctacattttgaatttctgatgttacaaaaaataataaaagaatttacttttaaatttgataatgttttctttcatagaggcagaaaagcatgtaaatcaaagattgacctgttcttgtggtagtcagtttgtctgtgagtccatttggcactccagcatatatcatattggaagagtttcagatttttgaatttacatttccatgatagctaatgagggtgagtactttttcataatttgagtaacttctgaaatttctgctcttgtctattgcccatcttgatgtttggtttccagcctttttcttactggtttgtagaagttttaagataaattccagataccagtacctttgacatatggcacatatcttcttccactctgtggattgtctcattagtctcttaatatggtctttttgctggaaaaaaattctaattttaatgtaatttaacaatcttttgtggttagtgttgtagtgtcctactaaaggaatcttttcctaccccaaagttatgaaatattctcctatgttatcttctagaaatttaattcttttgccttttaccttttgatctacagcccacctacaattgatttttatgtaaagttgaaggtagaaatcaagtttgtcttttcttctccataggactatccagttgacccatcatcatttagtgaaaagaccatttattaattttttcttgctgtgtaacaaatgaacacaagcttagtatcttaaaacaacacccttttattaactcacagtatgtaggtaaggagttcatgctcaaatcaagttgtcagccaggctcttcttgtctggaggctctgggaaaaaaaaatccaattccgaaattgctcagattgttggcaagacatccattttgtgtggctttagactgaggtccatgttttcttgctggctgtcagccagggtgcttctctactcatatatatatatatatgtatatatacttaaagttctagggtacatctacacaacgtgcaggtttgttacataggtatacatgtgccatgttggtttactgcactgattaactcatcatttacattgggaatttctccaaatgctatccctcccccaaccccccaccccacgacaggccccactgtgtgatgttcccctccctgtgtccaagtgttctcattgttcaattcccacctatgagtgagaacatgtggtgtttggttttctgtccttgtgatagtttgctcggaatgatggtttccagcttcatccatgtccctgcaaaggacattaactcatccttctttatggctgcatagtattccatggtgtagatgtgccacattttcttaatctagtctatcattgatggacatttgggttggttccaagtctttgctattgtgaacagtgctgcaataaatatacgtgtgcatgtgtctttatagtagcatgatttataatcctttgggtatctacccagtaatgggatcgctggatcaaatggtatttctagttctagatccttgaggaattgccacactgtcttccgcaatggttgaactaatttacactccaacaaacagtgtaaaagcattccaatttctccatatcctctccagcatctgttgtttcctgattttttaatgatcgccattctaactagtgtgagatggtatctcattgtggttttgatttgcatttctctgatgaccagtgatgatgagcattttttcatgtgtctgttggctgcataaatgtcttcttttgagaagtgtctgttcatatccttcacccacttgttgatggggttgtttgtttgtcctctctcacttccttgagcagtggttcgtagttctcctttaagaggtccctcacatcccttgtaagttgtattcctaggtattttattctctttgtagcaattgtgaatgggagttcactcatgatttggctctctgtttgcctgttattgaggataggaatgcttgggatttttgcacattgattttgtatcctgagaccttgctgaagctgcttgtcagcttaaggaaattttgggctgagacaatggggttttctaaatatacaatcatgtcatctgcaaacagggacaatttgacttcctcttttcctaattgaataccctttatttctttctcctgcctgattgccctggccagaacttccaacactatgttaaataggtgtggtgagatagggcatccctgtcttgtgccggtttgcaaaggcattgcttccaatttttgcccattcagtgtgatactggctgtgggtttgtcataagtagttcttattattttcagatacgttccatcaatacctagtttattgagagtttttagcatgaagggctgttgaattttgtcaaaggccttttccgcatctattgagataatcatgtggtttttgtcgttggttctgtttatgcgatggattacatttattgatttgcatatgttgaaacagccttgcgtcccagggatgaagccaacttgatcgtggaggataagctttttgatgtgctgctggattcggtttgccagtattttattgaggatttttgcactgatgttcatcagcgatattggtctaaaattctttttttgttgtgtctctgccaggctttggtatcaggatgatgttgacctcataaaatgagttagggaggattccctctttttctattgattggaatagtttcagaaggaatggtaccagctcctctttgtacctctggtagaattcggctatgaatctgtctggtcctggactttttttggttggtaggccattgattattgcctcaatttcagatcctgttattggtctattcagagattccacttcttcctggcttagtcttgggagggtgtatgtgtccaggaatttatccatttcttctagattttctagtttatttgcgtagaagtgtttatagtattctctgatggtagtttgtatttctgtgagattggtggtgatatcccctttatcattttgtattgcatctatttgattcttctctcttttcttctttattagtcttgctagcagtctatcaattttgctgatcttttcaaaaaaccagctcctggattcattgattttttgaagggttttttgtgtctctacctctttcagttctgctctgatcttagttatttcttgccttctgctagctgtcgaatttgcttgctcttgcttctctagttcttttaattgtgacattagggtgttgattttagatctttcctgctttcctgtgtgggtatttagtgctacaaatttccctctacacactgctttaaatgtgtcccagagatcctggtacgttgtgtctttgttctcattggtttcaaagaacatctttatttctgccttcatttcattatttacccagtagtcattcaggagcaggttgttcagtttccatgtagttgtgtgattttgaccaagtttcttaatcctgagttctaatttgattgcactgtggtctgagagacagtttgttgtgatttccattcttttacatttgctgaggagtgctttacttccaactatggggtcaattttggaataagtgccatgtggtgctgagaagaaggtatattctgttgatttggggtggagtgttctgtagatgtctattaggtctgcttggtgcagagctgagttcaagtcctggatatgcttgttaaccttctggctcattgatttgtctaatattgacagtggggtgttaaagtctcccattattattgtgtgggagtctaagtctctttgtaggtctctaaggacttcctttatgaatctaggtgctcctgtattggttgcatatatatttaggatagttagctcttcttgttgaattgatccatttaccgttacgtaatggccttgtctcttttgatctttgttggtttaaagtctgtttcatctgagatgaggattgcaatccctgcttttttttgctttccatttgcttggtagatcttcctccatccctttattttgagcctatgtgtgtctctgcacgtgagatgggtctcctgaatacagcacactgatgggtcttgactctatccaatttgccagtctgtgtcttttaattggggcatttagtccatttacatttaaggttaatattgttaggtgtgaatttgatcctgtcattatgatgttagctggttattttgcccattacttgatgcagtttcttcataggattgatggtctttacaatttggcatatttttgcagtggctggtaccggttgtttctttccatgtttagtgcttccttcaggagctcttgtaaggcaggcctggtgacaaaatctctcagcatttgcttgtctgtaaaggattttatttctccttcatttacgaagcttagtttggctgtatatgaaattctgggttgaaaattcttttctttaagaatgttgaatattggcccccactctcttctggcttgtagagtttctgctgagagatccgctgttagtctgatgggcttccctttgtgggtaagctgacctttctctctggctgcccttaacattttttccttcatttcaaccttggtgaatctgacaattatgtgtcttggggttgctcttctcgaggagtatctttgtggtgttctctgtatttccggaatttgaatgttggcctgccttgctaggttgggaaagttctcctggataatatcctgaagactgttttccaacttggtttcattctccccatcactttcaggtacactaatcaaacatagatttggtcttttcacatagtcccatatttcttggaggctttgttcatttctttttactctttttttctctaaacttctcttctcactttatttcattaatttgatcttcaatcactgataccctttcttccacttgaccaaatcggctattgaagcttgtgcaggcatcacgtagttcttgtgccatggttttcagctccatcaggtcatttaaggtcttctctacactgtttattctagttagccattcacctaatcttttttcaaggtttttagcttccttgtgatgggtttgaacatcctcctttagcttggagaagtttgttattaccgaccttcagaagcctacttctgtcaactcataatgtcattctctgtccagctttgttccattgctggcgaggagctgcaatcctttggagtagaagagccactctggtttttagaattttcagcttttctgctctggtttctccccatctttgtgattttgtctacctttcatctttgatgttggtgacctacagatggggttttggtgtggatgtccttttggttgatgttgatgctattcctttctgtttgttagttttccttctaacagtcaggtctctcagccgcaggtctgttggagtttgctggaggtccactccagaccctgcttgcctgggtatcaccagcggaggctgcagaacagcaaatattgctgcctgatccttcctctggaagctttgtcccagaggggcacccacctgtatgaggtgtctgctggcctctactgggaggtgtctcccagtacatgggggtcagggacccacttgaggaggcagtctgtccgttctcagagctcaaatgctgtgctgggagaaccactgctgtcttcagagctgtcagacaggaacatttaagtctgcagaagtttctgctgccttttgttcagctatgccctgccctcagaggtggagtctatagaggcagcaagccttggtgctgcagtgggctctgccctgtttgagctttctggccgctttgtttgcctactcaagactcagcaatggtggacgcccctccccctgccgggctgctgccttgcaggtcaatctcagactgctgcgctagcagtgagcaaggctctgtgggcgtgggacccgctgagccaggcgcaggatgtaatcttctggtgggccattagctaagaccattggaaaagtgcagtatttgagcaagagtgtcccatttttccaggtacagtctgtcatggcttctcttggctaggaaagggaaatcccctgacccttgtgtttctggggtgaggcgatgccccgccctgctttggctcaccctccctgggctgcacccactgtccaaccagtcccaatgagatgaaccaggtacctcagttggaaatgcagaaatcacccgtcttctctgtcaatcatgctggaagctgcagaccggagctgttcctattcggccatcttggaacggaccacttctctactctttttttttttttttgatacggactctcgctctgtcgccgaggctagagtgcagtggcgcaatctcggcccacttcaagctccacctcccgggttcacaccattctgcctcagcctcccgagtagctgggactacaggcgcccaccaccacgcctggctaattttttgtatttttagtagagacagggtttcaccatgttagccaggatggtctcgatctcctgaccttgtgatccgcccgtctcagcctcccaaagtgctgggattacaggcgtgacacttctctactctttaaaggccactctcaggtcctttccatgtgagttccatcttcatacctactatggtgcatttaatccttctagtgctccaaatctctgacttcctttctgcaaccaaccagagaaaactcagattttaaagggcacatgtgaataggttaggctgggcccactagcataatcctcccttcttaaagtcaactctgccagataacatgacctatcataggagtaatatgtcatattcacagggtcaaatatttgaaagacgtcttagaattctgcttaccacaaactgtctttttcccactgttttgaagtgctacctatgccaaaaacaaaatagtcatatatatgtgtatatatatgtatatgtgtataatatatatgtatatatatgtataatatatgtgtatatatgtataatatatatgtgtatatatatgtataatatatatgtgtatatatatgtatactatatatctatatatatatatctatatatatatatacacacacacacacacacacacccctatatatatatagtccggggtgagtcatatatatagtcatttctgggaagagtttatgtagaatcaatatttcttccttaattgttcattgaattgactaatgaaatcatcttggcctggggttttctttgtgaagagattttaaattacaaattccatttctttaatatatgtaagactattcagggtatctgtttctttttgagtaagcttaacatttttgtctttgtgcagactttgtccattttgtccaaggtgtctacattcatgacataaagtttttcacaaaattatgtgattatccttttgatatctggaatctgcagagatgtcacctctctctttcctgatatttgtaatatcttaatatcttttgtcttctcacatttttttccctgatcaatctggctaaacacttatcaatttgattgttttattgaagaaccagcttttagttccatttattttcttgattattttattggcttcaatttcattaattaattgcattaatttctggtgtgaactttatttcctgcctacttcagagttaactgctcttctctttctagtttcttgcaatggaaactgaaataattgattttgtaatgtaagtttttagcgttataaatttctctctaactactgctttggccctgtcccacaaagtctgatatcttggagtgtgacttgcttctttcacttagcataatgttttcagggttttttcatggtttagcatgtgccagtgcttcattactttttattgatgaataatatttcgttgcatgactttaccatgttttgtctttccattcatcaattggtggacattcagattgtttgcactctttgactattatgaataatattgctgtaaacactcatgtacaagttttttgtggacttatgtttctaattctcttgtctataggtggaattgctgggtaatatggtaactctgtatttaatattttagggaactgccaaacagttttccaaagttcctgtaccagtttataattctaacaacaagacatgagggttacagtttctccacatcttgtcaacactggttattgtttgtctttttttattatagccatcctagtgaagtagtatctcattgtggttttgattatatttccttgatgactaatgatgttgaacatcttttcacatgcttattggccatttgtacagattgaatatcccttatctgaaatgcttgagatgagaagtgtttaggatatgggattttttttggatttggaaatatttgcatatacataatgagatattttgggaatgggacccaagtctaaacacaaaatttacttatattttatatacacctcatacacatagcctgaaggtaactgcacaatatttttaattttgtgcatgaagaaagttttgactgcaacccattacatatagtcatgtgtgaaattttccacttgtagcatcatgttggcactcaaaaagctgaattttggaagatttcagattttatgtttttacattagggatactcaacctgtacatcttcttaagaagatatttagaaatgtctgttgcaatcctttgcccattttcaatcagattgtctttattattgatttgtaagagttctttatatattatggctagagatctttatcagacatatgatcttttcccattctttagattgtctttttactttcttgatggtgtcctttaaagcataaaagtgttagttttgatgaagtccaatttatttatttatttttgtcacttgtgcttttgatgtcatagttacaaaccattctgtaatctaaggtcacaaagatgtatttctctttcctactgagagttttatagttttagttgttacatttagggctatgatccattctgaatttatttcctatgtcatgtgaggtagtgatccagcttccttcttttgcacatgtatatccacttgtccaagttccagttgttgaatgtttattaattttattatctttgtcatttctgcatcagttttgactgatcagtttttctcctcatttgggttgtattttcttgcattgcatgcatgataattttttattggatagcttacattctgaattttaccttgtcagatgctggatatttttgtacttctataaatattattgagctgtgttatgggacacagttttgttatttggagacggtttgatactttctggtcttgcttctaggctgttagttggtaccagaatggcatttggtttagggctaattttactccaccaccaaggcaaaaacctctctgagttctctagttaccagtccccaacctttttggaaccagggaccggttttgtggaagacactttttccctggaccaggctgggggaatggtttggggatgattcaagcacattacatttattgtgtactttatttccattattattaaatgttaatatataatgaaataattatacaactcaccataatgtagaaaagtgggagggagccctgagcttcttttcctgcagctagacaatcccatctgagggtgatgggggacagtgacagatgatcaggcattagattatcataaggagcacgcaacctagatcccttgcatgctcagttcacaatatggtttgcactcctctgagaatctaatgctgccagtgatctgacaggcggtggagcttaggcagtaatgcaagcaatggggaatgcctgtaaatacagataaagcttcacttgcttgcctgctgctcacctcctgccgtgtgacacagtactggtgctgctctagtggatgcattgttggttgtgacgttctctggtggactggtagaaacagtgactattctcaattcagggattattccctctaattctttcagatgattccttcacccagcttctcaaaatttctcatacaattgtgctgatctgcacctagctgaaattcagggggtcccctctgcagatctctggagcgttctctcactcactacagctttctccttctacaactctgccctaccaaaaaccactgcggtagcctccccaaactatcacctctatctccttgattacaaatgcattgttttaatcaggtgtgttaacatggcaagcatggagacaactgcctttgaaagaagagctacttagaattcttgaaaggagggggcattgcacactaggcagggcctcatggggaagcacccagttggggaaggaggcagaaggagcacaggagagcatggcccagagccttcattgtggtccccatgggaaggaagggatgaggcagtttaggcagctgagcaggtttagttaggattggctggtatgaaaaattttggtgggctttgagctataggagtagttcctagatgtcttgtgtccagccctgaaataattcccagcaggatttagagtgatttagagtatttggcttgttgtgtgagagttttctaagggaggtggttggtgggtatggcctttggattggttgtttgctcaatatgaaagaaatgttcaccgtggaatcatttgctatctctaagaatttagctagtcatgggaggggcagcctctccccgacaagcaaggcctccaagatgtcaaagcatcataaaatgaagacaataaaaaacaattaatgcacttatcaactgagggagattaccaagctctgcttgtacttctccttcttgcactgtagcctgaaaacttttcaaatgataagctgagacaatcataagactcctctcattcgtttctcttttctcagggattgctgtctttttgttgcccaatatccagtgtcttgaaaacttttttcttcatgtattttatctttttttttttttttagttgtttcaggattttaggtaggagggtaaatccagtccctcttactccatcttgttcagaagtagaactatggaaaatcatttccatttgaaattaaaattcagttgagatttttgggaaccaataacagtttaaacaggtttggcttctatatcgataattcagcagtctttattaacagattggagtgttagagcaaggtagcgaaaagacagagcatctaagccaagacaaaggatgggtgggaagacttcaagtagacagaatgccatgaacaaaatggctgaggatgcaaattttatgtgtttagaggataagtagctcacattcactggaaagcatgagtctttaaatgaagccaagcttcaacataggttgggatcagattttgtagagaaggctaatgggagttataaagaaaatgagaatttctctttcaataaaatctgtcttttcctcatggtgttccccaaacttttttttctcctaagcccccactaatattcatttttcattccttcaccttctcctaatatctaatccatttcttagctctgtaaggtcggccttatttgtagctctagaaagaacttcactgctcagtaaggtagacattagccatatgtggctatttaaatgtaaatgaattaaataaaattgaaatttcagttccttattgccctggccacatttcaggtgttcaagaggcacatctagccaagggcctttgtattggttggatagcacagggaacatttccaccatcacagaaagttatattgcatagcactactctagaatgtgctcagaggcaaaattttaaatttcatatgcggtataactatgtgaaaactaagacttaacaataaaattttaaagatttaaatgaagtcatcaaaatagtaatattgattatttttcactaagttcttgctaatcatttcttctactcatataatttctgcattttatatacagagcacatgtttatagtaggaaaaattatgtctttgatcatttattctttttcatactataagcactttaagtctcattctctcccccactagacaatataatagtattctaactagtctcttagaaaataatacaaattgaaaaagagaaaggctatagaagaaaaatgacagaggattagtctaagagagccaataccctactagtaggagttccagaaagaggggatggagaaaacaggggaagaaattaccaaagaaataataaaagaaaattttccagaaagaaagttggtaagtccaaacagtgaatgggcccactggatttccagtctaattaaggaatagaagacttgtattagggcatattcctatgaaacttcaggattctagagctaagacagctgagtttgaggataaggagatgggataggggcaggacaaagggaagtagtcacattccaagaaactaaaattgaaatcataaaccttggatgctggaagataataaacttgagggtaagcccctttcagcttaaaattctatatacagccaaactatgtgattcatgtgggaaaagaaacaaaaattagacatgtaaacatctataaaaattcctgtgtatctttttattagttactggaaaatgtgcttcagtaaagtaagggaataaaccaagaatgagaaagtcatgaacagaatccataaaacagggaatccagtccagagaagtggcaaagggaagtccaaggatgacagctatgcagcaggcctggagagcaacccgtccaagattggatcaaaagaatggaaggctctgtggggggagggacagaataaatgaattattggatgtgtttgtacatttgggaataaaatctgatgcatttttgaagaaagaattttcattgtctactcatgagaaaagaaaatcaagtaaaggcaacaaataattctaggaaagacaaaatgatgtacaaagaaagaaactataacctatttgaaagggaggcagggaagtgagaggagaagaaaggacaggcagatcacctgggattccatcaaccagagataacgtgttattattttattgtttatcttttcaaataaatctgtaccatacacataatgtatctttacaatagtgggatcatactgtactatttcatggtttgttttttgtcagttactattatttttaaatatgtatttgacattatatattctgcaggataatttttaataggttatagaataattaatttagtgaatagaccataatgtattaatcaaatctctgttgctttaatttagttggtccttataaattccctgaaatatagtaaaacaaagacagttctgattttggaaccgggacttagagtcttatagtccagcttcttagtatataactgcgactaaatatcctgttctgatttaggagattaggccaagaaaatgcagaatatttactcctatatgtactcatgctaatatcacagacagacaagaatgattaaagtgctactttttaggattatatcatggctatatttaagggagcatctcctaccctattctctgtctagagtgctgctaacccaagtatctgcatggtccattttctcatttcattcaagttcttctctgttcacacatccccttatcagggaggtcttttcagtgaattttacataaaataggccacctctgtcactgcacagacttatctcctaagctgattttatttttctccatagcactttctcaccatctatcatcccaacactaaaatataagctcaagaatagtgtttctgtcttgtttgttgctccatctccagcgcctaaaataaggcctggcataaagtaagtaggtgctcagtcatctttgaatgaataaacaaatgaatgagttaattaactgggacttagaaaacaataggaacaacccaagaaggcagtgaagggaaattctaagtcgacagtggtccaggttagagcagaaggtctcagggtcctggaaaggaggtctccaggaagaattgactcagaaaaatattgagtagagttaagagggaaaaaaaggtaactgtaacgaaaacaaatgttggaggacagagaatggaagtgtaagagtggaagtgtggttctagataccacttggctcagcagtgaacaatattcagaagtaaaggtgtaagtatattatttaagtaagaatagaataattcaaaataagatataaacatgttgagaagatggcaggaaggaatggtagggctgtaaaagggagctaaatcctcatctttcatagcaactcagcaagggtaatcaataagttatcaagaaatgacaagatgatcgtaagtgtttagaggtttgaagataactggtggaaggacagctaaaagagttcagagaggcttcctctaggaaacgggtctagaaatgggaaatgatggaaaagaaaactatggtttggcactacaaccatttctgtgatatttgatatgaaactatatatgtgtatgtgtgttaccttgataaaactttaaacaaggaaagcagaggcaaaatgtaaaaattaataatctgggagctgggtgcggtggctcatgcctgtaatcccagcactttgagaggccaaggcaggcggatcttctgaggtcaggagttcaagaccagcctgaccaacatggtgaaaccctgtctctactaaaaatacaaaattagcggagtgtggtggcgcatgcctgtaatcccagctactctggaggctgaggcaggagaattgcttgaacctgggaggtggccgtgagccacgatcgtgccattgccctccagcccgggcaacaaagagcgaaactccatctcaaaaaataataataatctggaactaaaattccagatggttgaagcaacagggatggaggcaggatgggaggaaggcatggggaaagtgcaagtatgctaaggtcatgccttgtttagatgagtaattccagacagcaagagaaaataaaaagtaagtttgcagtttttaggtaaggctaaccactagataaataaaaatggaatttatactttcagattgttaatgaaaagaaatttgttaaatcctgggtggggaggaaaattcatcattcacactaaagataagaggcagaaataacaagaaagcgtagggtatataaagcaagatgactggcgtcagaccaaatagctttgatctcaatatatgtgaatatgtttagtccttctatttaagaaacagagactttcaaactgcatttttaaagaagtccacttacatgatttcaagagacatacttgaaacaaaatgacaaaagattgaaaatgaagggaaggacagatgctggcaaaaaagaaagcaagataagaataataataccagccaaaatggaattcagggtacaaagcattgaatgaaaattttcttaccagtacaagaaagccacataaactcatgttatctctggcgttcttcctctttcctaggtatttgacatcttgaaagtgagcatcactttgcttattttgcagccagtgtaatgggactaaccctattgaaaactcctggagaactttaaacgtatttttaaagataaataatccttttagttgtttcctttaaaaaaaaaaaagccagtatattttcatgttagtaactgtttgcattttcttggtatacatgatttattggtaacaatttgtacttctaagccttaaatcgaaatagcacatattggtctggtaaaattgcacacatcatctgctgtggtatctgacattgggctgtggcactgttaaacttttgctatggagaagccagatgaggttggaagaaggttcttttaaatgaaatgctcttgtttccagagactgtgtgcatgttgcctgactcacattcctctgttggcctcaccagtatctctcatcagatagcacgtgccaaaagaaaggaggaacatgaatttactaaaattaatttgaaatttgtgtttgttctatatattctaaatgtttgactttttattttttaaatgtagctaatgctgcctaccttgggggccaagaaatgatggaggtggtgaagagagatgacgaaaccataaaggagcatttatgtaaggtaatcactttagtgctgcaaggggatagataataagtagatgggcagagatacgagggcaaaggactagaactagttagaatctgtaagactttaagggttggtagaatgacatagagttctacttccagttaaaattgaaattatccctgaaagttgtgtagagagtagtaaagctaattgcataataacttatttttttatcacctgtttttgttgaattaattttagaatcaatacttttctattttgtcaatgcattttagcctctctaggccttctactgagaaaactccataatatttatagaataaataatgttggaatataaatgaaacagtggaaaatacattatatgttatatgatctcatgactagtgagcctttcttattctctaatgtgttagagtaggaatgtcctgctctgaccctaagaccagttttgtgaaatattcaacatttgggagttatgctgcaaatactagaatcttgcacacacacatctggaagcaccaatctctgaaactataagagtagggtttagtatatgtctaaggtcaccctagaatttggatgactgtggtactcctgtggcatcatttgtctggctgtccgttctgagtaggacagaactgtactaatattatagccactagccacatgtggttatttgtggctagccttaattgagttgtgccataagtgtaaaacacacattggatttcaaaagtttagttcccccagaagcaaagtatttcattaatttttatattgattacctgttgaaatactaccttagatatagtggattaagtaaaacatattattaaaagtaatttcacccattcctttataattttttaaacattgtaactaggaaattctaaaattgcatatgtaccttgctttatgcttctgttggacagcattagtcttaaactttacaattggtgctgaactatgatacctgctgaaatgatccctgctgagtggcaaactctcataggactcaggagcaatccacaagtgaaatacgagataacccactggacttagaatgtctttataaaccttgatacatttgacttaaacttttctacattgttaattcttaattccataacctcccagtacaattatcttaaaacgagaagtgtatatgttcttaaaattttttttttagaatattgaaaatattcacccagagaggacttttgaaaatgccagtgttgttttgtctcatggccatagtggtcatcatatttctgaaatagcagttggctagagattgaaatttggaaaccagaaggaagccctcactagccgaagggagagtgctggggcctcaggagggccccctctccagggctttcagctacttccagtcactgagcgatgtgaaaatacaagaaaaacagtattttattttccatttaaactgtaagtgaatctgtttcaaaaatgcatttaagttcttccaggttgggagttcataaaaacagctcaactctcagttaataataagactggcagatgctcacttccaaaattcacacttgctgaacaactagacccatcatgtgtcagagtctgctttaccacctgtggaagccagctgctgtaaaatactcatcatttctggattcagcttgtgtgttgtgctcagaaaaaggtcaaagaaaggtgctaacttattcctgtcccaagtgaaatccatatgcaagtgtaatcattcccagatagagggctgttcatggtaattatgtcaggactgtaagtttactgaaattttatggggaaatacgggggtgtaatggtaaatggtagacatttcaaggttagtattaacacacagtcacaggaataaactttttcaactccaggcaatagttttgtttttgagatagcattaaatatacttctagaatatggggaaacaaagcattgtttcatttaatcatgcaaaactaccttgcagttaattcattatcctttctaccagcaaaattcaagctctccactagaataatacaattacagctcctaagtgaaactaggtacagagagacaggaagtttattgcaactttttgtttctgtaataaaaagaggaaacatgctgtaatttaatattggtagaagttgaatcaacatatgtcccagtctgcttgagaaaataaggaaacttaaaagtgcacatagttctaggaagatagtgggcattgcttcctgccttccaaacacccccgataactggtcaaactaaaaccaatgcccgggattagaaatattcctatttaggtatcttaatcgaggatactctttcccatttccacccaaacaaaggcgttcagaaacttcagaactatccaggactgtccagtgtgaatagtcatcaagccacacattttgttgaaaaatcatttcctgtatctcagctattcaactaaaaatagttctgaaaaatatatctttgtgccatccagccagaatgccacaggaaagttagtctaaaaataagctttctactgtatcatgcagacagcattctacttctttctcctccccaagagaactatcataccataatctacaggctttggttctaaatccaaattttctaccactggatttccatttgacacaagaagagagctttttatatgcttgaggaaaatgggcatttttagctctaaaagatctgttgagctgattatcctccttctgaggtccagtgactttatacacagtattggacataaagtaatttattttattaaaataatttttctttcctggagcaaatataacagactcatggttgtttccaaaggagtataccatggtttatggcatcataggttatttctttttcctttttttgtttttttgagacagagtcttgcactgtcgcccaggctagagtgcagtggcacgatctcggctcactgcaacctccacttcccgggttcaagcgattttcttgcctcagcctcccgagtagctgggattacaggtacccgccaccatacccagctaatttttactagagacagggtttcaccatgttggtcaggctggtctcaaactcctgaccttgtgatttaccggcctcggcctcccaaggtgctgggattacaggcatgagccactgcgcccggcctataggttattttgtcatttgactaaatcctgcttgtctagtgtcatccccaagaggccttcccagtccttggttttggttagatgttactccctatgtaaagttatattgcatttatcacacagtatttaaacaatcaaccttcacctttccccacgttgaggtaaggagctgtgtcttcttcgtcttgatgtcccctagggcctagcataattcatacctggtaaacagtcagtaaatatgtgctagacagatggatagatggggacgccattaactagagtgtggattctaaaccttttttgtgccatgcatctctttcgctctctcataaagcttttggattctactcacaatgatgttaagtgcataaaatacacaagattacaaaagaaagaagttgttggataatgagatataatagcagtcagaatttttttttaatttgtaatgataagtataatgttttagttaccttgagcaagttagtgtgatttaaaaatacttatcatttttatagatgacaaaatataggcattactaatattgtagcttgttgcctgtattcctaattgaaagaaatactaaattttggttagagattaacaaaagtaaacatgtaaatttttccaaagtttacataaccccttctccaaacctctggacctgtacaccgcaagcaaagaagccctgcgttagagaaactagaaaaggttaggtagcatgatgttgtggcttaggcactggcctgagaacaaaaagtcatgatatgccacactgaagagactgttttggggagctattgaagggtctaagcatgggagtaacagggtgacagtcaaaacatttgacaaccatgtgatatagggattgaccaatcagaatgtatgccagctatgaacagccagttcaggggcaccagttcatatcagttagccctaggaatttggtgagattaacaaatgagagggattatcttgagggcaaatgtgtggtataatactagaaaaggatgaaatatgagttggggagcctgtttacaaagcttttataagaactaaggcattgggattgaagatggaaagatttaggagatagaatcaaaggtactgagtactaacaggatattggggaatggagatggaggaatctaagattatttctttgtatctggacttggtaataagacagggaatatgggaagagaagcagcagcaagttatgggagatggctgaacaagtggttcattttggtacttgtatttgagatgccagtgggacatgcaagtggatccgtgtctggcaggccctggatgtatgggtgtaaagcttagaaagatatttgaggctgacttttggttggggagtgatgaggctgtagttaaagccaagagcatgggtaatagcagcctaaagaagtatacagaataaggagagaagacttctaatgattgatcattagggaacccagcttaagggttgggaggaagacgaggagccactgaatgaataagatgggaggggaggtaagaagggtgggaaggagaaccaggatgaaataaaccaagggaagagaatcaactgtgcgttttcgccaccccaatcccagtttgtctggaaacctctggagtattctctgtttcatgaggcacctggtgtgtcagaggcaaataagaggtcagcactcccttgttctgtcactgttctaagccataagggatgcatgtctcattcattgaaaagtgaactcatgtttggtttataaacttgaagttttcatttcaaacccacttagggggggaattctaaactgccatgaccacgtttggcccaggcttacggaaacagctggtgtgtgctactgccagactgaatctgagcatcactatcagtaagtaggaatctgaaattgctccaaagagaacacatgaagtgcagctttcagatgaagttaggcagtggtaggggggctgcctgtaaggtggtgctgcccctgcccccagagggccaggccagggctacagtgtggcttgggaaaggggcaagtgtcctcaagaacaggaactcctctgctattgctctctccccatccctcttagcctgccttagcccaaaggtgtgtgttgcctttgggagcaaaccttgtgcagttgtttgcagattggggcatgcaaatccttctgacatgcacatgtcctgcctgctgcagcataggaaatgctccctggaccagctcaccaggcctgcctttccgccaagcctcggtattctgaaacggattgtgttagttctgcctgtttaatttaaagcctgtccagaatgtcataatcatcctgaaaatagataggtttgtttttatctcaatattgtgaccttgaaagctttatttgggcaattgtgtgagcacactctggggttctgcagtggagcctggtgactgaggggaggcaaacgtgctggagagctgggctcccagagtctcagccaagcttcaaacaccaaatccacccttgttcatgaccctgcttaagttaccggacctcactgtgcctcctttattcatcaataaaatggttaataatagtatgtagcctcatacagctattccaaaaatatgctataattcataccttgtaattcagaccttataagagtatctccgccgggcacggtggctcatgcctgtaatcccagcactttgggaggccgaggcgggtggatcatgaggtcaggagttcgagaccagcctggccaacatggtgaaaccccgtctccactaaaaatacaaatattagccgggcatggtggtgcatgcctatagtcccagctactcgggaggctgaggcagaattgcttgaacccaggagggggaggttgcagtgagccaagatcatgctactgcactccagcctgggcaacagagcgagactccgtctcaaaaaaaaaaaaaaaagaaagagtgtctggaatgcactaagcattcaataaatgtttttattactattacaaagttagttatagcctagttatgcttctaagcactttaaaaagactatttgcctaactgttcctcttctcacatccccttttcagatactttcattgtgttaatgaaaggtattagtgatgctgagtatgtggccaagagaccccggaatgcccaatgccattctaaacaacagccaccactccccataagatgcctcaaggagctgttgtataggaaccataatgaggggaaaacacaatagtacttgatttttaccaaggcttgggcccattattctagtccagagaagtctgatgaactggacttagcccttctctcagttagttgagtaaaaccattccagtacatttgcccccttcttggggcacagatccagggaaggacagaaacacagaaggagactggcgctcagggcctcttactttgccagagggcctcgccagaggaaagcagaggccctgggttagcatctcagtgcagtctcacgtgagaaagagacaagccagtcacttgatggcctcgtggcttgtatgtgggagggagaggatcctggccctttacatgttagccacacggaaaggagagtgctgctctgcacaccgctgtatacacagatggttgttccagctactggagagtgagccacacagtgccccataggacctactcctcctttggcgctcccattcccaccgctcccctctgtgcctgcagagagaagcagggttcacgggcgggaagcatttgtgttttcacctccatcctcagccactttttaaaaatctttggagatttcagttctcattttctcaagaatggtaattgagccagttaggaataaacggaagagaggaaacaaggtaactggaaaaactgaagtccctaaaccatctccctttctttagcaattctgcaagtccctaaaaacagaggctcagaaagactgcagtgaaatgttgacactttgcagctgcctgtgtccccaacagggataagattttttaagtaactgaaaggagatgcttatatcacagaatcggtttcctttaacattgcaagattggggcttacatgtctttgactctgaggggaggggagaagtggaagcctgctgctgtcatccagactgtctggactctccccagaaatgggcatgcattggaggacctaacagtttatatcccgagcccgggaaagcttcaaggggatgaaaacaggagataaaggcagggtaggggccctagctgggaagtagggggcctgtatgtgtaggtactaatttgatcccttggtattcaaccgactgctttatatctgaccttttgcttttttcacaaacaatgaaacaagcaaaaaacctgctctagtgcaaattatttcaaagaaggaaagaaaacctggagaaagcaggaatgacatatttttcttagacctctggaagaaaggccaagaagatagatctctctcagaatctgtgtcactcctctttggtcactgtctctagtgctggcttcctggttgccctgccatgcagcgtaagctgccagggagctacagctgttgatgaagtgctaacagaaagccttgcattgctcagaaaagcggtgggcattaccttcactgctgcaagaacccacaggctcaccctgtgagctcaccaggaagaaaagtaactcccagaatgtcggtgcctttcttcatttggaagatgctcaaccaaggatagccaaagggcactatagcttaggctccaggtctcctttatgaggaaaagtaggttttattataaaagtggaagtatagaatccacaccaagagctgactgttagtggcggcttgaggatagggatgtgcttcactgtttatttggttggcgacttatcttctaccccacctgtctttctctacagtcatgtctggggaatatgacatgtacattttttagataatgagtaagtatatggtaaaacaactttgttttatattttaaaaaatgtttaatacttatacattttctgagcctatgtcaaaaacaacttatcagaatagaatatattttctcaaaggctaatgtaaggtcatgtggattctttttccttgagcagggcacagctcccacccacccagcccaccattgcccagtctgtgtcgaggagctccctttgtcctcacctgtaaagcagcagcctttaagagtgcccaccatgtggaaagcacttgatacactttgttttccagtcctcagcactagcccacaggtaactagttctgtcttactttacagatgagtaaacaggcacagggaagctaagtaactggtccaggctcacagcaccaataaatggcagaaccaagattccagtccaggtggatatggctcagggacctgtacagtcttaacactgtactcactgcactacgctcttcttggctgcataaggagcttgagtagtttcacaaattactttagaataatataaatacaattattttaccacactgtgatataaagacattatgagaagccctttcactctcagcatgacacccccagaaatgccgtttaccaccctgctcaggcctgcactatatcacaaaacaggcaccccacaaattgactacccaaagtagtctgtgccaaaggctcatcaagctggatttctcgttggaaacatttcaagttgtattgatgagatatcgtttgtaccaaacttgacttcgtggtgaattatgatttaaagagcttctaaaattcagtttatccataaggttaacaccaacaacaaatatatatatgcaaaaatatatagagatgcaaaactttcattttattagcccttttattcctgtaatgcctgtagtcctactgtcctattgaatagacagataattcagatagagatttttatgtgtggcttttaaaattgttattattttaagatgttgctatgtcattgaaagtgagttttgttattagctaaatcataagatgcttctaatatttctttgttcttactataaatcctctattagtaatgcataaaagcatgcaactccaaatgtatactaaaacaaagctttgttcatgttcactccctcagggcagaatttgggttttcctgctttggggtcccgtagggctttgtccatacctctgtctgcctgttgtatttaagagccagtttatataggtctgttctctcgcctagtctgtgagctgttccagggcagagaccatcttacacacttctgaatgtcagccacttagcctagtaccagatatgggatggaatcagagtcatttttggtggaactcattttaatctatcagcttcagcaattcactgtccaacagtgctgtttgtagaccccccaaaaagtggggaaaaaaaaacacacagaagaaaagacagatgtggggacaagctgcagcaacctgcagggatattttaggagggccctgtccccttaggtgcacattaaacagttaaagggaagttcatctataagcccagagaccatagtaaccataaatccactttcctgcagaaaacacaggaggaaaagccaaagcatggttctggagaatcaaaatctagactgaaaaaaagttaaattttgtgcttaatagaaaacaatgggttacttaacatgacaatttggaaacagaaaaatttctatctcaataatgtatactttttatcaactctcatgagttccaaaacaagtgctaaggataaataaactacaggaaataatttattttcttctaaacctttgaatgtaaacatcctgctgattgcctgcgattctttgttaacaattccagtactttcatggcagttatcacccccatgacacacagtgcctcagaagagctacatagactgtgagaaggctttcagtaaaggtagttgggaaggctgggtgctgtggctcacgcctgtaatttcagtactttgtgagggtgaggtgggtggatcacttgagcccaggagttggagaccagcctgggaaacatagggagacttcgtctctacaaaaaaaaattaaaaattagctgagcatggtggcatgcgcttgtgattccagctaccctggaagctgatgtgcgaaggtcacttgagctcgggaggtcaaggctccagtaagctgagatcacaccactgcactctagactgggcccagagtaagactgtctcagaataaaaaagtaaataaaaataaaggtggctgtgttagctcctgttgacaactctcacactctattagttttcatatccagtttaagacctgccagttgtcaggttttatgtttttataacgggtctatttactggaattgtaagtagtagcaaaaggtacaagttaggaatgttgtctgtggatttgtagcccagctcttcaatgcaaaattgcttgaaataagcaggttaatcttgctaagcctcaatttccttttctgtaaaatatagatacaatactttccttagagtattgttgtgaggatacaacgagataatacatagaaagtgcttacttagcacagagcctggccattgctctcggcccattggttcatcatggtgcattgcgattcatttttgcataccgataaataaagagtatgcactgttaaccactatgtttttggtgtccagttgtttctctttctttctacttcacccctcctcccccatcccccgccagtgccaccacacactccatactttctcattttcctgttcagggctgcaggtgcggagttctccggtcagatctattgcctgtgatttataatttatagggaaaaggaagtatctcaagccagtgtatgtaaaggcattagataaccatgtgttttacttgtaagccaagactttcataggaagccctttagagaatatatagcctgaaaaagaacttgtaaaagaaaacaaaattttacaaaacgtgagcccacccccatcatcagttaggcgtttaaccaaatggggcccacttcaaacgtttaaggattgtagagaatcgagaaataaaatcagataagcatacgggaggtctagactcctcactgttctgctgtcttgaacactgacaccactctttgttgaggttcctagcacatgccttggacagtgtgtgccccataattacttggacatatttgtctcttgataccctgaggtgggtgtcgggtcccttaatccatgttgatcacccctgctcaaatcactgccttaactgcatgtacggggatggtgtttgctcagtgctgagggcttatcaagctggacttctcattggaaacatttcaagttgtaattgcatcacagaaaagtaaatggtacgttcttcatggaaacagtctttgaaatgtcagacagaaagcaacagcggtgcgtacagtgacgcttttcttgttgaggaaactgtattagatgaggtcttttctgtctggctttcctttgagctgactgccattatcataggacttcacactgtagcttgtactggagtgagggtcctagagtagctttctcagggtccagtgatcttgaggcgagagcatgccctgcagcagaggaacagacctgacaggtatgaacccaagtctgactttccagatttctcagcagtgttccctgctctgaggaagtgctgagtaactgcatagcgactgttccctatcctattccctgaatacaatcgaaaagattgctggtggtaaatatagggagtagcttagagagagcctaatgttatcagcactattggtagataattaatacctgcaaatagtttgtactcttgacagtatttcaaggcaaagctatagcagggtagttgctgagagatccggggaaacgtgtttttctactagtggaaagaatagtctcccactggttgtgaggttgcagcattttagagctacagaaagagctgagaccaggaggaagaactaggcaactgctaggctctcatattctctaggaagcaaaagaagttcttactctgctaagaaccatggcaaaatgaattctggctttaggggctttggaatgcccagaaatggttggagtgaggaaaagtaggagaatgcaaagaatgaattaagtgataaatctgtaagttgcaggtcctctgcagcgtgcaaaactggaaccccaggtaacaaccaagaaaacctccatgaagctggaatactatgcagtcataaaaaaggatgagttcatgtcctttgcagggacatggatgaagctggaaaccatcattctcagcaaactgacacaggaacagaaaaccagacatggcatgttctcactcataagtgggagttgaacaatgagaacacatggacacagggaggggaacatcacacaccggggcctgttaggggatggggggtaggggagggatagcattaggagaaatacctaatgtagatgacgggttgatgggtacagcaaaccaccgtggcacgtgtatacctatgtaacaaacctgcacactctgcacatgtcccagaatttgaagtataattaaaaaaaaaaaaaaaaaaaaaaaaaggaaacctccatgaagcaattcagagtaagtctgccacttgaggtttacttgttcataatttactctctggagtactatgttaaattttttcctctataaagtgtttttaactaaccatctaaatattggttaaggcatcatgttattgtaatgaaggccattgttttcgtaagatcagtctcatctgtcccatattcaggtcatggatttaataattgatacactcaaactatccagtgagcaataacgcctgcttccctgcactctcctcccccagcacttgatcacctccaatccttcttctcgttgtggccagagtggttttcctgacatagggacctcagcatgtcacttcactgtgcagtcttttttgccttgtggacttcgggataaagcgcaacctccttggcatgcatagaagatgctgtccatgacctcatccctctctgcctctccagtcttatctcccaccaccctatattccagccatgtggaattccagttccccacacatgccatgctctttcaagctttggtttgcttggtcttctccccacagtgtgctgccccagcttgaagactcaactgaggcatcaactctggggaatctttcctgcctactacttctgaccagctgcacctcacctgagctctcaaattgtcttgtatacatggggtccccttctcccctccccccaagactgtcttatctctattttccaggttcctaatacaaagtaggtgctccatttgtatttgatgaacaaaggaatgagtaagcaattcagtgtctgaatgaaggagcacatttggtatattagggaagctgcaagtgactacagctggccaactaggggctggagctaggcatagctctgtctttcagtgataacagaggtcaaaggatccttaagatttagttcttggtttttgtagaaattgccactatctgttcttctgaatataagatgttgctttgttgcctttatttttagaactaacagaactagaacatagcagtttttcagtgaaacacagcagcctagagcaatatacatatatatcacatgcaggtttaggtagatatccattcagggtcttagtaatgccacagaggaggctctgtctccattcagctgcttgctgtcaattgaagtatgattattgcacttccccactgaatcaacatacaggctgcatagagccttttcttagaaaggtcataaactctctcaggattctgatcacatttcatcagctacattggaaagcctgagtctatctgatctgtgtttgtattcattcaacaaatacatcccatatgactaccatgtggctatttggaaacaactaagtttattaactggtcactagtcattcagtgactatgtctcaataactgtcttcgtcatcctcaccggccttcattccagtgtccatcccaaccttagtacacaaaactttcctggtaagtcgtttcagtgaattatgagtgatctatcacacaagagtctcccagcatggggatcttcccaccaaattcttctaagtgcactcctgtacatcgtgaagccttgctgccttgagagagccacactctggagagagcttagggactagctcccagggtcaggcgtaggtgctgtcctcagagcactgccggctgctggtgtcatatctgtgtcaggaagggaacgtgttttctaataaaaggtttttgtcttgtctttcagcttacattttattatggtactatagatccttggtgtccaaaagagtactatgaagacattaagaaggattttccagaaggagacattcgactctgtgagaaaaacatacctcatgctttcatcacccattttaaccaggaaatggcagacatgattgctgactccctaaaggatgacttgtccaaaatgtaaattggcctgaggaacaagcccccactgccagtacatggaggcagtcagtgtactagacttagtaggtaaatgtttaattttgaagactgatattagaaatgaagaaagtgagaacctttgtcttacaaaccaactctccgctcgccatgttataggctgaagtaaacacagttgatgaatcattccataggtttaaccatacattttccaagactcagggaacacagtgatctacacagagtcttgtgtttgcacaagatgcccagtggcaccatatg

SEQ ID NO: 15667 - DNA, 36763 bp, Homo sapiens
gccacccccgcccacccctctcgcgggcggagcggctcttggccttttttgggcgtctccctgctccgcggcccgggctggcgggcgggcgctcggctggcggctgcagcagcagagggagacccgcggcaaccccggcaacccagggctcggcgtcgctgccaccatgacgggaaggtaacggcccccacccacgcccccgggccggggaggcgggactgcgggacccctggccgaggcgcagctcgccctcgtacagccccgcggcgccacgatccccgctccgccctggcgcgtcggattctcgcagctgccggggcggcagcgcccgtcggggcaggggtcccccagcccccgcgcctcttcctctgggcgagcgcctgcagcggaaggtggagctcctgcccacccgcccgctgcaagatgggacagccgtctgctcacaaccgacgcccagggctgcgggagggggtcttgtccaaggtcagacaccaaccacgggcaaaaggttcaaaggttgcgtgcctcccccaacttccccgagcccgcgctgtgcgatccccgatcccggtgagtgtcatctctggagccttccgtttcctcctctgtaaacctggggtggtaaaaatgttaaaaatgttgaagggtatgttggaacttggccagagctgcgcccaagcaccagctgtgcaggggttggttggggacagggcgctcccctgggcctggcccaccctctgctctcaggcccctcgttgccatttcacagatgaggtcaccagaggccacagaggctgagccactcaggaggccagtcacaggtccaccagtgtccggccagtgtttgtccctgcagccctttctggaacctagctgggtacaagtgcatgactcaggactgggtgggagggggctgtccctgaggccctggtctcccccagccaagtcctggcagggggatgctgttcttcaggatcccatgacctggggctcttggggagccccagcccggagagtgacctgtggctttgctggggaaaggggcttggagggtacagggcagtgtccaggattgcagtctcaaatccgaggcccacaggggagctgcctctgtgatcgccattaaggctgtggcctggggtctcagggcagcccaggaaccaaaaatagcctgtaacttgtcactttgtaagtcctgccctccagacacacttccctttcttctccccaagcctctcttcccagttagctcccctgacttggagtcacctctaagccttggcccaggcccctctgcagtgagatggagggactcatcccccggagagtggcatctgcaggcccactggctgcctgtggtcaccccctagggttctagcggggctgcctcccattttcctcagagcatccctgccagctggctggttctcactctcctgttttctaggaaaagaaagtggggagagacaggaacagggtccggagcagccccagcagcagcattgaggtggaggtgggtgagaggcggttccttcaggcacaggagggatgtcgaggagaacagagccgtgaagggtgcggggctggaatgggaggccccgaggtgccactgctccctggcaagggtcctcttgcccctgagtcccttgggcctttccctggagacggaggccgtcaggtgagcccggccggaaccgctgggaaggcaggtggtggcgagcaggggtcagccttcccttgctgctgtgggctccaagggcctgagaaactcttaccctcaaatgacacagggatgacagtcagcctttggcaggcactgtgtagggcgttcctcgtccaggcaatactactcgtcttagagaataaggagaaacctggaaacataaaagataacagaaacataaagagaaggaaactgccacagttccactcccaagagcctccctttatgcagttcggtggctccccgcagtcctttctcctggagtttgtttgacgcagctgtgagcgatctgagtgtaatgcacccgctccttcaaaggtgaccctgctgcccgcagtgctggtgccccactggcttccctgccttccatacacagggattgggccgggccagtctgtgaggaacagacatccaacccggccttcggagtgggcgagagttttcctgtcccagaagcagtggagtttcatttccaccgtttcatgctgggtgcccttccccacgtccactgttcccatgtgatcccgggcagctcctcgtgcctggatcctggttctctcgggatcccccatgctgcccagagccaggctgcttttgggaaacaccctctctgctcgcataccttcagggcttctccctgccagctctccctaggacctcaccaggcaagagcagagggagggctgtggggagccaccaaagtgacctggagtggcatgtgtggccatgctgtctgcagatgaacccatgggtgctgtgtggagaaagggctgctgggaaggagatggggaaggagacagaaggcagccactagggaggcctctcctgggtggctgagcgggtggaggagaggaggctgactcagggttctgggaggtggagtggacaggacccaactgactggctgtgaggtgggccacagagggtggggctcgggaggatgcccctcctgtgatgacaggtgggggtggatggcatgcttggtgtggttgtggagtgcttgaagagctgtggcaagtctgagggggagccgtgggaggcacctgggcatggaggggctgaagcccaggagtagccagctgggcagggagtgaaggcagcccagagcatggggtggcacgccgtgggaagagagggggctcggcctcagcagcaactcagggactttgcaacttacaaccacaagatctttgactatcacagctgaagggacctctggcatcaccattgttctacagggaggatattaaggccacctacctagggacccagctgtccctggcattcctggaaatggagcctgggatgttgacacccacggccacgtgagctcagtggcttggctgcataaagtggagtcccacccatggtgtgaccgtcatgtgtgtcacatgtgaggctgtcgtatgcctgattgtgtgctgagcccatgcttagtacagcgcagagcaggctgctagatccctgccctcatatccaccaatcttgcccctcctccgggtgaggagtgtgcccggtggtcccctaggcagaaggtgtcggccaaggggcagctgactgcagctagagccctcagcacagcacacgaggctgcagtggcgtcaggggcttaagcaaactgtaaagtgggtaacaagtgatgtggcttgtgatgtggcaccactgagccctgagccccagactgggccaggtggcactgccatggcccctcacctccttcctttttcttctacttctggtgctgactggccccttctagccggccagtggcataatagggatggagggactgatctgcagggtgtccagtcccgtggtgtgatacccccacctgggctcatttcaagccaccaacatggcattaacgctttacggaattcctgaatagttaacagtcagcacttgtgaactggcaagggacagcccagggagccactggggagaggagcccgggctttctatccacagcgggttatccttcttctgtctgtccctatctgtgctgtgccgcatgcaggctcttttttttttttttgagatggagtctcgctctgtcacccaagctggagtgcagtggcgtgatctcagctcactgcaacctctgcctcccaggttcaagcaattctcttgcctcagcctcccaagtagctgggactacaggtgcataccaccacaaccggctaattttttttgtatttttattggagatggggttttaccgtgttggccatggtggtcttgatcttctgacctcttgatccacccaccttggcctcccaaagtgctgtgattacaggcgtgaacaaccgtgcccagcctgcatgcaggcttaaccatcccttaggtcttcacttccaggtgggaaaggggccaagggaggcactgtcactgtcttgcttgttctgttgaggtgtagcgtgtacatttctgaaggtgaatatttacttagatgacttagcaggatgaccaccctagtgagatacctccatgagtgaatgcatatgtcttgctgagatgaggtgactgaatacacatatgaacataaaacctactgtgtcctcacccacgtccttggaggaatacacgggaaactcatggagttgtcttcagcctcccagcgaggagtctggtgggggagctggctctggaggacagcctgtttgtggcatctctgcctctgtccgtctctgcctctgcccactgggctgagggcacgtgccccagggccttggggaggcagccctgcctcatagcttggggcctcagttccagcctctaagaagccatgtagttgcattcttcattactcacgtgttttttaaaatctgagacatagttcacatattattaaattcaccactttagattgtaaaattcagtggtttttcgtgcattcacaaggctgtgcaaccatcaccattaattccagaacattttaatcattcctaaaagaaaccttgtactcatttgcagacagtcctcatttccccctcctcccagccctggccaccagtaacctgccttctgtctctacagatttgtctgttctggacatttcacataaatggagccatatattatatagccttttgtgcctggcttctttcatttattaacaacatatttccaagattcatccgtatattgtagcatgaatcagtacttcattcctttttctgggtgaataatattccattgtgccatagtttgtttcttccttcatccgtggtagacatttgcattgtttccactttttggctaccgtgaataatactgctatgaacattcccatacaagttttggtgtgaacatacattttctccttgaatatatacctaggactggaattgctggcatatggtaactctatgttaaactttttgaggaattatcaagctgttttccaagtaattgaacaattttacatttattaaattttacaccaggaatgtatgaaggttccaatttcccgacatccttgctgatgcttgttattgttgtccggtttagtaggtgtgaagtggtgtcatattgtggttttgatttccatttccctaatgactgataatgttgagcatcttttcatgtatctgttggccacttgtaaatcctctttggaaaaatgtccattcaaactctttgcccattttttaaatcgggttgtctttttattgttgaattgtaagagttccttatttatttgaatactagacacttctcagacatatgatttgcaaattttttttttttaagatggagtctcactgtgtcgcccaggctggagtgcagtagtgcaatctcagctcactgcaacctccgcctcctgggttcaagcgattcttctgcctcagcccctccagtagctgggactacaggcgtgtgccaccatgcctggctattttttttttgtatttttagtagagatggggtttcaccatgttggccaggctggtctcaaactcctgacctcaggtgatcctcccgcttcagcctcccaaagtgctgggattacaggcacgagccaccgtgcccagccgatttacaaatattttttccttttctgtggatcatcttttcactttcttgattgtgtcgtttgatacacacgttttaacttttaatgaaatccaatttatttccttattctttagttgcttgagttttttttgtcatgtttaggaaactattgcctaatcctggctcatgaaatgaaaacatctgttttcttctaggagttttatactgttagcatgtagctatccagttgtcctagcatcatttgttgataagactactcttcgccccattgaatggtcttggcactcttgtcaaaaatcagttgaccacaaatatatgggattatttttggactctcgagacagggtttcactctttcacccaggctggagtgcagtggcaagatcttggtacattgcagtctcaacctccctgggctcaggtgatcctcctacctgagcctcctgagtagctggaaccacaggtacacaccaccacacctggctactttctgtattttttgtagagatgagattttgccatgttgcccaggctggtcttgaattcctgggctctgcctgcctcagccttccaaagtactgggattataggcgtgagccactgcacccagcctatttctggactcttggttctgttctatgggtgtatatgtctatccttacaccactgccacacttacaattttttagtaagtaaattgtaatttttaagtaaggtgtttttttttttttttttttttttttttttttttttttttttttgagacggagtctcactctgtcacccagggtggaatgcagtggcctgatctcagctcactgcaacctccacctcctgggttcaagcgattctcctgcctcagccttctgagtagctgggactacaggtatgtgccaccacacctggctaatttttatatttgtagtagagatcgggttttgccatgtgggccagggtagtcttgaactcctgacctcaagtgatccacctgccttggcctcccaaagtgctaggattacaggtgtgagccactgcacctggcctctttgtttttttttaaagttgttttgattattctgtgtcacttgcattttcatataaattttaggaatgccttgtctatttctttaaaaaaggcaggaattttaatggagattgtattgaatctataggtcaatttgatgtagtgttgtattgccatcttaacaatattaagttttccaatccatgaacatgggatatctttatttaggtcttctttaatttatatcaataatgttttataatttcagtgaataagaagtcttgcatttattttgttaaacttactcctaagtattttattcattttgatgctgtcccaaatggggttgttttatttcatattcagatttctcattgctagcgattctggtatattgagtgtataccttgcagacttactgaactcatttcttatctgtaaatagggtttctttttttgaggagggattcttccgagttttctatatatgagtatgtaatatgtaaataaaaatagttttactcttccttctcaaactagatgtcttttatttctttttcttgtctaactgtccttgatagaatctgcagtgcaatgttgaaaacaaatagcggactggaaatccccctgaccttaggaggaaagcattcattttctcatcactaagtatgatgttagctatgggttttgggtagatgccccttatcaaattgaagaagttcccttctattcccagtttgttgggtgcttttattatgaaaagatgttggattttgccaaatgtgttttctgcatctgttgagatggtcatagagtgtcctccctatattctattgatatggtatattacattgaattttggatgtgaaaccaaccctatgttcttgggataaatcccatttggtcacggtgtataatactttttatagagtgttagatttattgtattttatcgaggacatttgcatctatgtgactttagcattttattttgagatcaagataatatttatagaatgagttgtgaagtattccctcctagtctttcttttcttttgtttggaaagattttgtgaaggtttgttgttttttgttttttgtttttttctctttttgagacaagatctcactctgtcacccaggctggagtgcagtggcgtgatctcagctcactgcaacctccgccttccaggttcaagtgattctcctgcctcagcctcctgagtagctgggattataggcatgtgccaccacactggtgttttgtatgtttgtttgtaggtttggtgttaattctagttaaacctttgatataattcatcagtgaagccatgtcgctctggctttactttgtgacaagttttttggttactgtctcagtctctttacatgttactggccttactaagtgatttgggtaggctttgtgtccccaactaaatctcatcttgaattgtaatccctataatccccacgtgtcaagggagagaccaggtggaggtcattcaatcatgggggtgtttccccccatgctgttcttgtgatagtgagttctcacaagatctgctggttttataaggggctcatccccctttgcttggtatttcttcctgccaccttgtgaagaaggtgccttgattcccctttgccttctgccacgactataagtttcctgagtcctccccagccctgttcaactgtgagtcgattaaacctctttcctttataatttaccgagtctcatgaagttcttaatagcagtatgaaaatttagactgatacatttggattttctatttcttcttgagttcgttttggtagtgtccttctaggaatctctccatttcagtaggttatttcatttattggcatacagttgttcataatattccattctgctacctccttactgggaccacgagctattattattcaaggaagccatggagttagggagcaggaataagggactaggataagttaaaacaacacaaacctcactggtttgtgtttgtttgtttgtttaccaagattcatctgtttttcttgaccaaatgttcctagggttactgaaaacctttggtggatttgcagagttctgaaagagtagattctgataatttttgctaggtttttcattgcttttatggagggatgaacttctggaggtccttactccaccactttctgctgacatcactctcggtgtttttgcaaatatctagagccagagcactgaaccaaatcccatttggtcatggtgtataatactttgtatagagttctagattcagtttacagtatctgtggctcccaatcccatccctgcagcaggacaggctgcagaatgggtggtaaggttgtgcagagatttgggatttgggctcaatcagactctaagcctctctcaatttctagccttcgatgtccgcttttatagtaaatatttgttgaattgattagtacttggtaaacttgtgcttgaacttcatttacagattatgttgcacaaaacacttgtggctgtagcctcctttccagtgctatatgtgacccttggagccctaaataaatgtttcctccttacagaaaactgcgggtctgcatgagagtcctggattctagtgttgaggatttccacatggatgggctgagtcgggagtggtgagagggtctaggccctatggcattgacttgtagctgctgttaagaacattttcggtgtaagttttcttaagcattcggctacctacatcagagagtcagcggtattccctattcattttggctcctctgggctcagcttctccatgccctttagcccctggggccacctttaaaaactatttgttgaactgatcagtgttgggcaactttggaattggactacatttacaaattatactgtacccaatgcttgtcgtcacttgactgccagggtgcttaatgagtacctcctcctgttgggacttgctgggtgagtgtgttcctcagtggcgtgtgggcctggtatctgaatgccagtgagcccctccaaggctttctcccaccctagtttgggaggatcagtgccctgctgtctttagtgacggctgccagctcttgctttcagaaggcagaagaagatactgctcaagctttctgacctttctagaaaggtctttcagggaaatgggatcaatgctaaagatttccatgagtgctctggatctttattgtactgctgaccaggcttaccttggtcacagtttggatgcctaccgcgggtgtttatgaatcacaagtaactttgccagtctctctgggtaaaaatgcggggtacatggtgccttcctggtggttgccaccaggtccctctgcgtctgctcccctggaagctggaggattgccttttctctaaaataaggacctcttttggggtgcctgaccatttgttggccagatccagaggatcggctctgccctggtctgggtgccccacggtgatgtttgtggcagagggtctcagagaagggagcaaagcagaatgtgggcctgtgtggctccggtcctcggtttcctaactgttggcagggatcctaaaggcgccaggtcctccctgtcctcctcagctgactctgccctcctcagtgtgtccacgggcacaggctttcctcctggcaggtggcagccggagacctcctgggtgtcctgccgccactgtggacctcacctcagtgctgtctggggccttcccagaccagtcccctcccagcgggacccaacccccgccagcctcagctttcaggagctgcccccgcggcgcgaacaatatcctttctatttggagttgactctgctgccctttggagatcccagcgcgtaacgtgagctcgcgaccagcgcgggggaggcgcccacacgcccgtcccgtcttggtgtctggccccaggcggccgcgcctcccctccgaggtggtcccatagcccctgcaccaggcggcccgcgcccgcgacctcaaggcggctgccccgcgccatggcggcccggctgggtgcgctggccgcgtcggggctgtaccggcggcgccagcaccggcagagcccgccgccagccacggggtaggtggccaggggcggggcgggtggcggggacaatggccggaaagctgcggcggcagggcaggccttccctcggaaacccgaccggggccctccgacgccgtgggctctgccccggcgtcggatgggccctgggttggcgacagggtgggcgcgtgcgactttatctaacagggttggatgtcacctgtgatcagctctcctggcagggtgcgcccagggacctatgttagagacgagggagcctgtgtagcccccagcactgctttcagacgggggtgatcatgctgcactttatagatgagcagacaggttctgagcagagcagacacctgctggactcacccaccccaaacatggctatgctgtgatttgaacccaggttagactgactccagcagtggggttcaggatggtcctcagggcatctcagagaatgagttggctctggatggggaggttgggaggggcacggggatggtggtggagccacctcccctcactcttggggtcaggggcatgaggaggagctcctgaaaatgttgcctttgcagtgccgaggggccagcggggaagagagagcaatagggctgtgaccttggggtccttggcatcaaggtgacagatagggaccctggggaggaggccaaggctgggcagaagggctggggcgggggggcagggagggagccaggaacataagtcgcagaggtaggggagggcctggaggacccaggagcagaggaaggccagtgccacccagggcaagcatagcccactctcagctccttgtgtgtggtcagggaaggctcccagagtggcaattagaggactgagccatcaaagatatcttttgctgagaacagaagaggaaggagggcaccgagtggagggcgggaactgcaggccggcagcacggccatctgtggagtccctgctgcatgctgggctcccgcttgtgctggcatggcaggtctggggcagcctgctgttcaggtggggacccccagactcaggaggccaagtcactcacctgagtgtggcagagctggagcaggcaccctccctggtcaacctctggacagccctggatgcgtgtggcataactgtggtaccaggctgcgagtggccagggcactgatggccccaaggctgttctggagtgattttcacagtactgataccacagctgagatgcaggcaggacaggcacgatgatgacaggcctggggcagccctgagcatgcatgcgcatgtgactattcacactgtttttctttgaacttctggttcatgtcctttgtcagttctttgttgttagtgtaacatgtttcagttgtacctgcttaaaagaaaagccactagagcaaagagatatggcaagggcttcaaaaaagctctaatttcagacaggtttcatactgatttggagtctgtttctgatggtgtcaatgcatcttgtgtatagcagcccaggcagcatgttaattttttcttttttattttattattattagactttaagttttagggtacatgtgcacaacctgcaggtttgttccatatgtatacatgtgccatgttggtttgctgcacccattaactcgtcatttagcattaggtatatctcctaatgctatccctccccccaccccccaccccccaccccccaccccacaagagcctctggtgtgtgatgttccccttcctgtgtccatgtgttctcaatgttcaattcccacctacgagtgagaacaggcagcatgttaattttctagcgtccccatggtgggctggctttttgtacatttttgttgacctcatgtggccaggtgacccgacactggcctctggctggcttcatggaggcggggcagggaggaagcccaggcagtgctgagggactggagctgctccctgggctgtgctgcagtagggtccctccccgaaaccctctgcatctggaatagtgcctatcagtgcaggtgctcagtgaggacttcgttggaaggaggacagaagcatgggctgtgcttgcaggaatggcctcactgaaccctcccaacagtccctggaggtagctattcctggcccattttataaacgaggaagttgaggttcagagtcctgtgctgcaggtcacacagacagggggcgtcggggccagggttgcagcctggtgtgcctggctataggggacacacccttggtctgactgctgctcaggccgacgtggcctcagcaacacttgctcatcttgggtgtgaccagacttcttgtggctggcccccaactcttcccagatccttacacacacttccttgactcagatatcaggaaggctgggatggaggaaggtctggggttgttgaagaaacagaatccggaatgggggatgccaagaggagatgggaggaacatgagtccaatcctctgtgaccctcagctggttactgactctctctgtgcttcaatctccttatctggaaccagcctcctccccttatacaaaggcctggaacagagcaggctcctctgatcccacctcagactcagggacatcttgcaacaaattggcttgtattggctgtcaaaactgagagccttctggggtgctggagagggctgaggaagggcatgagatggtgtgctctcccccacctctggggtttggcttccaggctgggtgtgccctgggcagtatgttctacgtagtccagctgggggtgggtagtggtgtctcctgggggataactggacagactctgtgctctctatcttgaaggaatgtgcaaaggaggacatggaatgtccacgtctctgaccctctgacctctcgcagggaccgcaggcagcctgcaggccttcccctaggctgagccatgcagagggactctggaaggctcccagagttgctggaaaacaacagttctccttatccagcgctttgccctgcctggcctggtgctctgtgctggacacgtgggtgccattcattcactttggctcctcgatgtggctgtttctctggtgcacctctttacaaaagagaacgtgaggcctacagaagcgagcatctctctccaggtcccaggctggtggctggggctatcacgtgtagagctgagcggctgggcccaggcctctgccggcctctctgtgtcacactgcctctcttcctcccctgcaggagtcaggaagcgtgttctctcatggtgctgtgtctccgttgtctctgcatgcttctgtctgtcccgtctttgctcttggagcagaatgttccctcacagagctgctgttaggggctctctgtgacttgggctggggcagcccctgggcacaggaaggaggtggccacccccacatccgccccccccacccccacctatgccacgctttgtgcgatactgtcggccacaggcagcaatgatctccctggatgcattcagggaccagccgaggaactgcttacagactggctatcaggtctaactggaagatgagccggaaggtagaggagagtgtgtgtggccaggctgctgtcaggttgaccaggtgtgtccagcattggctccttttggtgggttcttggtctcgctgacttcaacaataaagccatggaccctcacggtgagtgttacagttcttcaagactgtatgtctggagtttgatccttcagacgttcagatatgtccggagtttcttccttccggtggggttgtggtcttactgacttcagaagtgaaggctcagaccctcccactgagtgttacagttcttaaaggtggcacatccggaattatctgttcctcgaaacgattcctccccgtcggttcatggtctcgctggcttcaggattgaaactgcagaccttcgctgtgaacattacagctcataaaggtggcgcagacccaaagaacgtgcagcagcaaaagctactacaaagagcaaaagaacaaactttccacaccaagcaaaggaaccccaactggttgctgctgtgggttcgagtggcctggttttattcccttatttggcccctcccacatcctgctgattggtccattttacagagtgctaattggtctattttatagagtgctgattggtcagtttttaccaagtgctgattggtgtgtttacaaacctttagctagacacagagcactgattggtgcatttacaatcctttggctagacagaaaagttctccaagtccccaccccaaccagaagcccagccagcttcccctttcagtgggaagcaaggtaactggggagtgctagttgagggtgtgtttatgaaacggcgagggaggaagggtggtgaagcagctgggctagcagggcaggagtgcccataaccacaaggaaagtcacaggtcccagcagcacctggcccgtgggagtagggtcagcacagctggaagccagagggggcaggcgtgtgggtgcaggccctaaacagcagttcctggaggcagagaacaggagcctggaagggggtgcgagggatgtgtgctcactcactggggtctagaggtctggctttaaggcggaatctgaaaggctggggctgggtggaagtccttaatttggcttcgttttctgggtccttggagtgaggaattccaggcccagagccatgggatttcctgttgatttccgacttctctaagactcccaaggtctcgctcatgggcaggcactggaatgtcctccctgccaccttgggtgtgtgtttcagaagaggaggttcacagtgttctcccggaaggaaaccaagcctgtcctagtgaagccctgcccagccctcgagggtggcttggggcggccaggctccaccttggtggcctgcctggctcgccccgtggagaccagcagggagctgggagcactgaggaccagccgctgggtgccgaggcctcctttcttcttggtttcttcccaactcctgttgccaccatctttgcttccttgcccctctggcctaaatgtgggctcgcatggtggctttggtctcctaagcaccccagagggcaggccaaggtggacagaagcccagcatgcccagaaagcctggttgaatggccttccagacagcctctgccacatgggtccctaagcagagaagaaaggacagcctgggtgcccctttcaagtttccagtccatctccatttcgcagcagcctcctgtgagaccctccgcccacagcccatgcccagaccctaagcgcagccctgtcgtccacccctggactcatcctaaggcccctcttctctgtggttgacactcttcagactggccctgcccagattgcaggccgcagaacagcccgacaggagcctcactcaccaagcatttccctcatgatgtcgcggcagtgactgctgggtgggattcatcctgggaggcagagcaggcggagaggtattcccaaaggcactgcactcgagtcctgccaccacccggctgcaaccaggcagacgttaccagctggttgcgtcactccccagcgagcctgatgctccctctctgcccagtcttccaggaatccactggagttgacacttgagacagaacccacgttctcccttcctagcaaaaggtgtggggtatccggttctttgaaggtcgtagaggcagttggggtgtttaggactacatcctgaccctgtttttgagtctaaaaggcccctcctggctgtgccgaagggccctggggctggactgattgcgggcctggctcactgtgggcttttcccctgtagttcgcatttcacccctcccagaaggaaacccaccactgactctggggacaggcagtgcccagtatggatgagatttgctccccctcaccacactcccgtctcgtctcaaagattcatactcttgtcttttttatttattttttattttgagacagggtcttgctctgttgcccaggcctgagtgcagtggcactcagcctcggcctcccaggctcaagccatcctcccacttcagcctccagagtagctgagactacaggcttgcaccaccacacctggctaatttttttgttttcttgtatttttattagagatggattcttgccatattgcccaggctggtctcgaactcctgggctcaagggatccgcccaccttggcctcccacagtgctctggatgacaggcttgagccattctgcacacgcacccagctaccctcttgcctgctctgtgtttgggtggttatgtgtttattggaggcagtcagtttgaaactaactcatggtgcagaggatggaaccatggaagactgagcagtctggattcaagtgtggaccccgctctgctgtgtgagcttgggcaagttactcaacctctttgaggcttaggtcccttttctggaagaggccataataatagtagctgcagtattgccctggggattaaatgagagtgtgaatacagagccgctcacctgtgctgggtggtgttctgtgtgcgagactctctggtccctgaagaaggggtaataggggcccaagtgggagttgactgggcccctgacaccccaaggggtgggcactacaagcactgagcagcctggaccctgggttagagcgattttcctgatcctgcagagcgtcttcactttttaatacgaggtgtgtctgtcgggcgcaggcccccgcgtgtgccccatctgcacccctgaccagctctgactcactcctcctgtctcctgcccccagcaatatgtcggacgccttggccaacgccgtgtgccagcgctgccaggcccgcttctcccccgccgagcgcattgtcaacagcaatggggagctgtaccatgagcactgcttcgtgtgtgcccagtgcttccggcccttccccgaggggctcttctatgaggtgaggacactactgagggctttctcagacccagctcggagtctgccctctatgagcgggtgggccgggctccatgcagtggtcccgactggtgacagggccaggtctggagccagcccagaaccaggcttgagctcctgcacgggcccatccttcacctgtgagatgtgaacagcaccccaggtgccctgggtgctaacagagagccacctttcaccagcctcctctgggcagatgctgggcaggccctgggggcaggaagagcctgccctggtggtgcttgccctccctggggactagacagtgagcacagcaaccgcatggcccaccagctggtgctgatgccctgggggtcagggttcccggggtggggtgcggtggtgctcagggaaggtgaggtttgggcacacctgaggggagggagacatactgggcagagggcaccgcatatgcacataccctgtggtgggagaacatggggtgtatggagagcagtaggaagactggtgtgatggaagccgagggcatgagagggagaaggccaggagctgaggaaagggaggtggatctcgcttggccccacgggcctctacggagccataggcttcccctctgcaagaggcaggagccacctcggggtgtggagcagaggagtcacactatctgctgacatttgaaaaggtgacctggccgggcgcggcggctcacgcctgtaatcccagcactttgggaggcggaggcagatggatcacctgaggtcaggagttcaagaccagcctggccaacatggtgaaaccctgtctgtactaaaaatacaaaaaatgagcctggcatggtggcaggtgcctgtaatcccagctactcgggaggctgaggcaggagaatcacttgaacctgggaggcagaggttgcagtgagccgagatcgcgccattgcactccagcctgtgggacagagcaagactccatctaaaaaaaaaaaaaaaaagaaagaaaaaaaaaaggaggcttgtggccgctgtgctgaggagaggatgtaaggcggggcaggaacagaggctgggccaggaggctggggggaccaggagctgaattagtgcaatcacccagatgaaagtgaaggggcccccaccagctcacaggagcagtcgttaaatcatcaacaatcttgggagctggttgggcaacagagttattgtttaaaaattaaattatatcagcgtacaatgggatacaattttattaaaaacaaaggtaacaaatactcaaagcataccacttgctaattattttgttccactttactatcgtctatgctgatggggttatttctgtccattgtgctggtgtggccactgcacatctcccctcaagtccacatcgatgtcatgttggcagccaggagttggccatgacgggaatattcacaccatggacactggcaaacgccccacagcagggcctgcctctgcgccccagagagctggctgttgagcatttaccagaacatcacttgtgcttgtggtggcggtggtggccaggggtcagatgctggctctgtttcaaggtagagctgatgggactggctggtggatggatgtggggcctgtggtccgcctggcagagcaagagccgctgttcctcacagtgtcttcagcctcctgaggaatgctgtctaagtgtagaggcagcgggaggggtgggcaaagctctaggaggggtggccatatgcccagaacaaagcctctctctctcacacacagcaggtgcccagaagattttcattgctgaaagagtttaagcccttcctgactctacaggtcactgggtagggctatatccagtttagtctaataagacactcattttagagaacagggaaaaaccaattaaaaaacagaaaatacaattgttagaggaaagcagaggcaggctttggccccgcttgtggccagcacaggggccctcgctggcagctgccgcctggagggtgtgcacactggctcctgctggccgcagccctgagctcttcccacttccccgtgcccaggcccttcctgcgttcccttccttctgtctcctatacccgggtcttcatggcctctgagagagctggatactcccacagagaaggtatacgaaataggaccaagtgacactacacttcagactggatctcatccctcctggcttaaaaccgcctcgcccccagcctgttctccggaccaacagggtccagatcctcagtagacaccagtggccctttgacaggtggcctcacggacctctccagcttccacgggggcacctccctttgcaccccaccatcccaaaagggccagtgtcctctctggccaggcctgggacccactgctccagcctcagcccggcatgcccctgcctcagtgcctcatcccctgctgtcaggtcctgacccaacaagggcctgggctgctcatggggatgataggtggtttgcttgtcctctctctgcgacccctttgcagtttgaaggccggaagtactgcgaacacgacttccaaatgctgtttgctccgtgctgtggatcctgcggtaaggccggtgacagtacacatcctgggctgcctgggaagtgggcagcagtggcggggggcagggggccgagggggtacacagaactggcccagctctttcctaactccccaccttgcctctctgagcggcagccgtcaggccccctacaggcatcaccatcccacgagggagcccatgggccaggcagagagcaggcggagtgctaggtggacagggcttgggagggtccgaagaggggacaggcacgtgctccccagccagcagggacctgtcttcttccaggtgagttcatcattggccgcgtcatcaaggccatgaacaacaactggcacccgggctgcttccgctgcgagctgtgtgatgtggagctggctgacctgggctttgtgaagaatgccggcaggtgaggtggccgtgttgggccagagaggactgggccacagcccttcctggcacacctgccacctctcctgtgtgctacccacttgctgagggcgcagaagggtcccggtgctgcagcctgcactgatgtagctgccctccctccaggtcaccccggggcggatagtccagctcccagtttacagggccccacgctcagcgagctcctggcagcctctcgggagccatgagaaatcctcacactctgccacccccctggccaccccatctactgaccccacctgtccaccttctcctgcctgtacctgtgcagctcagtgtggctggagggagatgcccacatttactctaaattgagggccacaaacctcatgggtactccagaagttcccaccttctgcgaacccttggtctctcatcctcccttcccaagcactgtccctatagcaggtggccttgtctcccacctcccctggccctagctctgagatcccgtgcagcccggcctctgtctgtgagccctgttcatccccacactttctccagggcttgcttctccacgccactctctcgtcctttctgaaggactgggctggggagctgggttaaaaacactgctgggccttcctccccggcttctcccagcacacccgctgcccctcgcgtgtgctaccctggcctcatctgcccagggacccacacctcctcttgacccctcagcagccctcaccacagctgctgaggtgcagaaacgccccccttctggcacccgggaccctgagttcctgtggttctgcccgcccccacagctgcacctgctcactcccctcctctgagtcacctttctccctgtctctccatggggagtcgtctggggctccgtgcccggccctcatggctgcccttgcagacagaatcctagagccctaaatggcacatgtgtctggagaattccaggctccacttcaggcctctctctcgctgtcctcagctgcccacatgtcacctccacttggtgtccaccaggcatcccaaacgcaatgaggcacaagcagtttgggattctcctccactgaccaccaaggctgcctctgcatgcgtcccctgtatcagtgagaggcagcgccgacccccagaggccccagccatgcttcccctgccacactctctctgtccgggcactctgctccctcccgcagctcctccgagatgcttccccgacactaccgagctcttgtccgtgtgctgcccgtgagagaggcacgtggcctggggcctggcgtccggcccactgtcctcggagctgggcggtgcctggcattgagcagcttgtctaaatgaagggctgaggggcagacggtgcagtgcaggggccgagggacagcaccaggagctcgtgctgaccagcaacgtcgccgacagggtgtgtggagcgagcccaatctccttcctgagccaaggtttgcacagggccactgccccaagggctggttggggaaatctgaaagatgctggaaacgttttggaaagtcaaacatgctacaaaagcatgttgccgtaaggacggtgcagggtggcagctagagtgaggaatgagggcccctacttggccctcccagccccacagtgcagaacctcagaatctgggcagatgtgctgtgagctgccagagccccagcaagagagcccacgaggctgcctctgccactgtaccaccacttcaccattcttgggtcagagaagttctgggaaacgcttcatgttgaccaaacataacaacctgtgtagtcttaaagctacagttatatttatggtccgtacaaacaaatacaaaaaaggacatgttagggaaatatctgcacactagcaagggaaatagctcaggcggagagaggcctctctggaggaagtgggtctgggtcagtgggaggcaggtgcacagcccagccctggcctgagctgagctcccgtgactgcacatgcttgtccaggactgggaggcctgggagcctgtcaaagagctctgggggttgcaggcttgtgcgtggggttacagcaggagagatccagaatccagagctgtgctgagtccctgcaggccgtgagtgctgacgtccgctggcaaccagcctgaaatgtgtggcctgtgtctcttcaactcaggcagtgtgtgtctggcagaggcactacagaggggactcagagtaccttgcactgcaaaggagtattgagactccctccccgtccccaccaggactcccaggtccctcttctgggtcatttgcagcctgccttcagggtctttctgctgagcctcgccgatgagcgattctgtagcgggaaggaggctgggagcctagcgggaaagaaaggcctccattgttcaggggttgttcttccggcctcctctctccctgccacagatgaagtcgttgagtgtctaggagccattgtagccatcacaagcccctgcagaggggtggccgatggatcccctttgtcagttcttcctttttatgggttgagactaggcgatctagagaaatggtgggcatctgctgagatttcaggttgcttgctggggaggtggctggggaaagggcagatgcctcttgctgggtctgctgagtcctaaacagtctgcgctcggcctggacggcgccccccgctcacagctctgacttggcactcagcgagctctcgttggttttcccttcgaagctggggggcgggcccttgagccttttgccacagagcaagttgcacagggcgtggcggaacttctcagccacgaagaaatacatgatggggtcgagtgccccgttgaggctggtgaggcaggaggtgatgcggtttgccagggccaggatgcgctgggtggcgcaggaggccccatggctgcggtagtgcagcacgtagacggagcggttgacgtggtagggcacgaagcagaccaggaagatggccagcactatggcgatcatgcgcactgccttggtcttgaggcgcttctccacacgcaggccctgccgcaggctgcggatgatcagcaggtagcaggtgaccgtggtgatgaacgggaaggtgaaggccactgccagggacaccagggcatggtgggaggccttctcccggtacagctgcaggcagaccaccgtgtggttggtctgcacggtctgtgggctcaccagcagcggggccatggccacagccaccaccacccacaggaaggcacaggccaggtgtgcgtagaggggcctgcggagcttgagggacttgaccgggtgcacaatggccaggaaacggtcggcgctgatgcaggtgaggaagtagatgctggcgtacatgttgaggtagaagaggaagccggtgagacggcatgcgatttccccaaatggccagtggttcccagagaagtggtagaccaggcgggtgggcaggaccagcacgcacgacaagtcggccacggccagatgcatcaggaacacgttggccggggtcccggacttgtggtctcggatgaaaagccacagagccagggtattgccaactaaagccaggataaaatccagaaggtagaaggaggcgaacagcatgttctccagtggcgtctcctggccacattgctctgccgtggccagggagaagttggtgatcagacctgggggagccacttcaaggccattcatgctttggctggagtcagagcctggagggaacaagcaaacagttcacaatgagcttgcgatctaggcagcttcacgctctctgaagtccagaagtcaggcctccaatgccttcagaacctcccactttcaagctcagcaccgcccacggggctgctgaggggacctccttgtccatttggtgtgcgtgagcgtcagaggcattctgaacttcagcacaaggcaaacgcagaaccagggcttggaatttcgccgctatgcagctgcacccctgccacccaggagatctgaggctcctcagagctgggaggaccgggtcagtgccatggcggggaatgggacgtgagccttgcctgggtgaggctctgggttttctgttctgcctctgaggtgtgctgtctgagtgacaggggtggtgaggggcgggggcagtgtgtctccgggattccagctcctcctcagcccaagccttggcaggtgagttctgttcatcctgagtgcctggaccctccctgacccacctgcccacaggtgcagtggccggggtgtcaccgctttctgcttcccctgaccatggcttgcccctggcacttaggagggtgcccccaggatggcagcaagggctgtaccctgggacgtcagaggtctactctttttacccacctgagagtttcagcatctctcttgggggctttctggatccagcccaccaactccgtttggacatcctgacaggtggggagacctgtgtttaggagaagcctgtgcctgggtatcaggccagctgggagtattttctctcccagagtagatccaccaccagggggcagcatctcttccaggaggggaagacccattttacccagcgtcagagacactggccagcgctgttgaggacggatctgcagccccagagaggcctggaggcctcgtggcttgcccacgtttgaaggccaagtgcagagccctgtgacagtcctgggtaacaagtcatgtccgtctggtgaaccctgggtctggatagggtgctccccaccctcagcagagaaacccactcttgttttgattttagtcaactcagaagattgaagaaggagagtgagggtcccaaacactctgcctccccaacccaggcctgcgagtggcagtgtgggcaggcggtggggccagagcagcccgcagcccggaaccagggcaggacagcgcacctggcctgcctttgaattggggtcaccagcgggcttcggccaggtgggtgctgatgatggcacagcttctggggctcctctgggcacctggcttcccagtatccaccatccccaccctgcacagccaggctgaagcagaggctggagagaggtttgcataagagaagctggcatcctgcctgtgcccattgtggcagcaggaggggaggaggcacgggccacagccctggcagggtcctcatcctgggcgagcctggctctgcaccgaacagccggggtcctgcctgcagcaaattcactctgcacatttctccctgcccttccttccttccttccttccttccttccttccttccttccttcctaccttcctctctctctcacttcgctttgcttgtttgcttgcttttctttattttccttttttcttttcttttttctttttttcttttctttttccttccttccttcctttcttcttttctctttctttctttttctttctttcctccctccctccccttcctcccctcccctccctcccctcccctccctcccctccccccctcccctcccctcccctccctctcttttttctttttttctttctctttttcaaggtctccctctgtcacccaggctggagtgcagtggtgcaatcagctcactgcagcctcaacctccagggctcaagtgatcctcccacctcaacctcctgaatagctgggactacaggcgcacaccaccacacccggctaatttttgtattttttggtagagacggttttgccatgttgcccaggctggtctcaaactcctgggctcaagtgatcctctctccttggcctcccaaagtgctccttggcctcccaaagtgctgggattacaggcatgagtcactgcgcccagcccctctcctcttactgattccacagggctgtctcaggatgctggtggcacggggcagagagggcatggtgactgttcatggacacagcagcccctcgaggaggaggctggagccatcctcatatggaggagaagcaggcatggtggtggccctagccctagggaagggtgggccgcacccttccttcaggagagcgagtggccagctgctgtggccctcacatggagggtgagggctggcccgagcacctggccatcaatgtcctcaagcaaaggggagggcaactacctaataatattaccttttagctatttctctaggcaggttcccctacctgaaaagattgcccccggcttcagagtgtttcaagatgcctgaagttctaacaccagagatggtttcctgctgcttccaggaacagggtctgttcttagtccaatgtggagttcctcatggggaccccattccccaggaatccaggttccacagtactctgacttggtctggctggtctcggctggcactttccctaggactgctaaaaccacggtgagggcggagagctgagggccgaagaaggcggggtgagtgatgcttgggagagggagacaggcttggctgaagccctggggaagggctgagggctgtgaagggggctgtggaggagaggtaaaaggagggaggaacacagcccttgacagggcctgtgaggcaggggagaacagggagcaggtaccggtgggacggtggcaggggaggggggcccatgactttgagggtgtcgtgttgcatgtgctgggggtgaggacccggagactggaggaacagggctccagggcagacgcatgggcaagcagagaggacagcccatggtagatgggaggggcacacaggtgtgctgttttcaggttggcaggagaggaggaaggtgtgtgcggggaggccctggagactggaagaggagagggggcccagtgagtgaggggcccttgttagaacctgggggtgggaaggggccaaggtgggtgccctccaccccaggctgtccctcaggcctgtgctgtgccccacagtgcaggcatcacctggccccacgagagagcagctcataggtacgactgaccactctgcctggcatggtgggggcctgcctgtgctggctcaaaccagttttagccccatgttgcaggttagggagtcaaggctgagtgtctgctaacttgtcttaggtcacttgaccaggggacattggccctggagctggaagtgagaccggggaaacggtctcactccctggaagaccgccagggtggggagtgtgactcagtctcagagtttgccatggagttgtctcccaggctcagcaccccctcctggccctggggccactccctcattttaggggcccatgtatgaaatgagaatgtgcagccccttgctcaaaaaggaagagtttcaggacagtgacggcagagtgttactgggctcagggccctgagtgacggcaggggtggcatatctcatggcaccaggtgggcctgtggtgcctcctgcctccagcccgggggcctcagcctgggcactgccctccacttcctgcccgggccgaagggcgtgcccctcgctctctctgggactgagactccattttaaacagctttctggttggtttcaggtttgctgaggtttcttctccctttctgtcccccgtttgaggagttctgatactgattgttgcagtttggtctgagatgggccccgcttcactctctgttgccctttagaaacacaaacttcagtctagactcgctggttcctcacgactcactggtcagacggccaccgagccggtgtccgtaagaggaaagggcgtggcatgggccggggcctgggcagtgttgggtcccgtggctgtgggtgagtcgagcatctaggacaggtcataggcctctgtggaggtggcaggtgggcatgtgtggcctcggggagggcctgtggtggcagcgccatggccaggtggtggcagtttcctttgcattagcgccactccatccctggcccgagccctctcccaggcatctggctcctctatgggtcaaggctgcctaatggttaggggcagcggtgctgtcattgcagcctggactgccggcaagccacttcccctctgcaagcccccatcagagggacgaaacaccgctttgtgggctgctgtgaattcagactgtggtcagccttcgatgcacaggtcagaccatcaccaaagagatgggacgagacaggctgctgcctgtctccctgggcagggctccccgctgagtgtttcctctgcttagccctgggctcccagtccaccccacccagcctgccccttacctctagctgctggtccgggaggaagggacaggggtctgcggggcagcaggtgatctccgcccgtgggtgtcggtggtggcagggggctccttgccgctgtgggtggaacgctggctatttaaggagaggaagggagaccacagcccctctggccctgaaaggctgcttcattcctgaggggtcccttgttgtgtcgggctgctcctctggctgctgctgctgctgccaccggagcgtgaatattctagtgtgtccctagcccatgccccccgcccccagcttggccacatagtctgagtgtgtgactgtctcagagactcagagcaggcgggggctgggtggggggcttgggctggagctgagggacacaacaggacgtttcagaaggggatgatttcctactgatggggggcagggaggggccggctgtcatggcaacaggcggcgctcccaggcctgcgcccgcagacggcggagggggcctgtgaacggagggtgggaggccgaggagtcttgctcacggagtgagaggcgactctttgaggacacttgctgtagggtccttgtgtcctgccctgtataatgaggccccatttgggcacacagaataaatcatggcctttatctggagcgaggaacagctgcaggagcctcataatggggcgctgtcctgtccgtgaggatgcggctcagctcagaggccgggtgctcgccggtgcagctccccttctgcacggaagcccatgaatctgaccgctggcctggggctcctccctggggtggctccgggctggggtgcctttgaatgctgccggcggccgcctctgagactgagtgaacaaagttcatttctctctgtctttctgaaaatgatacatccagcaacatgggaaaccaaatcacccttcctggtttcaaaagactttacattttgttgtttaaacattgaaaactgtatgtatgtggctagcatttaaggggcagtgtcttaaatttgtctcttcacatcaccctgtgcagctgggattattgccccattttacagacaaggaaactgaggctcaggcaaatgaagaaactcacccatcaacaaacagtaggaagcaacagagccaggatttgaacccaagcacatgtcactccagaacttaggctccgtgtgtgtgtgtgttttgtttttctgctgcattttgaatttagaattcttagatttgatcctaattcaacctgaaaaagaattctgaaggccacctttagatctgatgctgtgatctggtctgttgagaagctgtttcccatctggacttccttcaagagagatgggcttcccagtttgtctggcctgagagccagctgggtgtgaggtgtctgagccggggcgcaggtctctttcctgttgtgcccgcaggcggctgtctggaagaactggcccaggctggttggaaaggtggtggcttgaagctaaccaccctgagcagggcatttctgggctcacagaccttctgttattggggtgatcactgtcgatggcttcaagggcattgaccgtggtgatggagttttgaggcgttgagctgattcctgcatctttgagacagaaataattcctcgtgggttgagtgttgtcctgacgctcaggaggagtcaccagaatgtggagtggggtcatggggcctacatgctgagtctgggacagaggcaccgcagggggcatgggctggccgccataggcgccaggtggggcagctcagccccagacctgctgaggaggtggcctggggttggggctggggcacaggtgtctgggcaagggtgggcttcagggattgtggtgatgaagactgaagccacaggccacaactgcttcccgtcgctggggtgtaagagccagggctctggccagtagtcgaggggagatgatgcccaccgaggctcccttcctctcttgtagagtcattcattcaccgaggcattcggtcagctgaccctgagctgttgccccctgctgggcacatagggtcttggggaggcacagagagccagtcggcagcttagccagtgactgctgggcctttgtttgggccccttgccctgcacacagctgatgatgagacaccccagggcagatggagcacagtgctgtgcaggatggagtccagacacccagcagtagcaggtcctggggtccagggagggatgctgaatgggtggccctggcatctggggtctgcccaccataacctgggtggggatcttgggtctgcgattggatctcttccgtatcctccctgaccagcctgtcagaggggccaacactgggcgtcgggcagccgtggaggctcgtgaggagtggagagggcccctggggctggggggcctgggaagggaggcctggatgcagcaggagcaccagagagagattcgggtggcaggtggagacgggggccagggaggttggattggggcctttgtgtatctttgcctggggactctgaatctagattcctgccacctttgaggtccaaggaaacagaaaccatgttgatttgtctctccgttgagaacacagctgtcgtccaacacagcgagtagcatcagaaattattctgaggtcttcacaaaaagactctgtagtgacagttcctgggtttgggggcctccatctgacatagcagtgcttgtctttggagacagaaatcgcctgtacgtgtttgggcccttcttcatctggcaaaccccgaaggaagggggtgagtgggcctcccgggacactcactggccactctgctgggcacagtgacactcattataactcgtgtgtgttaaatacattgggaaaataatgctttcagcagatatcaattaaatgtctactgtattctgcagcatgccccaggcttagagaaagtagaaagaggaaaataccatccagagacagtaacctcgagcattctggcatctttcctgctgagcatgcgtcccattcccaggacacacttgtgaccttctgggccttgtgacagggcagtctgctttcccataccctgggctgagcccctttgaagcccccagctgctcagtgaagttgcaggggtctggcctctcttctcctggaggtggccaggctgtgtgggagtgggggctctgcccctaatgcccccgcctcccgcaggcatctctgccggccttgccacaaccgtgagaaggccaagggcctgggcaagtacatctgccagcggtgccacctggtcatcgacgagcagcccctcatgttcaggagcgacgcctaccaccctgaccacttcaactgcacccactgtgggtaggtgcgcagcccggccctgcagttgtgggggcggggagccagggctggcccagggtaagggcggtggggcctccacctggggaagtgttgaggagggagaggggagcagggtgggcagacagaggggtcccgagagcaaggctgcagggcagaggtgggctgggggctgggaagcagccatggcaggaagcttctctctccagggctctgtttggggggcacttgagactcaggaggcgggtgggctggacccctagactgcagacgagggttgagatggagcagtggaagggacctgagggggcagggcaagagaccgggagtgggcttggtgctggtgttggagagaggagttgcataggcagcccctcagcccccgtcctcgcccacccccaccgtcccctccagtcctctccgtgcctatccagacaccccctctggtttggaggaggaggggggcccaagaacagacctgcttctcagaggcctgggtgcagaacacagcccactcttctgggctgtgcaggaagtctgtgctccagggcctgtctggggcacaggaagtcttcaaagtgcccagagatcagaaggcgctgccgcctcggctctgcagggacagaatgggcccctcggggagccgtgccctggggtggaggcgctgctggcatgaccctgcagaagggcaggggtggcacctgggggctgcacgctgtcttccaggaaggagctgacagccgaggcccgcgagctgaagggtgagctctactgcctgccctgccatgacaagatgggcgtccccatctgcggggcctgccgccggcccatcgagggccgagtggtcaacgcgctgggcaagcagtggcacgtggaggtgagccaggctggtggacacgtggcctcaggttggggggtgccccagctcagggtcatggtaagagccctaaagctcctccacactcccagcccagggcgggtggctggctcccaacgaggcccttcctcaggggtactgcccctccctgtgctcagccagggaccccagcctgcccacgggagccaggagacccgagtgcacacacacggttgggtagctgtgcccacctctcctcttccccctgctggcattctaagagactccaaggtcaggagaaaaccttgggggcagtctgtccagagtgcctgggggttgtggatgacagaacccgctgcatggacagccctgtgcagacacggagctgaagagttcctcaggtgtgagcactgggtcacctggagtgcccccaccgggtggtgggctctcatgttctcatgggtacactgggaacagtgagcccaccacctcccctgatgacctggccagcgctgtgtccggaagctgtgccttgggtggcggcttgggtgggaggccatgcggtcctgccctgatgcaggccccagcccccagccctcatcctcacatgcagatccctgggggaatgcaaggtgctgctcagtgatcccaggcttgcagggggtgcctgcaggaggccccacgtggacaggcagggccgcctctgcctatgagggcccaccatgccgcagcaccaggctggcacctgactcctggggctgaggctgccgagggggaggccagactgggaggggatggtgactcacaaggttaccatcagtgccttagaggaggggtagggtctgctgaccccagggcattcacagaggtgtcagtcccctctgcccagtgtgaatcctgaaaggcctgcacctgcccagactctgctttctgtccccttctgtcactgctgcctcctggggccactgtggtcccctggagtcactggctcctggggtcactgttgtccccgggtcaccactgtccctcggggtcaccgctctagccctgatgccacccggcccgccctttgtccttgcagcactttgtctgtgccaagtgtgagaagccattcctggggcaccggcactatgagaagaagggcctggcctactgcgagactcactacaaccaggtgagcccggtgcagaaccttcagggatgcgggtctggaggggtggccaggagagctgccgtgagcaagggaggctgtgggcaccccctcaggagctctgccaggtgctgagcccaggcctgcaccctcagccctggctcctggcctggggtctcgagacctgggcagctctcttcagtctcagtgtcttcctttgaagaatgttctggggctggtgtgaggtcccgggcacatggggctgacagtgccagcaaccccctccctcccttgctctggtacagaaggcagggggcgctggtgggatgcagtcaccacctgggcccacctccttgcaggacagcagtggccagagcagaggggccttctggggagcaacgccccagcctgttgtccttcccggaagggtggttctcatgggttgccgtgccctcaacccagccttgcagctgggccctgggaggcagggcctgggagatgcctgagaggggccgtgttggagggccaggctggctgcatgatggccctgggctggggtgtgactgcctgcagctactctgacagcctgctcggcccacagctcttcggggacgtctgctacaactgcagccatgtgattgaaggcgatggtgaggccctgtgttccctcccccaccccacctgctctcctggggcctgggtgctgcagctgtgagcccagccgggcctgcggcagcctagccaggcctgctgagtcccacgcttccctcacagtggtgtcggccctcaacaaggcctggtgtgtgagctgcttctcctgctccacctgcaacagcaagctcaccctgaagtgagtccctgtgatcgtgggatggggctcagggtggagggggctcctgcaggtccttcctctcagcagccctcctgcacaccagctgagtctggcctggggatatggtggggacaaggggcagcccggccttataccacccagggagatgggggcaggttcagggggtctaggggatccagggaccccagggaccccaggcacagtgagaggaggaggaacactcatgcctccaacacacctgccagaaccctgggctctggggagggaagggcattccagctcagggaacagcatatgcaaaagcagcagtgtcagctgctcatccaggaagcctcgaggggtgtgggatggctggagctgggagaggagagatggcgtccaggtttccaagggctgtggggaggcatagagggttctggggtttcagaacctgagagaagcctctgggaggcaagggaagcctcaaggcccttctcatccctatgctctctggccatctcaccctagggcctggcctgctggctaggagaggctggtgtggggaggctgggggctgagggaagcccactccacagtcacctgtctggggttaaaggggtgggcgtggggctctgctgacagctcagcttcctcctcaggaacaagtttgtggagttcgacatgaagcccgtgtgtaagaggtgctacgagaagttcccgctggagctgaagaagcggctgaagaagctgtcggagctgacctcccgcaaggcccagcccaaggccacagacctcaactctgcctgaaggccctcttgcgcagctgcctctcggcccctccgccttctcccctcctgctgtccatgcttggccccctcgtccccatccacctgtgccctccgcatcttaccctccctttctctttcctcattgccttctcccttcctgttccctcatctctgccttccccatgtctctcctctccttggccgtggcttctgtctgtgaggaggcaggagctggggagtgggagcctatgaccccacgtctgacagccatgtccacctgtgcccacagcttccgcccacagacctccagggacaggagcaaattgcaccacagctccccgcctggcctggccctccccaggcggctcagtggctcatgctgtcctgtgagagcccctgccccagagcggccccactaagcgcatgtggctcctgggctacccacagccagggcagcctgctggagccacagggccagggccatgcagatggaggcctctgggagccacctccaatccctcaccactcactcaaccagtggcacagtgtccttgtgcccacactgagccagcaagtcctgctgtccacacccacaagctacctggagggacaggacccacctccatccttcggaaggccttcctggaatcccaccttggcctccgccctcggttccgccccgcccctctccccccgaccttggggcttgtgtcgagcccttgggtggggccaggaggaggtgatggcgtcagaggaggtgtggtcagaggtgacttgttcccacctccagggaggacgcttcgtcttcggccagcgcagacctggtgtttgtttgttgggctcacgcttgcacaatgaaggcttgttcacac

SEQ ID NO: 15668 - DNA, 35882 bp, Homo sapiens
aagtgcatgactcaggactgggtgggagggggctgtccctgaggccctggtctcccccagccaagtcctggcagggggatgctgttcttcaggatcccatgacctggggctcttggggagccccagcccggagagtgacctgtggctttgctggggaaaggggcttggagggtacagggcagtgtccaggattgcagtctcaaatccgaggcccacaggggagctgcctctgtgatcgccattaaggctgtggcctggggtctcagggcagcccaggaaccaaaaatagcctgtaacttgtcactttgtaagtcctgccctccagacacacttccctttcttctccccaagcctctcttcccagttagctcccctgacttggagtcacctctaagccttggcccaggcccctctgcagtgagatggagggactcatcccccggagagtggcatctgcaggcccactggctgcctgtggtcaccccctagggttctagcggggctgcctcccattttcctcagagcatccctgccagctggctggttctcactctcctgttttctaggaaaagaaagtggggagagacaggaacagggtccggagcagccccagcagcagcattgaggtggaggtgggtgagaggcggttccttcaggcacaggagggatgtcgaggagaacagagccgtgaagggtgcggggctggaatgggaggccccgaggtgccactgctccctggcaagggtcctcttgcccctgagtcccttgggcctttccctggagacggaggccgtcaggtgagcccggccggaaccgctgggaaggcaggtggtggcgagcaggggtcagccttcccttgctgctgtgggctccaagggcctgagaaactcttaccctcaaatgacacagggatgacagtcagcctttggcaggcactgtgtagggcgttcctcgtccaggcaatactactcgtcttagagaataaggagaaacctggaaacataaaagataacagaaacataaagagaaggaaactgccacagttccactcccaagagcctccctttatgcagttcggtggctccccgcagtcctttctcctggagtttgtttgacgcagctgtgagcgatctgagtgtaatgcacccgctccttcaaaggtgaccctgctgcccgcagtgctggtgccccactggcttccctgccttccatacacagggattgggccgggccagtctgtgaggaacagacatccaacccggccttcggagtgggcgagagttttcctgtcccagaagcagtggagtttcatttccaccgtttcatgctgggtgcccttccccacgtccactgttcccatgtgatcccgggcagctcctcgtgcctggatcctggttctctcgggatcccccatgctgcccagagccaggctgcttttgggaaacaccctctctgctcgcataccttcagggcttctccctgccagctctccctaggacctcaccaggcaagagcagagggagggctgtggggagccaccaaagtgacctggagtggcatgtgtggccatgctgtctgcagatgaacccatgggtgctgtgtggagaaagggctgctgggaaggagatggggaaggagacagaaggcagccactagggaggcctctcctgggtggctgagcgggtggaggagaggaggctgactcagggttctgggaggtggagtggacaggacccaactgactggctgtgaggtgggccacagagggtggggctcgggaggatgcccctcctgtgatgacaggtgggggtggatggcatgcttggtgtggttgtggagtgcttgaagagctgtggcaagtctgagggggagccgtgggaggcacctgggcatggaggggctgaagcccaggagtagccagctgggcagggagtgaaggcagcccagagcatggggtggcacgccgtgggaagagagggggctcggcctcagcagcaactcagggactttgcaacttacaaccacaagatctttgactatcacagctgaagggacctctggcatcaccattgttctacagggaggatattaaggccacctacctagggacccagctgtccctggcattcctggaaatggagcctgggatgttgacacccacggccacgtgagctcagtggcttggctgcataaagtggagtcccacccatggtgtgaccgtcatgtgtgtcacatgtgaggctgtcgtatgcctgattgtgtgctgagcccatgcttagtacagcgcagagcaggctgctagatccctgccctcatatccaccaatcttgcccctcctccgggtgaggagtgtgcccggtggtcccctaggcagaaggtgtcggccaaggggcagctgactgcagctagagccctcagcacagcacacgaggctgcagtggcgtcaggggcttaagcaaactgtaaagtgggtaacaagtgatgtggcttgtgatgtggcaccactgagccctgagccccagactgggccaggtggcactgccatggcccctcacctccttcctttttcttctacttctggtgctgactggccccttctagccggccagtggcataatagggatggagggactgatctgcagggtgtccagtcccgtggtgtgatacccccacctgggctcatttcaagccaccaacatggcattaacgctttacggaattcctgaatagttaacagtcagcacttgtgaactggcaagggacagcccagggagccactggggagaggagcccgggctttctatccacagcgggttatccttcttctgtctgtccctatctgtgctgtgccgcatgcaggctcttttttttttttttgagatggagtctcgctctgtcacccaagctggagtgcagtggcgtgatctcagctcactgcaacctctgcctcccaggttcaagcaattctcttgcctcagcctcccaagtagctgggactacaggtgcataccaccacaaccggctaattttttttgtatttttattggagatggggttttaccgtgttggccatggtggtcttgatcttctgacctcttgatccacccaccttggcctcccaaagtgctgtgattacaggcgtgaacaaccgtgcccagcctgcatgcaggcttaaccatcccttaggtcttcacttccaggtgggaaaggggccaagggaggcactgtcactgtcttgcttgttctgttgaggtgtagcgtgtacatttctgaaggtgaatatttacttagatgacttagcaggatgaccaccctagtgagatacctccatgagtgaatgcatatgtcttgctgagatgaggtgactgaatacacatatgaacataaaacctactgtgtcctcacccacgtccttggaggaatacacgggaaactcatggagttgtcttcagcctcccagcgaggagtctggtgggggagctggctctggaggacagcctgtttgtggcatctctgcctctgtccgtctctgcctctgcccactgggctgagggcacgtgccccagggccttggggaggcagccctgcctcatagcttggggcctcagttccagcctctaagaagccatgtagttgcattcttcattactcacgtgttttttaaaatctgagacatagttcacatattattaaattcaccactttagattgtaaaattcagtggtttttcgtgcattcacaaggctgtgcaaccatcaccattaattccagaacattttaatcattcctaaaagaaaccttgtactcatttgcagacagtcctcatttccccctcctcccagccctggccaccagtaacctgccttctgtctctacagatttgtctgttctggacatttcacataaatggagccatatattatatagccttttgtgcctggcttctttcatttattaacaacatatttccaagattcatccgtatattgtagcatgaatcagtacttcattcctttttctgggtgaataatattccattgtgccatagtttgtttcttccttcatccgtggtagacatttgcattgtttccactttttggctaccgtgaataatactgctatgaacattcccatacaagttttggtgtgaacatacattttctccttgaatatatacctaggactggaattgctggcatatggtaactctatgttaaactttttgaggaattatcaagctgttttccaagtaattgaacaattttacatttattaaattttacaccaggaatgtatgaaggttccaatttcccgacatccttgctgatgcttgttattgttgtccggtttagtaggtgtgaagtggtgtcatattgtggttttgatttccatttccctaatgactgataatgttgagcatcttttcatgtatctgttggccacttgtaaatcctctttggaaaaatgtccattcaaactctttgcccattttttaaatcgggttgtctttttattgttgaattgtaagagttccttatttatttgaatactagacacttctcagacatatgatttgcaaattttttttttttaagatggagtctcactgtgtcgcccaggctggagtgcagtagtgcaatctcagctcactgcaacctccgcctcctgggttcaagcgattcttctgcctcagcccctccagtagctgggactacaggcgtgtgccaccatgcctggctattttttttttgtatttttagtagagatggggtttcaccatgttggccaggctggtctcaaactcctgacctcaggtgatcctcccgcttcagcctcccaaagtgctgggattacaggcacgagccaccgtgcccagccgatttacaaatattttttccttttctgtggatcatcttttcactttcttgattgtgtcgtttgatacacacgttttaacttttaatgaaatccaatttatttccttattctttagttgcttgagttttttttgtcatgtttaggaaactattgcctaatcctggctcatgaaatgaaaacatctgttttcttctaggagttttatactgttagcatgtagctatccagttgtcctagcatcatttgttgataagactactcttcgccccattgaatggtcttggcactcttgtcaaaaatcagttgaccacaaatatatgggattatttttggactctcgagacagggtttcactctttcacccaggctggagtgcagtggcaagatcttggtacattgcagtctcaacctccctgggctcaggtgatcctcctacctgagcctcctgagtagctggaaccacaggtacacaccaccacacctggctactttctgtattttttgtagagatgagattttgccatgttgcccaggctggtcttgaattcctgggctctgcctgcctcagccttccaaagtactgggattataggcgtgagccactgcacccagcctatttctggactcttggttctgttctatgggtgtatatgtctatccttacaccactgccacacttacaattttttagtaagtaaattgtaatttttaagtaaggtgtttttttttttttttttttttttttttttttttttttttttttgagacggagtctcactctgtcacccagggtggaatgcagtggcctgatctcagctcactgcaacctccacctcctgggttcaagcgattctcctgcctcagccttctgagtagctgggactacaggtatgtgccaccacacctggctaatttttatatttgtagtagagatcgggttttgccatgtgggccagggtagtcttgaactcctgacctcaagtgatccacctgccttggcctcccaaagtgctaggattacaggtgtgagccactgcacctggcctctttgtttttttttaaagttgttttgattattctgtgtcacttgcattttcatataaattttaggaatgccttgtctatttctttaaaaaaggcaggaattttaatggagattgtattgaatctataggtcaatttgatgtagtgttgtattgccatcttaacaatattaagttttccaatccatgaacatgggatatctttatttaggtcttctttaatttatatcaataatgttttataatttcagtgaataagaagtcttgcatttattttgttaaacttactcctaagtattttattcattttgatgctgtcccaaatggggttgttttatttcatattcagatttctcattgctagcgattctggtatattgagtgtataccttgcagacttactgaactcatttcttatctgtaaatagggtttctttttttgaggagggattcttccgagttttctatatatgagtatgtaatatgtaaataaaaatagttttactcttccttctcaaactagatgtcttttatttctttttcttgtctaactgtccttgatagaatctgcagtgcaatgttgaaaacaaatagcggactggaaatccccctgaccttaggaggaaagcattcattttctcatcactaagtatgatgttagctatgggttttgggtagatgccccttatcaaattgaagaagttcccttctattcccagtttgttgggtgcttttattatgaaaagatgttggattttgccaaatgtgttttctgcatctgttgagatggtcatagagtgtcctccctatattctattgatatggtatattacattgaattttggatgtgaaaccaaccctatgttcttgggataaatcccatttggtcacggtgtataatactttttatagagtgttagatttattgtattttatcgaggacatttgcatctatgtgactttagcattttattttgagatcaagataatatttatagaatgagttgtgaagtattccctcctagtctttcttttcttttgtttggaaagattttgtgaaggtttgttgttttttgttttttgtttttttctctttttgagacaagatctcactctgtcacccaggctggagtgcagtggcgtgatctcagctcactgcaacctccgccttccaggttcaagtgattctcctgcctcagcctcctgagtagctgggattataggcatgtgccaccacactggtgttttgtatgtttgtttgtaggtttggtgttaattctagttaaacctttgatataattcatcagtgaagccatgtcgctctggctttactttgtgacaagttttttggttactgtctcagtctctttacatgttactggccttactaagtgatttgggtaggctttgtgtccccaactaaatctcatcttgaattgtaatccctataatccccacgtgtcaagggagagaccaggtggaggtcattcaatcatgggggtgtttccccccatgctgttcttgtgatagtgagttctcacaagatctgctggttttataaggggctcatccccctttgcttggtatttcttcctgccaccttgtgaagaaggtgccttgattcccctttgccttctgccacgactataagtttcctgagtcctccccagccctgttcaactgtgagtcgattaaacctctttcctttataatttaccgagtctcatgaagttcttaatagcagtatgaaaatttagactgatacatttggattttctatttcttcttgagttcgttttggtagtgtccttctaggaatctctccatttcagtaggttatttcatttattggcatacagttgttcataatattccattctgctacctccttactgggaccacgagctattattattcaaggaagccatggagttagggagcaggaataagggactaggataagttaaaacaacacaaacctcactggtttgtgtttgtttgtttgtttaccaagattcatctgtttttcttgaccaaatgttcctagggttactgaaaacctttggtggatttgcagagttctgaaagagtagattctgataatttttgctaggtttttcattgcttttatggagggatgaacttctggaggtccttactccaccactttctgctgacatcactctcggtgtttttgcaaatatctagagccagagcactgaaccaaatcccatttggtcatggtgtataatactttgtatagagttctagattcagtttacagtatctgtggctcccaatcccatccctgcagcaggacaggctgcagaatgggtggtaaggttgtgcagagatttgggatttgggctcaatcagactctaagcctctctcaatttctagccttcgatgtccgcttttatagtaaatatttgttgaattgattagtacttggtaaacttgtgcttgaacttcatttacagattatgttgcacaaaacacttgtggctgtagcctcctttccagtgctatatgtgacccttggagccctaaataaatgtttcctccttacagaaaactgcgggtctgcatgagagtcctggattctagtgttgaggatttccacatggatgggctgagtcgggagtggtgagagggtctaggccctatggcattgacttgtagctgctgttaagaacattttcggtgtaagttttcttaagcattcggctacctacatcagagagtcagcggtattccctattcattttggctcctctgggctcagcttctccatgccctttagcccctggggccacctttaaaaactatttgttgaactgatcagtgttgggcaactttggaattggactacatttacaaattatactgtacccaatgcttgtcgtcacttgactgccagggtgcttaatgagtacctcctcctgttgggacttgctgggtgagtgtgttcctcagtggcgtgtgggcctggtatctgaatgccagtgagcccctccaaggctttctcccaccctagtttgggaggatcagtgccctgctgtctttagtgacggctgccagctcttgctttcagaaggcagaagaagatactgctcaagctttctgacctttctagaaaggtctttcagggaaatgggatcaatgctaaagatttccatgagtgctctggatctttattgtactgctgaccaggcttaccttggtcacagtttggatgcctaccgcgggtgtttatgaatcacaagtaactttgccagtctctctgggtaaaaatgcggggtacatggtgccttcctggtggttgccaccaggtccctctgcgtctgctcccctggaagctggaggattgccttttctctaaaataaggacctcttttggggtgcctgaccatttgttggccagatccagaggatcggctctgccctggtctgggtgccccacggtgatgtttgtggcagagggtctcagagaagggagcaaagcagaatgtgggcctgtgtggctccggtcctcggtttcctaactgttggcagggatcctaaaggcgccaggtcctccctgtcctcctcagctgactctgccctcctcagtgtgtccacgggcacaggctttcctcctggcaggtggcagccggagacctcctgggtgtcctgccgccactgtggacctcacctcagtgctgtctggggccttcccagaccagtcccctcccagcgggacccaacccccgccagcctcagctttcaggagctgcccccgcggcgcgaacaatatcctttctatttggagttgactctgctgccctttggagatcccagcgcgtaacgtgagctcgcgaccagcgcgggggaggcgcccacacgcccgtcccgtcttggtgtctggccccaggcggccgcgcctcccctccgaggtggtcccatagcccctgcaccaggcggcccgcgcccgcgacctcaaggcggctgccccgcgccatggcggcccggctgggtgcgctggccgcgtcggggctgtaccggcggcgccagcaccggcagagcccgccgccagccacggggtaggtggccaggggcggggcgggtggcggggacaatggccggaaagctgcggcggcagggcaggccttccctcggaaacccgaccggggccctccgacgccgtgggctctgccccggcgtcggatgggccctgggttggcgacagggtgggcgcgtgcgactttatctaacagggttggatgtcacctgtgatcagctctcctggcagggtgcgcccagggacctatgttagagacgagggagcctgtgtagcccccagcactgctttcagacgggggtgatcatgctgcactttatagatgagcagacaggttctgagcagagcagacacctgctggactcacccaccccaaacatggctatgctgtgatttgaacccaggttagactgactccagcagtggggttcaggatggtcctcagggcatctcagagaatgagttggctctggatggggaggttgggaggggcacggggatggtggtggagccacctcccctcactcttggggtcaggggcatgaggaggagctcctgaaaatgttgcctttgcagtgccgaggggccagcggggaagagagagcaatagggctgtgaccttggggtccttggcatcaaggtgacagatagggaccctggggaggaggccaaggctgggcagaagggctggggcgggggggcagggagggagccaggaacataagtcgcagaggtaggggagggcctggaggacccaggagcagaggaaggccagtgccacccagggcaagcatagcccactctcagctccttgtgtgtggtcagggaaggctcccagagtggcaattagaggactgagccatcaaagatatcttttgctgagaacagaagaggaaggagggcaccgagtggagggcgggaactgcaggccggcagcacggccatctgtggagtccctgctgcatgctgggctcccgcttgtgctggcatggcaggtctggggcagcctgctgttcaggtggggacccccagactcaggaggccaagtcactcacctgagtgtggcagagctggagcaggcaccctccctggtcaacctctggacagccctggatgcgtgtggcataactgtggtaccaggctgcgagtggccagggcactgatggccccaaggctgttctggagtgattttcacagtactgataccacagctgagatgcaggcaggacaggcacgatgatgacaggcctggggcagccctgagcatgcatgcgcatgtgactattcacactgtttttctttgaacttctggttcatgtcctttgtcagttctttgttgttagtgtaacatgtttcagttgtacctgcttaaaagaaaagccactagagcaaagagatatggcaagggcttcaaaaaagctctaatttcagacaggtttcatactgatttggagtctgtttctgatggtgtcaatgcatcttgtgtatagcagcccaggcagcatgttaattttttcttttttattttattattattagactttaagttttagggtacatgtgcacaacctgcaggtttgttccatatgtatacatgtgccatgttggtttgctgcacccattaactcgtcatttagcattaggtatatctcctaatgctatccctccccccaccccccaccccccaccccccaccccacaagagcctctggtgtgtgatgttccccttcctgtgtccatgtgttctcaatgttcaattcccacctacgagtgagaacaggcagcatgttaattttctagcgtccccatggtgggctggctttttgtacatttttgttgacctcatgtggccaggtgacccgacactggcctctggctggcttcatggaggcggggcagggaggaagcccaggcagtgctgagggactggagctgctccctgggctgtgctgcagtagggtccctccccgaaaccctctgcatctggaatagtgcctatcagtgcaggtgctcagtgaggacttcgttggaaggaggacagaagcatgggctgtgcttgcaggaatggcctcactgaaccctcccaacagtccctggaggtagctattcctggcccattttataaacgaggaagttgaggttcagagtcctgtgctgcaggtcacacagacagggggcgtcggggccagggttgcagcctggtgtgcctggctataggggacacacccttggtctgactgctgctcaggccgacgtggcctcagcaacacttgctcatcttgggtgtgaccagacttcttgtggctggcccccaactcttcccagatccttacacacacttccttgactcagatatcaggaaggctgggatggaggaaggtctggggttgttgaagaaacagaatccggaatgggggatgccaagaggagatgggaggaacatgagtccaatcctctgtgaccctcagctggttactgactctctctgtgcttcaatctccttatctggaaccagcctcctccccttatacaaaggcctggaacagagcaggctcctctgatcccacctcagactcagggacatcttgcaacaaattggcttgtattggctgtcaaaactgagagccttctggggtgctggagagggctgaggaagggcatgagatggtgtgctctcccccacctctggggtttggcttccaggctgggtgtgccctgggcagtatgttctacgtagtccagctgggggtgggtagtggtgtctcctgggggataactggacagactctgtgctctctatcttgaaggaatgtgcaaaggaggacatggaatgtccacgtctctgaccctctgacctctcgcagggaccgcaggcagcctgcaggccttcccctaggctgagccatgcagagggactctggaaggctcccagagttgctggaaaacaacagttctccttatccagcgctttgccctgcctggcctggtgctctgtgctggacacgtgggtgccattcattcactttggctcctcgatgtggctgtttctctggtgcacctctttacaaaagagaacgtgaggcctacagaagcgagcatctctctccaggtcccaggctggtggctggggctatcacgtgtagagctgagcggctgggcccaggcctctgccggcctctctgtgtcacactgcctctcttcctcccctgcaggagtcaggaagcgtgttctctcatggtgctgtgtctccgttgtctctgcatgcttctgtctgtcccgtctttgctcttggagcagaatgttccctcacagagctgctgttaggggctctctgtgacttgggctggggcagcccctgggcacaggaaggaggtggccacccccacatccgccccccccacccccacctatgccacgctttgtgcgatactgtcggccacaggcagcaatgatctccctggatgcattcagggaccagccgaggaactgcttacagactggctatcaggtctaactggaagatgagccggaaggtagaggagagtgtgtgtggccaggctgctgtcaggttgaccaggtgtgtccagcattggctccttttggtgggttcttggtctcgctgacttcaacaataaagccatggaccctcacggtgagtgttacagttcttcaagactgtatgtctggagtttgatccttcagacgttcagatatgtccggagtttcttccttccggtggggttgtggtcttactgacttcagaagtgaaggctcagaccctcccactgagtgttacagttcttaaaggtggcacatccggaattatctgttcctcgaaacgattcctccccgtcggttcatggtctcgctggcttcaggattgaaactgcagaccttcgctgtgaacattacagctcataaaggtggcgcagacccaaagaacgtgcagcagcaaaagctactacaaagagcaaaagaacaaactttccacaccaagcaaaggaaccccaactggttgctgctgtgggttcgagtggcctggttttattcccttatttggcccctcccacatcctgctgattggtccattttacagagtgctaattggtctattttatagagtgctgattggtcagtttttaccaagtgctgattggtgtgtttacaaacctttagctagacacagagcactgattggtgcatttacaatcctttggctagacagaaaagttctccaagtccccaccccaaccagaagcccagccagcttcccctttcagtgggaagcaaggtaactggggagtgctagttgagggtgtgtttatgaaacggcgagggaggaagggtggtgaagcagctgggctagcagggcaggagtgcccataaccacaaggaaagtcacaggtcccagcagcacctggcccgtgggagtagggtcagcacagctggaagccagagggggcaggcgtgtgggtgcaggccctaaacagcagttcctggaggcagagaacaggagcctggaagggggtgcgagggatgtgtgctcactcactggggtctagaggtctggctttaaggcggaatctgaaaggctggggctgggtggaagtccttaatttggcttcgttttctgggtccttggagtgaggaattccaggcccagagccatgggatttcctgttgatttccgacttctctaagactcccaaggtctcgctcatgggcaggcactggaatgtcctccctgccaccttgggtgtgtgtttcagaagaggaggttcacagtgttctcccggaaggaaaccaagcctgtcctagtgaagccctgcccagccctcgagggtggcttggggcggccaggctccaccttggtggcctgcctggctcgccccgtggagaccagcagggagctgggagcactgaggaccagccgctgggtgccgaggcctcctttcttcttggtttcttcccaactcctgttgccaccatctttgcttccttgcccctctggcctaaatgtgggctcgcatggtggctttggtctcctaagcaccccagagggcaggccaaggtggacagaagcccagcatgcccagaaagcctggttgaatggccttccagacagcctctgccacatgggtccctaagcagagaagaaaggacagcctgggtgcccctttcaagtttccagtccatctccatttcgcagcagcctcctgtgagaccctccgcccacagcccatgcccagaccctaagcgcagccctgtcgtccacccctggactcatcctaaggcccctcttctctgtggttgacactcttcagactggccctgcccagattgcaggccgcagaacagcccgacaggagcctcactcaccaagcatttccctcatgatgtcgcggcagtgactgctgggtgggattcatcctgggaggcagagcaggcggagaggtattcccaaaggcactgcactcgagtcctgccaccacccggctgcaaccaggcagacgttaccagctggttgcgtcactccccagcgagcctgatgctccctctctgcccagtcttccaggaatccactggagttgacacttgagacagaacccacgttctcccttcctagcaaaaggtgtggggtatccggttctttgaaggtcgtagaggcagttggggtgtttaggactacatcctgaccctgtttttgagtctaaaaggcccctcctggctgtgccgaagggccctggggctggactgattgcgggcctggctcactgtgggcttttcccctgtagttcgcatttcacccctcccagaaggaaacccaccactgactctggggacaggcagtgcccagtatggatgagatttgctccccctcaccacactcccgtctcgtctcaaagattcatactcttgtcttttttatttattttttattttgagacagggtcttgctctgttgcccaggcctgagtgcagtggcactcagcctcggcctcccaggctcaagccatcctcccacttcagcctccagagtagctgagactacaggcttgcaccaccacacctggctaatttttttgttttcttgtatttttattagagatggattcttgccatattgcccaggctggtctcgaactcctgggctcaagggatccgcccaccttggcctcccacagtgctctggatgacaggcttgagccattctgcacacgcacccagctaccctcttgcctgctctgtgtttgggtggttatgtgtttattggaggcagtcagtttgaaactaactcatggtgcagaggatggaaccatggaagactgagcagtctggattcaagtgtggaccccgctctgctgtgtgagcttgggcaagttactcaacctctttgaggcttaggtcccttttctggaagaggccataataatagtagctgcagtattgccctggggattaaatgagagtgtgaatacagagccgctcacctgtgctgggtggtgttctgtgtgcgagactctctggtccctgaagaaggggtaataggggcccaagtgggagttgactgggcccctgacaccccaaggggtgggcactacaagcactgagcagcctggaccctgggttagagcgattttcctgatcctgcagagcgtcttcactttttaatacgaggtgtgtctgtcgggcgcaggcccccgcgtgtgccccatctgcacccctgaccagctctgactcactcctcctgtctcctgcccccagcaatatgtcggacgccttggccaacgccgtgtgccagcgctgccaggcccgcttctcccccgccgagcgcattgtcaacagcaatggggagctgtaccatgagcactgcttcgtgtgtgcccagtgcttccggcccttccccgaggggctcttctatgaggtgaggacactactgagggctttctcagacccagctcggagtctgccctctatgagcgggtgggccgggctccatgcagtggtcccgactggtgacagggccaggtctggagccagcccagaaccaggcttgagctcctgcacgggcccatccttcacctgtgagatgtgaacagcaccccaggtgccctgggtgctaacagagagccacctttcaccagcctcctctgggcagatgctgggcaggccctgggggcaggaagagcctgccctggtggtgcttgccctccctggggactagacagtgagcacagcaaccgcatggcccaccagctggtgctgatgccctgggggtcagggttcccggggtggggtgcggtggtgctcagggaaggtgaggtttgggcacacctgaggggagggagacatactgggcagagggcaccgcatatgcacataccctgtggtgggagaacatggggtgtatggagagcagtaggaagactggtgtgatggaagccgagggcatgagagggagaaggccaggagctgaggaaagggaggtggatctcgcttggccccacgggcctctacggagccataggcttcccctctgcaagaggcaggagccacctcggggtgtggagcagaggagtcacactatctgctgacatttgaaaaggtgacctggccgggcgcggcggctcacgcctgtaatcccagcactttgggaggcggaggcagatggatcacctgaggtcaggagttcaagaccagcctggccaacatggtgaaaccctgtctgtactaaaaatacaaaaaatgagcctggcatggtggcaggtgcctgtaatcccagctactcgggaggctgaggcaggagaatcacttgaacctgggaggcagaggttgcagtgagccgagatcgcgccattgcactccagcctgtgggacagagcaagactccatctaaaaaaaaaaaaaaaaagaaagaaaaaaaaaaggaggcttgtggccgctgtgctgaggagaggatgtaaggcggggcaggaacagaggctgggccaggaggctggggggaccaggagctgaattagtgcaatcacccagatgaaagtgaaggggcccccaccagctcacaggagcagtcgttaaatcatcaacaatcttgggagctggttgggcaacagagttattgtttaaaaattaaattatatcagcgtacaatgggatacaattttattaaaaacaaaggtaacaaatactcaaagcataccacttgctaattattttgttccactttactatcgtctatgctgatggggttatttctgtccattgtgctggtgtggccactgcacatctcccctcaagtccacatcgatgtcatgttggcagccaggagttggccatgacgggaatattcacaccatggacactggcaaacgccccacagcagggcctgcctctgcgccccagagagctggctgttgagcatttaccagaacatcacttgtgcttgtggtggcggtggtggccaggggtcagatgctggctctgtttcaaggtagagctgatgggactggctggtggatggatgtggggcctgtggtccgcctggcagagcaagagccgctgttcctcacagtgtcttcagcctcctgaggaatgctgtctaagtgtagaggcagcgggaggggtgggcaaagctctaggaggggtggccatatgcccagaacaaagcctctctctctcacacacagcaggtgcccagaagattttcattgctgaaagagtttaagcccttcctgactctacaggtcactgggtagggctatatccagtttagtctaataagacactcattttagagaacagggaaaaaccaattaaaaaacagaaaatacaattgttagaggaaagcagaggcaggctttggccccgcttgtggccagcacaggggccctcgctggcagctgccgcctggagggtgtgcacactggctcctgctggccgcagccctgagctcttcccacttccccgtgcccaggcccttcctgcgttcccttccttctgtctcctatacccgggtcttcatggcctctgagagagctggatactcccacagagaaggtatacgaaataggaccaagtgacactacacttcagactggatctcatccctcctggcttaaaaccgcctcgcccccagcctgttctccggaccaacagggtccagatcctcagtagacaccagtggccctttgacaggtggcctcacggacctctccagcttccacgggggcacctccctttgcaccccaccatcccaaaagggccagtgtcctctctggccaggcctgggacccactgctccagcctcagcccggcatgcccctgcctcagtgcctcatcccctgctgtcaggtcctgacccaacaagggcctgggctgctcatggggatgataggtggtttgcttgtcctctctctgcgacccctttgcagtttgaaggccggaagtactgcgaacacgacttccaaatgctgtttgctccgtgctgtggatcctgcggtaaggccggtgacagtacacatcctgggctgcctgggaagtgggcagcagtggcggggggcagggggccgagggggtacacagaactggcccagctctttcctaactccccaccttgcctctctgagcggcagccgtcaggccccctacaggcatcaccatcccacgagggagcccatgggccaggcagagagcaggcggagtgctaggtggacagggcttgggagggtccgaagaggggacaggcacgtgctccccagccagcagggacctgtcttcttccaggtgagttcatcattggccgcgtcatcaaggccatgaacaacaactggcacccgggctgcttccgctgcgagctgtgtgatgtggagctggctgacctgggctttgtgaagaatgccggcaggtgaggtggccgtgttgggccagagaggactgggccacagcccttcctggcacacctgccacctctcctgtgtgctacccacttgctgagggcgcagaagggtcccggtgctgcagcctgcactgatgtagctgccctccctccaggtcaccccggggcggatagtccagctcccagtttacagggccccacgctcagcgagctcctggcagcctctcgggagccatgagaaatcctcacactctgccacccccctggccaccccatctactgaccccacctgtccaccttctcctgcctgtacctgtgcagctcagtgtggctggagggagatgcccacatttactctaaattgagggccacaaacctcatgggtactccagaagttcccaccttctgcgaacccttggtctctcatcctcccttcccaagcactgtccctatagcaggtggccttgtctcccacctcccctggccctagctctgagatcccgtgcagcccggcctctgtctgtgagccctgttcatccccacactttctccagggcttgcttctccacgccactctctcgtcctttctgaaggactgggctggggagctgggttaaaaacactgctgggccttcctccccggcttctcccagcacacccgctgcccctcgcgtgtgctaccctggcctcatctgcccagggacccacacctcctcttgacccctcagcagccctcaccacagctgctgaggtgcagaaacgccccccttctggcacccgggaccctgagttcctgtggttctgcccgcccccacagctgcacctgctcactcccctcctctgagtcacctttctccctgtctctccatggggagtcgtctggggctccgtgcccggccctcatggctgcccttgcagacagaatcctagagccctaaatggcacatgtgtctggagaattccaggctccacttcaggcctctctctcgctgtcctcagctgcccacatgtcacctccacttggtgtccaccaggcatcccaaacgcaatgaggcacaagcagtttgggattctcctccactgaccaccaaggctgcctctgcatgcgtcccctgtatcagtgagaggcagcgccgacccccagaggccccagccatgcttcccctgccacactctctctgtccgggcactctgctccctcccgcagctcctccgagatgcttccccgacactaccgagctcttgtccgtgtgctgcccgtgagagaggcacgtggcctggggcctggcgtccggcccactgtcctcggagctgggcggtgcctggcattgagcagcttgtctaaatgaagggctgaggggcagacggtgcagtgcaggggccgagggacagcaccaggagctcgtgctgaccagcaacgtcgccgacagggtgtgtggagcgagcccaatctccttcctgagccaaggtttgcacagggccactgccccaagggctggttggggaaatctgaaagatgctggaaacgttttggaaagtcaaacatgctacaaaagcatgttgccgtaaggacggtgcagggtggcagctagagtgaggaatgagggcccctacttggccctcccagccccacagtgcagaacctcagaatctgggcagatgtgctgtgagctgccagagccccagcaagagagcccacgaggctgcctctgccactgtaccaccacttcaccattcttgggtcagagaagttctgggaaacgcttcatgttgaccaaacataacaacctgtgtagtcttaaagctacagttatatttatggtccgtacaaacaaatacaaaaaaggacatgttagggaaatatctgcacactagcaagggaaatagctcaggcggagagaggcctctctggaggaagtgggtctgggtcagtgggaggcaggtgcacagcccagccctggcctgagctgagctcccgtgactgcacatgcttgtccaggactgggaggcctgggagcctgtcaaagagctctgggggttgcaggcttgtgcgtggggttacagcaggagagatccagaatccagagctgtgctgagtccctgcaggccgtgagtgctgacgtccgctggcaaccagcctgaaatgtgtggcctgtgtctcttcaactcaggcagtgtgtgtctggcagaggcactacagaggggactcagagtaccttgcactgcaaaggagtattgagactccctccccgtccccaccaggactcccaggtccctcttctgggtcatttgcagcctgccttcagggtctttctgctgagcctcgccgatgagcgattctgtagcgggaaggaggctgggagcctagcgggaaagaaaggcctccattgttcaggggttgttcttccggcctcctctctccctgccacagatgaagtcgttgagtgtctaggagccattgtagccatcacaagcccctgcagaggggtggccgatggatcccctttgtcagttcttcctttttatgggttgagactaggcgatctagagaaatggtgggcatctgctgagatttcaggttgcttgctggggaggtggctggggaaagggcagatgcctcttgctgggtctgctgagtcctaaacagtctgcgctcggcctggacggcgccccccgctcacagctctgacttggcactcagcgagctctcgttggttttcccttcgaagctggggggcgggcccttgagccttttgccacagagcaagttgcacagggcgtggcggaacttctcagccacgaagaaatacatgatggggtcgagtgccccgttgaggctggtgaggcaggaggtgatgcggtttgccagggccaggatgcgctgggtggcgcaggaggccccatggctgcggtagtgcagcacgtagacggagcggttgacgtggtagggcacgaagcagaccaggaagatggccagcactatggcgatcatgcgcactgccttggtcttgaggcgcttctccacacgcaggccctgccgcaggctgcggatgatcagcaggtagcaggtgaccgtggtgatgaacgggaaggtgaaggccactgccagggacaccagggcatggtgggaggccttctcccggtacagctgcaggcagaccaccgtgtggttggtctgcacggtctgtgggctcaccagcagcggggccatggccacagccaccaccacccacaggaaggcacaggccaggtgtgcgtagaggggcctgcggagcttgagggacttgaccgggtgcacaatggccaggaaacggtcggcgctgatgcaggtgaggaagtagatgctggcgtacatgttgaggtagaagaggaagccggtgagacggcatgcgatttccccaaatggccagtggttcccagagaagtggtagaccaggcgggtgggcaggaccagcacgcacgacaagtcggccacggccagatgcatcaggaacacgttggccggggtcccggacttgtggtctcggatgaaaagccacagagccagggtattgccaactaaagccaggataaaatccagaaggtagaaggaggcgaacagcatgttctccagtggcgtctcctggccacattgctctgccgtggccagggagaagttggtgatcagacctgggggagccacttcaaggccattcatgctttggctggagtcagagcctggagggaacaagcaaacagttcacaatgagcttgcgatctaggcagcttcacgctctctgaagtccagaagtcaggcctccaatgccttcagaacctcccactttcaagctcagcaccgcccacggggctgctgaggggacctccttgtccatttggtgtgcgtgagcgtcagaggcattctgaacttcagcacaaggcaaacgcagaaccagggcttggaatttcgccgctatgcagctgcacccctgccacccaggagatctgaggctcctcagagctgggaggaccgggtcagtgccatggcggggaatgggacgtgagccttgcctgggtgaggctctgggttttctgttctgcctctgaggtgtgctgtctgagtgacaggggtggtgaggggcgggggcagtgtgtctccgggattccagctcctcctcagcccaagccttggcaggtgagttctgttcatcctgagtgcctggaccctccctgacccacctgcccacaggtgcagtggccggggtgtcaccgctttctgcttcccctgaccatggcttgcccctggcacttaggagggtgcccccaggatggcagcaagggctgtaccctgggacgtcagaggtctactctttttacccacctgagagtttcagcatctctcttgggggctttctggatccagcccaccaactccgtttggacatcctgacaggtggggagacctgtgtttaggagaagcctgtgcctgggtatcaggccagctgggagtattttctctcccagagtagatccaccaccagggggcagcatctcttccaggaggggaagacccattttacccagcgtcagagacactggccagcgctgttgaggacggatctgcagccccagagaggcctggaggcctcgtggcttgcccacgtttgaaggccaagtgcagagccctgtgacagtcctgggtaacaagtcatgtccgtctggtgaaccctgggtctggatagggtgctccccaccctcagcagagaaacccactcttgttttgattttagtcaactcagaagattgaagaaggagagtgagggtcccaaacactctgcctccccaacccaggcctgcgagtggcagtgtgggcaggcggtggggccagagcagcccgcagcccggaaccagggcaggacagcgcacctggcctgcctttgaattggggtcaccagcgggcttcggccaggtgggtgctgatgatggcacagcttctggggctcctctgggcacctggcttcccagtatccaccatccccaccctgcacagccaggctgaagcagaggctggagagaggtttgcataagagaagctggcatcctgcctgtgcccattgtggcagcaggaggggaggaggcacgggccacagccctggcagggtcctcatcctgggcgagcctggctctgcaccgaacagccggggtcctgcctgcagcaaattcactctgcacatttctccctgcccttccttccttccttccttccttccttccttccttccttccttcctaccttcctctctctctcacttcgctttgcttgtttgcttgcttttctttattttccttttttcttttcttttttctttttttcttttctttttccttccttccttcctttcttcttttctctttctttctttttctttctttcctccctccctccccttcctcccctcccctccctcccctcccctccctcccctccccccctcccctcccctcccctccctctcttttttctttttttctttctctttttcaaggtctccctctgtcacccaggctggagtgcagtggtgcaatcagctcactgcagcctcaacctccagggctcaagtgatcctcccacctcaacctcctgaatagctgggactacaggcgcacaccaccacacccggctaatttttgtattttttggtagagacggttttgccatgttgcccaggctggtctcaaactcctgggctcaagtgatcctctctccttggcctcccaaagtgctccttggcctcccaaagtgctgggattacaggcatgagtcactgcgcccagcccctctcctcttactgattccacagggctgtctcaggatgctggtggcacggggcagagagggcatggtgactgttcatggacacagcagcccctcgaggaggaggctggagccatcctcatatggaggagaagcaggcatggtggtggccctagccctagggaagggtgggccgcacccttccttcaggagagcgagtggccagctgctgtggccctcacatggagggtgagggctggcccgagcacctggccatcaatgtcctcaagcaaaggggagggcaactacctaataatattaccttttagctatttctctaggcaggttcccctacctgaaaagattgcccccggcttcagagtgtttcaagatgcctgaagttctaacaccagagatggtttcctgctgcttccaggaacagggtctgttcttagtccaatgtggagttcctcatggggaccccattccccaggaatccaggttccacagtactctgacttggtctggctggtctcggctggcactttccctaggactgctaaaaccacggtgagggcggagagctgagggccgaagaaggcggggtgagtgatgcttgggagagggagacaggcttggctgaagccctggggaagggctgagggctgtgaagggggctgtggaggagaggtaaaaggagggaggaacacagcccttgacagggcctgtgaggcaggggagaacagggagcaggtaccggtgggacggtggcaggggaggggggcccatgactttgagggtgtcgtgttgcatgtgctgggggtgaggacccggagactggaggaacagggctccagggcagacgcatgggcaagcagagaggacagcccatggtagatgggaggggcacacaggtgtgctgttttcaggttggcaggagaggaggaaggtgtgtgcggggaggccctggagactggaagaggagagggggcccagtgagtgaggggcccttgttagaacctgggggtgggaaggggccaaggtgggtgccctccaccccaggctgtccctcaggcctgtgctgtgccccacagtgcaggcatcacctggccccacgagagagcagctcataggtacgactgaccactctgcctggcatggtgggggcctgcctgtgctggctcaaaccagttttagccccatgttgcaggttagggagtcaaggctgagtgtctgctaacttgtcttaggtcacttgaccaggggacattggccctggagctggaagtgagaccggggaaacggtctcactccctggaagaccgccagggtggggagtgtgactcagtctcagagtttgccatggagttgtctcccaggctcagcaccccctcctggccctggggccactccctcattttaggggcccatgtatgaaatgagaatgtgcagccccttgctcaaaaaggaagagtttcaggacagtgacggcagagtgttactgggctcagggccctgagtgacggcaggggtggcatatctcatggcaccaggtgggcctgtggtgcctcctgcctccagcccgggggcctcagcctgggcactgccctccacttcctgcccgggccgaagggcgtgcccctcgctctctctgggactgagactccattttaaacagctttctggttggtttcaggtttgctgaggtttcttctccctttctgtcccccgtttgaggagttctgatactgattgttgcagtttggtctgagatgggccccgcttcactctctgttgccctttagaaacacaaacttcagtctagactcgctggttcctcacgactcactggtcagacggccaccgagccggtgtccgtaagaggaaagggcgtggcatgggccggggcctgggcagtgttgggtcccgtggctgtgggtgagtcgagcatctaggacaggtcataggcctctgtggaggtggcaggtgggcatgtgtggcctcggggagggcctgtggtggcagcgccatggccaggtggtggcagtttcctttgcattagcgccactccatccctggcccgagccctctcccaggcatctggctcctctatgggtcaaggctgcctaatggttaggggcagcggtgctgtcattgcagcctggactgccggcaagccacttcccctctgcaagcccccatcagagggacgaaacaccgctttgtgggctgctgtgaattcagactgtggtcagccttcgatgcacaggtcagaccatcaccaaagagatgggacgagacaggctgctgcctgtctccctgggcagggctccccgctgagtgtttcctctgcttagccctgggctcccagtccaccccacccagcctgccccttacctctagctgctggtccgggaggaagggacaggggtctgcggggcagcaggtgatctccgcccgtgggtgtcggtggtggcagggggctccttgccgctgtgggtggaacgctggctatttaaggagaggaagggagaccacagcccctctggccctgaaaggctgcttcattcctgaggggtcccttgttgtgtcgggctgctcctctggctgctgctgctgctgccaccggagcgtgaatattctagtgtgtccctagcccatgccccccgcccccagcttggccacatagtctgagtgtgtgactgtctcagagactcagagcaggcgggggctgggtggggggcttgggctggagctgagggacacaacaggacgtttcagaaggggatgatttcctactgatggggggcagggaggggccggctgtcatggcaacaggcggcgctcccaggcctgcgcccgcagacggcggagggggcctgtgaacggagggtgggaggccgaggagtcttgctcacggagtgagaggcgactctttgaggacacttgctgtagggtccttgtgtcctgccctgtataatgaggccccatttgggcacacagaataaatcatggcctttatctggagcgaggaacagctgcaggagcctcataatggggcgctgtcctgtccgtgaggatgcggctcagctcagaggccgggtgctcgccggtgcagctccccttctgcacggaagcccatgaatctgaccgctggcctggggctcctccctggggtggctccgggctggggtgcctttgaatgctgccggcggccgcctctgagactgagtgaacaaagttcatttctctctgtctttctgaaaatgatacatccagcaacatgggaaaccaaatcacccttcctggtttcaaaagactttacattttgttgtttaaacattgaaaactgtatgtatgtggctagcatttaaggggcagtgtcttaaatttgtctcttcacatcaccctgtgcagctgggattattgccccattttacagacaaggaaactgaggctcaggcaaatgaagaaactcacccatcaacaaacagtaggaagcaacagagccaggatttgaacccaagcacatgtcactccagaacttaggctccgtgtgtgtgtgtgttttgtttttctgctgcattttgaatttagaattcttagatttgatcctaattcaacctgaaaaagaattctgaaggccacctttagatctgatgctgtgatctggtctgttgagaagctgtttcccatctggacttccttcaagagagatgggcttcccagtttgtctggcctgagagccagctgggtgtgaggtgtctgagccggggcgcaggtctctttcctgttgtgcccgcaggcggctgtctggaagaactggcccaggctggttggaaaggtggtggcttgaagctaaccaccctgagcagggcatttctgggctcacagaccttctgttattggggtgatcactgtcgatggcttcaagggcattgaccgtggtgatggagttttgaggcgttgagctgattcctgcatctttgagacagaaataattcctcgtgggttgagtgttgtcctgacgctcaggaggagtcaccagaatgtggagtggggtcatggggcctacatgctgagtctgggacagaggcaccgcagggggcatgggctggccgccataggcgccaggtggggcagctcagccccagacctgctgaggaggtggcctggggttggggctggggcacaggtgtctgggcaagggtgggcttcagggattgtggtgatgaagactgaagccacaggccacaactgcttcccgtcgctggggtgtaagagccagggctctggccagtagtcgaggggagatgatgcccaccgaggctcccttcctctcttgtagagtcattcattcaccgaggcattcggtcagctgaccctgagctgttgccccctgctgggcacatagggtcttggggaggcacagagagccagtcggcagcttagccagtgactgctgggcctttgtttgggccccttgccctgcacacagctgatgatgagacaccccagggcagatggagcacagtgctgtgcaggatggagtccagacacccagcagtagcaggtcctggggtccagggagggatgctgaatgggtggccctggcatctggggtctgcccaccataacctgggtggggatcttgggtctgcgattggatctcttccgtatcctccctgaccagcctgtcagaggggccaacactgggcgtcgggcagccgtggaggctcgtgaggagtggagagggcccctggggctggggggcctgggaagggaggcctggatgcagcaggagcaccagagagagattcgggtggcaggtggagacgggggccagggaggttggattggggcctttgtgtatctttgcctggggactctgaatctagattcctgccacctttgaggtccaaggaaacagaaaccatgttgatttgtctctccgttgagaacacagctgtcgtccaacacagcgagtagcatcagaaattattctgaggtcttcacaaaaagactctgtagtgacagttcctgggtttgggggcctccatctgacatagcagtgcttgtctttggagacagaaatcgcctgtacgtgtttgggcccttcttcatctggcaaaccccgaaggaagggggtgagtgggcctcccgggacactcactggccactctgctgggcacagtgacactcattataactcgtgtgtgttaaatacattgggaaaataatgctttcagcagatatcaattaaatgtctactgtattctgcagcatgccccaggcttagagaaagtagaaagaggaaaataccatccagagacagtaacctcgagcattctggcatctttcctgctgagcatgcgtcccattcccaggacacacttgtgaccttctgggccttgtgacagggcagtctgctttcccataccctgggctgagcccctttgaagcccccagctgctcagtgaagttgcaggggtctggcctctcttctcctggaggtggccaggctgtgtgggagtgggggctctgcccctaatgcccccgcctcccgcaggcatctctgccggccttgccacaaccgtgagaaggccaagggcctgggcaagtacatctgccagcggtgccacctggtcatcgacgagcagcccctcatgttcaggagcgacgcctaccaccctgaccacttcaactgcacccactgtgggtaggtgcgcagcccggccctgcagttgtgggggcggggagccagggctggcccagggtaagggcggtggggcctccacctggggaagtgttgaggagggagaggggagcagggtgggcagacagaggggtcccgagagcaaggctgcagggcagaggtgggctgggggctgggaagcagccatggcaggaagcttctctctccagggctctgtttggggggcacttgagactcaggaggcgggtgggctggacccctagactgcagacgagggttgagatggagcagtggaagggacctgagggggcagggcaagagaccgggagtgggcttggtgctggtgttggagagaggagttgcataggcagcccctcagcccccgtcctcgcccacccccaccgtcccctccagtcctctccgtgcctatccagacaccccctctggtttggaggaggaggggggcccaagaacagacctgcttctcagaggcctgggtgcagaacacagcccactcttctgggctgtgcaggaagtctgtgctccagggcctgtctggggcacaggaagtcttcaaagtgcccagagatcagaaggcgctgccgcctcggctctgcagggacagaatgggcccctcggggagccgtgccctggggtggaggcgctgctggcatgaccctgcagaagggcaggggtggcacctgggggctgcacgctgtcttccaggaaggagctgacagccgaggcccgcgagctgaagggtgagctctactgcctgccctgccatgacaagatgggcgtccccatctgcggggcctgccgccggcccatcgagggccgagtggtcaacgcgctgggcaagcagtggcacgtggaggtgagccaggctggtggacacgtggcctcaggttggggggtgccccagctcagggtcatggtaagagccctaaagctcctccacactcccagcccagggcgggtggctggctcccaacgaggcccttcctcaggggtactgcccctccctgtgctcagccagggaccccagcctgcccacgggagccaggagacccgagtgcacacacacggttgggtagctgtgcccacctctcctcttccccctgctggcattctaagagactccaaggtcaggagaaaaccttgggggcagtctgtccagagtgcctgggggttgtggatgacagaacccgctgcatggacagccctgtgcagacacggagctgaagagttcctcaggtgtgagcactgggtcacctggagtgcccccaccgggtggtgggctctcatgttctcatgggtacactgggaacagtgagcccaccacctcccctgatgacctggccagcgctgtgtccggaagctgtgccttgggtggcggcttgggtgggaggccatgcggtcctgccctgatgcaggccccagcccccagccctcatcctcacatgcagatccctgggggaatgcaaggtgctgctcagtgatcccaggcttgcagggggtgcctgcaggaggccccacgtggacaggcagggccgcctctgcctatgagggcccaccatgccgcagcaccaggctggcacctgactcctggggctgaggctgccgagggggaggccagactgggaggggatggtgactcacaaggttaccatcagtgccttagaggaggggtagggtctgctgaccccagggcattcacagaggtgtcagtcccctctgcccagtgtgaatcctgaaaggcctgcacctgcccagactctgctttctgtccccttctgtcactgctgcctcctggggccactgtggtcccctggagtcactggctcctggggtcactgttgtccccgggtcaccactgtccctcggggtcaccgctctagccctgatgccacccggcccgccctttgtccttgcagcactttgtctgtgccaagtgtgagaagccattcctggggcaccggcactatgagaagaagggcctggcctactgcgagactcactacaaccaggtgagcccggtgcagaaccttcagggatgcgggtctggaggggtggccaggagagctgccgtgagcaagggaggctgtgggcaccccctcaggagctctgccaggtgctgagcccaggcctgcaccctcagccctggctcctggcctggggtctcgagacctgggcagctctcttcagtctcagtgtcttcctttgaagaatgttctggggctggtgtgaggtcccgggcacatggggctgacagtgccagcaaccccctccctcccttgctctggtacagaaggcagggggcgctggtgggatgcagtcaccacctgggcccacctccttgcaggacagcagtggccagagcagaggggccttctggggagcaacgccccagcctgttgtccttcccggaagggtggttctcatgggttgccgtgccctcaacccagccttgcagctgggccctgggaggcagggcctgggagatgcctgagaggggccgtgttggagggccaggctggctgcatgatggccctgggctggggtgtgactgcctgcagctactctgacagcctgctcggcccacagctcttcggggacgtctgctacaactgcagccatgtgattgaaggcgatggtgaggccctgtgttccctcccccaccccacctgctctcctggggcctgggtgctgcagctgtgagcccagccgggcctgcggcagcctagccaggcctgctgagtcccacgcttccctcacagtggtgtcggccctcaacaaggcctggtgtgtgagctgcttctcctgctccacctgcaacagcaagctcaccctgaagtgagtccctgtgatcgtgggatggggctcagggtggagggggctcctgcaggtccttcctctcagcagccctcctgcacaccagctgagtctggcctggggatatggtggggacaaggggcagcccggccttataccacccagggagatgggggcaggttcagggggtctaggggatccagggaccccagggaccccaggcacagtgagaggaggaggaacactcatgcctccaacacacctgccagaaccctgggctctggggagggaagggcattccagctcagggaacagcatatgcaaaagcagcagtgtcagctgctcatccaggaagcctcgaggggtgtgggatggctggagctgggagaggagagatggcgtccaggtttccaagggctgtggggaggcatagagggttctggggtttcagaacctgagagaagcctctgggaggcaagggaagcctcaaggcccttctcatccctatgctctctggccatctcaccctagggcctggcctgctggctaggagaggctggtgtggggaggctgggggctgagggaagcccactccacagtcacctgtctggggttaaaggggtgggcgtggggctctgctgacagctcagcttcctcctcaggaacaagtttgtggagttcgacatgaagcccgtgtgtaagaggtgctacgagaagttcccgctggagctgaagaagcggctgaagaagctgtcggagctgacctcccgcaaggcccagcccaaggccacagacctcaactctgcctgaaggccctcttgcgcagctgcctctcggcccctccgccttctcccctcctgctgtccatgcttggccccctcgtccccatccacctgtgccctccgcatcttaccctccctttctctttcctcattgccttctcccttcctgttccctcatctctgccttccccatgtctctcctctccttggccgtggcttctgtctgtgaggaggcaggagctggggagtgggagcctatgaccccacgtctgacagccatgtccacctgtgcccacagcttccgcccacagacctccagggacaggagcaaattgcaccacagctccccgcctggcctggccctccccaggcggctcagtggctcatgctgtcctgtgagagcccctgccccagagcggccccactaagcgcatgtggctcctgggctacccacagccagggcagcctgctggagccacagggccagggccatgcagatggaggcctctgggagccacctccaatccctcaccactcactcaaccagtggcacagtgtccttgtgcccacactgagccagcaagtcctgctgtccacacccacaagctacctggagggacaggacccacctccatccttcggaaggccttcctggaatcccaccttggcctccgccctcggttccgccccgcccctctccccccgaccttggggcttgtgtcgagcccttgggtggggccaggaggaggtgatggcgtcagaggaggtgtggtcagaggtgacttgttcccacctccagggaggacgcttcgtcttcggccagcgcagacctggtgtttgtttgttgggctcacgcttgcacaatgaaggcttgttcacac

SEQ ID NO: 15669 - DNA, 36859 bp, Homo sapiens
ctatactcccgcaacctcccaccgtcacctccccaacacccccaccaccctcagccttgacctccccatcccaccccgccccgcgggccccaccctgccacccccgcccacccctctcgcgggcggagcggctcttggccttttttgggcgtctccctgctccgcggcccgggctggcgggcgggcgctcggctggcggctgcagcagcagagggagacccgcggcaaccccggcaacccagggctcggcgtcgctgccaccatgacgggaaggtaacggcccccacccacgcccccgggccggggaggcgggactgcgggacccctggccgaggcgcagctcgccctcgtacagccccgcggcgccacgatccccgctccgccctggcgcgtcggattctcgcagctgccggggcggcagcgcccgtcggggcaggggtcccccagcccccgcgcctcttcctctgggcgagcgcctgcagcggaaggtggagctcctgcccacccgcccgctgcaagatgggacagccgtctgctcacaaccgacgcccagggctgcgggagggggtcttgtccaaggtcagacaccaaccacgggcaaaaggttcaaaggttgcgtgcctcccccaacttccccgagcccgcgctgtgcgatccccgatcccggtgagtgtcatctctggagccttccgtttcctcctctgtaaacctggggtggtaaaaatgttaaaaatgttgaagggtatgttggaacttggccagagctgcgcccaagcaccagctgtgcaggggttggttggggacagggcgctcccctgggcctggcccaccctctgctctcaggcccctcgttgccatttcacagatgaggtcaccagaggccacagaggctgagccactcaggaggccagtcacaggtccaccagtgtccggccagtgtttgtccctgcagccctttctggaacctagctgggtacaagtgcatgactcaggactgggtgggagggggctgtccctgaggccctggtctcccccagccaagtcctggcagggggatgctgttcttcaggatcccatgacctggggctcttggggagccccagcccggagagtgacctgtggctttgctggggaaaggggcttggagggtacagggcagtgtccaggattgcagtctcaaatccgaggcccacaggggagctgcctctgtgatcgccattaaggctgtggcctggggtctcagggcagcccaggaaccaaaaatagcctgtaacttgtcactttgtaagtcctgccctccagacacacttccctttcttctccccaagcctctcttcccagttagctcccctgacttggagtcacctctaagccttggcccaggcccctctgcagtgagatggagggactcatcccccggagagtggcatctgcaggcccactggctgcctgtggtcaccccctagggttctagcggggctgcctcccattttcctcagagcatccctgccagctggctggttctcactctcctgttttctaggaaaagaaagtggggagagacaggaacagggtccggagcagccccagcagcagcattgaggtggaggtgggtgagaggcggttccttcaggcacaggagggatgtcgaggagaacagagccgtgaagggtgcggggctggaatgggaggccccgaggtgccactgctccctggcaagggtcctcttgcccctgagtcccttgggcctttccctggagacggaggccgtcaggtgagcccggccggaaccgctgggaaggcaggtggtggcgagcaggggtcagccttcccttgctgctgtgggctccaagggcctgagaaactcttaccctcaaatgacacagggatgacagtcagcctttggcaggcactgtgtagggcgttcctcgtccaggcaatactactcgtcttagagaataaggagaaacctggaaacataaaagataacagaaacataaagagaaggaaactgccacagttccactcccaagagcctccctttatgcagttcggtggctccccgcagtcctttctcctggagtttgtttgacgcagctgtgagcgatctgagtgtaatgcacccgctccttcaaaggtgaccctgctgcccgcagtgctggtgccccactggcttccctgccttccatacacagggattgggccgggccagtctgtgaggaacagacatccaacccggccttcggagtgggcgagagttttcctgtcccagaagcagtggagtttcatttccaccgtttcatgctgggtgcccttccccacgtccactgttcccatgtgatcccgggcagctcctcgtgcctggatcctggttctctcgggatcccccatgctgcccagagccaggctgcttttgggaaacaccctctctgctcgcataccttcagggcttctccctgccagctctccctaggacctcaccaggcaagagcagagggagggctgtggggagccaccaaagtgacctggagtggcatgtgtggccatgctgtctgcagatgaacccatgggtgctgtgtggagaaagggctgctgggaaggagatggggaaggagacagaaggcagccactagggaggcctctcctgggtggctgagcgggtggaggagaggaggctgactcagggttctgggaggtggagtggacaggacccaactgactggctgtgaggtgggccacagagggtggggctcgggaggatgcccctcctgtgatgacaggtgggggtggatggcatgcttggtgtggttgtggagtgcttgaagagctgtggcaagtctgagggggagccgtgggaggcacctgggcatggaggggctgaagcccaggagtagccagctgggcagggagtgaaggcagcccagagcatggggtggcacgccgtgggaagagagggggctcggcctcagcagcaactcagggactttgcaacttacaaccacaagatctttgactatcacagctgaagggacctctggcatcaccattgttctacagggaggatattaaggccacctacctagggacccagctgtccctggcattcctggaaatggagcctgggatgttgacacccacggccacgtgagctcagtggcttggctgcataaagtggagtcccacccatggtgtgaccgtcatgtgtgtcacatgtgaggctgtcgtatgcctgattgtgtgctgagcccatgcttagtacagcgcagagcaggctgctagatccctgccctcatatccaccaatcttgcccctcctccgggtgaggagtgtgcccggtggtcccctaggcagaaggtgtcggccaaggggcagctgactgcagctagagccctcagcacagcacacgaggctgcagtggcgtcaggggcttaagcaaactgtaaagtgggtaacaagtgatgtggcttgtgatgtggcaccactgagccctgagccccagactgggccaggtggcactgccatggcccctcacctccttcctttttcttctacttctggtgctgactggccccttctagccggccagtggcataatagggatggagggactgatctgcagggtgtccagtcccgtggtgtgatacccccacctgggctcatttcaagccaccaacatggcattaacgctttacggaattcctgaatagttaacagtcagcacttgtgaactggcaagggacagcccagggagccactggggagaggagcccgggctttctatccacagcgggttatccttcttctgtctgtccctatctgtgctgtgccgcatgcaggctcttttttttttttttgagatggagtctcgctctgtcacccaagctggagtgcagtggcgtgatctcagctcactgcaacctctgcctcccaggttcaagcaattctcttgcctcagcctcccaagtagctgggactacaggtgcataccaccacaaccggctaattttttttgtatttttattggagatggggttttaccgtgttggccatggtggtcttgatcttctgacctcttgatccacccaccttggcctcccaaagtgctgtgattacaggcgtgaacaaccgtgcccagcctgcatgcaggcttaaccatcccttaggtcttcacttccaggtgggaaaggggccaagggaggcactgtcactgtcttgcttgttctgttgaggtgtagcgtgtacatttctgaaggtgaatatttacttagatgacttagcaggatgaccaccctagtgagatacctccatgagtgaatgcatatgtcttgctgagatgaggtgactgaatacacatatgaacataaaacctactgtgtcctcacccacgtccttggaggaatacacgggaaactcatggagttgtcttcagcctcccagcgaggagtctggtgggggagctggctctggaggacagcctgtttgtggcatctctgcctctgtccgtctctgcctctgcccactgggctgagggcacgtgccccagggccttggggaggcagccctgcctcatagcttggggcctcagttccagcctctaagaagccatgtagttgcattcttcattactcacgtgttttttaaaatctgagacatagttcacatattattaaattcaccactttagattgtaaaattcagtggtttttcgtgcattcacaaggctgtgcaaccatcaccattaattccagaacattttaatcattcctaaaagaaaccttgtactcatttgcagacagtcctcatttccccctcctcccagccctggccaccagtaacctgccttctgtctctacagatttgtctgttctggacatttcacataaatggagccatatattatatagccttttgtgcctggcttctttcatttattaacaacatatttccaagattcatccgtatattgtagcatgaatcagtacttcattcctttttctgggtgaataatattccattgtgccatagtttgtttcttccttcatccgtggtagacatttgcattgtttccactttttggctaccgtgaataatactgctatgaacattcccatacaagttttggtgtgaacatacattttctccttgaatatatacctaggactggaattgctggcatatggtaactctatgttaaactttttgaggaattatcaagctgttttccaagtaattgaacaattttacatttattaaattttacaccaggaatgtatgaaggttccaatttcccgacatccttgctgatgcttgttattgttgtccggtttagtaggtgtgaagtggtgtcatattgtggttttgatttccatttccctaatgactgataatgttgagcatcttttcatgtatctgttggccacttgtaaatcctctttggaaaaatgtccattcaaactctttgcccattttttaaatcgggttgtctttttattgttgaattgtaagagttccttatttatttgaatactagacacttctcagacatatgatttgcaaattttttttttttaagatggagtctcactgtgtcgcccaggctggagtgcagtagtgcaatctcagctcactgcaacctccgcctcctgggttcaagcgattcttctgcctcagcccctccagtagctgggactacaggcgtgtgccaccatgcctggctattttttttttgtatttttagtagagatggggtttcaccatgttggccaggctggtctcaaactcctgacctcaggtgatcctcccgcttcagcctcccaaagtgctgggattacaggcacgagccaccgtgcccagccgatttacaaatattttttccttttctgtggatcatcttttcactttcttgattgtgtcgtttgatacacacgttttaacttttaatgaaatccaatttatttccttattctttagttgcttgagttttttttgtcatgtttaggaaactattgcctaatcctggctcatgaaatgaaaacatctgttttcttctaggagttttatactgttagcatgtagctatccagttgtcctagcatcatttgttgataagactactcttcgccccattgaatggtcttggcactcttgtcaaaaatcagttgaccacaaatatatgggattatttttggactctcgagacagggtttcactctttcacccaggctggagtgcagtggcaagatcttggtacattgcagtctcaacctccctgggctcaggtgatcctcctacctgagcctcctgagtagctggaaccacaggtacacaccaccacacctggctactttctgtattttttgtagagatgagattttgccatgttgcccaggctggtcttgaattcctgggctctgcctgcctcagccttccaaagtactgggattataggcgtgagccactgcacccagcctatttctggactcttggttctgttctatgggtgtatatgtctatccttacaccactgccacacttacaattttttagtaagtaaattgtaatttttaagtaaggtgtttttttttttttttttttttttttttttttttttttttttttgagacggagtctcactctgtcacccagggtggaatgcagtggcctgatctcagctcactgcaacctccacctcctgggttcaagcgattctcctgcctcagccttctgagtagctgggactacaggtatgtgccaccacacctggctaatttttatatttgtagtagagatcgggttttgccatgtgggccagggtagtcttgaactcctgacctcaagtgatccacctgccttggcctcccaaagtgctaggattacaggtgtgagccactgcacctggcctctttgtttttttttaaagttgttttgattattctgtgtcacttgcattttcatataaattttaggaatgccttgtctatttctttaaaaaaggcaggaattttaatggagattgtattgaatctataggtcaatttgatgtagtgttgtattgccatcttaacaatattaagttttccaatccatgaacatgggatatctttatttaggtcttctttaatttatatcaataatgttttataatttcagtgaataagaagtcttgcatttattttgttaaacttactcctaagtattttattcattttgatgctgtcccaaatggggttgttttatttcatattcagatttctcattgctagcgattctggtatattgagtgtataccttgcagacttactgaactcatttcttatctgtaaatagggtttctttttttgaggagggattcttccgagttttctatatatgagtatgtaatatgtaaataaaaatagttttactcttccttctcaaactagatgtcttttatttctttttcttgtctaactgtccttgatagaatctgcagtgcaatgttgaaaacaaatagcggactggaaatccccctgaccttaggaggaaagcattcattttctcatcactaagtatgatgttagctatgggttttgggtagatgccccttatcaaattgaagaagttcccttctattcccagtttgttgggtgcttttattatgaaaagatgttggattttgccaaatgtgttttctgcatctgttgagatggtcatagagtgtcctccctatattctattgatatggtatattacattgaattttggatgtgaaaccaaccctatgttcttgggataaatcccatttggtcacggtgtataatactttttatagagtgttagatttattgtattttatcgaggacatttgcatctatgtgactttagcattttattttgagatcaagataatatttatagaatgagttgtgaagtattccctcctagtctttcttttcttttgtttggaaagattttgtgaaggtttgttgttttttgttttttgtttttttctctttttgagacaagatctcactctgtcacccaggctggagtgcagtggcgtgatctcagctcactgcaacctccgccttccaggttcaagtgattctcctgcctcagcctcctgagtagctgggattataggcatgtgccaccacactggtgttttgtatgtttgtttgtaggtttggtgttaattctagttaaacctttgatataattcatcagtgaagccatgtcgctctggctttactttgtgacaagttttttggttactgtctcagtctctttacatgttactggccttactaagtgatttgggtaggctttgtgtccccaactaaatctcatcttgaattgtaatccctataatccccacgtgtcaagggagagaccaggtggaggtcattcaatcatgggggtgtttccccccatgctgttcttgtgatagtgagttctcacaagatctgctggttttataaggggctcatccccctttgcttggtatttcttcctgccaccttgtgaagaaggtgccttgattcccctttgccttctgccacgactataagtttcctgagtcctccccagccctgttcaactgtgagtcgattaaacctctttcctttataatttaccgagtctcatgaagttcttaatagcagtatgaaaatttagactgatacatttggattttctatttcttcttgagttcgttttggtagtgtccttctaggaatctctccatttcagtaggttatttcatttattggcatacagttgttcataatattccattctgctacctccttactgggaccacgagctattattattcaaggaagccatggagttagggagcaggaataagggactaggataagttaaaacaacacaaacctcactggtttgtgtttgtttgtttgtttaccaagattcatctgtttttcttgaccaaatgttcctagggttactgaaaacctttggtggatttgcagagttctgaaagagtagattctgataatttttgctaggtttttcattgcttttatggagggatgaacttctggaggtccttactccaccactttctgctgacatcactctcggtgtttttgcaaatatctagagccagagcactgaaccaaatcccatttggtcatggtgtataatactttgtatagagttctagattcagtttacagtatctgtggctcccaatcccatccctgcagcaggacaggctgcagaatgggtggtaaggttgtgcagagatttgggatttgggctcaatcagactctaagcctctctcaatttctagccttcgatgtccgcttttatagtaaatatttgttgaattgattagtacttggtaaacttgtgcttgaacttcatttacagattatgttgcacaaaacacttgtggctgtagcctcctttccagtgctatatgtgacccttggagccctaaataaatgtttcctccttacagaaaactgcgggtctgcatgagagtcctggattctagtgttgaggatttccacatggatgggctgagtcgggagtggtgagagggtctaggccctatggcattgacttgtagctgctgttaagaacattttcggtgtaagttttcttaagcattcggctacctacatcagagagtcagcggtattccctattcattttggctcctctgggctcagcttctccatgccctttagcccctggggccacctttaaaaactatttgttgaactgatcagtgttgggcaactttggaattggactacatttacaaattatactgtacccaatgcttgtcgtcacttgactgccagggtgcttaatgagtacctcctcctgttgggacttgctgggtgagtgtgttcctcagtggcgtgtgggcctggtatctgaatgccagtgagcccctccaaggctttctcccaccctagtttgggaggatcagtgccctgctgtctttagtgacggctgccagctcttgctttcagaaggcagaagaagatactgctcaagctttctgacctttctagaaaggtctttcagggaaatgggatcaatgctaaagatttccatgagtgctctggatctttattgtactgctgaccaggcttaccttggtcacagtttggatgcctaccgcgggtgtttatgaatcacaagtaactttgccagtctctctgggtaaaaatgcggggtacatggtgccttcctggtggttgccaccaggtccctctgcgtctgctcccctggaagctggaggattgccttttctctaaaataaggacctcttttggggtgcctgaccatttgttggccagatccagaggatcggctctgccctggtctgggtgccccacggtgatgtttgtggcagagggtctcagagaagggagcaaagcagaatgtgggcctgtgtggctccggtcctcggtttcctaactgttggcagggatcctaaaggcgccaggtcctccctgtcctcctcagctgactctgccctcctcagtgtgtccacgggcacaggctttcctcctggcaggtggcagccggagacctcctgggtgtcctgccgccactgtggacctcacctcagtgctgtctggggccttcccagaccagtcccctcccagcgggacccaacccccgccagcctcagctttcaggagctgcccccgcggcgcgaacaatatcctttctatttggagttgactctgctgccctttggagatcccagcgcgtaacgtgagctcgcgaccagcgcgggggaggcgcccacacgcccgtcccgtcttggtgtctggccccaggcggccgcgcctcccctccgaggtggtcccatagcccctgcaccaggcggcccgcgcccgcgacctcaaggcggctgccccgcgccatggcggcccggctgggtgcgctggccgcgtcggggctgtaccggcggcgccagcaccggcagagcccgccgccagccacggggtaggtggccaggggcggggcgggtggcggggacaatggccggaaagctgcggcggcagggcaggccttccctcggaaacccgaccggggccctccgacgccgtgggctctgccccggcgtcggatgggccctgggttggcgacagggtgggcgcgtgcgactttatctaacagggttggatgtcacctgtgatcagctctcctggcagggtgcgcccagggacctatgttagagacgagggagcctgtgtagcccccagcactgctttcagacgggggtgatcatgctgcactttatagatgagcagacaggttctgagcagagcagacacctgctggactcacccaccccaaacatggctatgctgtgatttgaacccaggttagactgactccagcagtggggttcaggatggtcctcagggcatctcagagaatgagttggctctggatggggaggttgggaggggcacggggatggtggtggagccacctcccctcactcttggggtcaggggcatgaggaggagctcctgaaaatgttgcctttgcagtgccgaggggccagcggggaagagagagcaatagggctgtgaccttggggtccttggcatcaaggtgacagatagggaccctggggaggaggccaaggctgggcagaagggctggggcgggggggcagggagggagccaggaacataagtcgcagaggtaggggagggcctggaggacccaggagcagaggaaggccagtgccacccagggcaagcatagcccactctcagctccttgtgtgtggtcagggaaggctcccagagtggcaattagaggactgagccatcaaagatatcttttgctgagaacagaagaggaaggagggcaccgagtggagggcgggaactgcaggccggcagcacggccatctgtggagtccctgctgcatgctgggctcccgcttgtgctggcatggcaggtctggggcagcctgctgttcaggtggggacccccagactcaggaggccaagtcactcacctgagtgtggcagagctggagcaggcaccctccctggtcaacctctggacagccctggatgcgtgtggcataactgtggtaccaggctgcgagtggccagggcactgatggccccaaggctgttctggagtgattttcacagtactgataccacagctgagatgcaggcaggacaggcacgatgatgacaggcctggggcagccctgagcatgcatgcgcatgtgactattcacactgtttttctttgaacttctggttcatgtcctttgtcagttctttgttgttagtgtaacatgtttcagttgtacctgcttaaaagaaaagccactagagcaaagagatatggcaagggcttcaaaaaagctctaatttcagacaggtttcatactgatttggagtctgtttctgatggtgtcaatgcatcttgtgtatagcagcccaggcagcatgttaattttttcttttttattttattattattagactttaagttttagggtacatgtgcacaacctgcaggtttgttccatatgtatacatgtgccatgttggtttgctgcacccattaactcgtcatttagcattaggtatatctcctaatgctatccctccccccaccccccaccccccaccccccaccccacaagagcctctggtgtgtgatgttccccttcctgtgtccatgtgttctcaatgttcaattcccacctacgagtgagaacaggcagcatgttaattttctagcgtccccatggtgggctggctttttgtacatttttgttgacctcatgtggccaggtgacccgacactggcctctggctggcttcatggaggcggggcagggaggaagcccaggcagtgctgagggactggagctgctccctgggctgtgctgcagtagggtccctccccgaaaccctctgcatctggaatagtgcctatcagtgcaggtgctcagtgaggacttcgttggaaggaggacagaagcatgggctgtgcttgcaggaatggcctcactgaaccctcccaacagtccctggaggtagctattcctggcccattttataaacgaggaagttgaggttcagagtcctgtgctgcaggtcacacagacagggggcgtcggggccagggttgcagcctggtgtgcctggctataggggacacacccttggtctgactgctgctcaggccgacgtggcctcagcaacacttgctcatcttgggtgtgaccagacttcttgtggctggcccccaactcttcccagatccttacacacacttccttgactcagatatcaggaaggctgggatggaggaaggtctggggttgttgaagaaacagaatccggaatgggggatgccaagaggagatgggaggaacatgagtccaatcctctgtgaccctcagctggttactgactctctctgtgcttcaatctccttatctggaaccagcctcctccccttatacaaaggcctggaacagagcaggctcctctgatcccacctcagactcagggacatcttgcaacaaattggcttgtattggctgtcaaaactgagagccttctggggtgctggagagggctgaggaagggcatgagatggtgtgctctcccccacctctggggtttggcttccaggctgggtgtgccctgggcagtatgttctacgtagtccagctgggggtgggtagtggtgtctcctgggggataactggacagactctgtgctctctatcttgaaggaatgtgcaaaggaggacatggaatgtccacgtctctgaccctctgacctctcgcagggaccgcaggcagcctgcaggccttcccctaggctgagccatgcagagggactctggaaggctcccagagttgctggaaaacaacagttctccttatccagcgctttgccctgcctggcctggtgctctgtgctggacacgtgggtgccattcattcactttggctcctcgatgtggctgtttctctggtgcacctctttacaaaagagaacgtgaggcctacagaagcgagcatctctctccaggtcccaggctggtggctggggctatcacgtgtagagctgagcggctgggcccaggcctctgccggcctctctgtgtcacactgcctctcttcctcccctgcaggagtcaggaagcgtgttctctcatggtgctgtgtctccgttgtctctgcatgcttctgtctgtcccgtctttgctcttggagcagaatgttccctcacagagctgctgttaggggctctctgtgacttgggctggggcagcccctgggcacaggaaggaggtggccacccccacatccgccccccccacccccacctatgccacgctttgtgcgatactgtcggccacaggcagcaatgatctccctggatgcattcagggaccagccgaggaactgcttacagactggctatcaggtctaactggaagatgagccggaaggtagaggagagtgtgtgtggccaggctgctgtcaggttgaccaggtgtgtccagcattggctccttttggtgggttcttggtctcgctgacttcaacaataaagccatggaccctcacggtgagtgttacagttcttcaagactgtatgtctggagtttgatccttcagacgttcagatatgtccggagtttcttccttccggtggggttgtggtcttactgacttcagaagtgaaggctcagaccctcccactgagtgttacagttcttaaaggtggcacatccggaattatctgttcctcgaaacgattcctccccgtcggttcatggtctcgctggcttcaggattgaaactgcagaccttcgctgtgaacattacagctcataaaggtggcgcagacccaaagaacgtgcagcagcaaaagctactacaaagagcaaaagaacaaactttccacaccaagcaaaggaaccccaactggttgctgctgtgggttcgagtggcctggttttattcccttatttggcccctcccacatcctgctgattggtccattttacagagtgctaattggtctattttatagagtgctgattggtcagtttttaccaagtgctgattggtgtgtttacaaacctttagctagacacagagcactgattggtgcatttacaatcctttggctagacagaaaagttctccaagtccccaccccaaccagaagcccagccagcttcccctttcagtgggaagcaaggtaactggggagtgctagttgagggtgtgtttatgaaacggcgagggaggaagggtggtgaagcagctgggctagcagggcaggagtgcccataaccacaaggaaagtcacaggtcccagcagcacctggcccgtgggagtagggtcagcacagctggaagccagagggggcaggcgtgtgggtgcaggccctaaacagcagttcctggaggcagagaacaggagcctggaagggggtgcgagggatgtgtgctcactcactggggtctagaggtctggctttaaggcggaatctgaaaggctggggctgggtggaagtccttaatttggcttcgttttctgggtccttggagtgaggaattccaggcccagagccatgggatttcctgttgatttccgacttctctaagactcccaaggtctcgctcatgggcaggcactggaatgtcctccctgccaccttgggtgtgtgtttcagaagaggaggttcacagtgttctcccggaaggaaaccaagcctgtcctagtgaagccctgcccagccctcgagggtggcttggggcggccaggctccaccttggtggcctgcctggctcgccccgtggagaccagcagggagctgggagcactgaggaccagccgctgggtgccgaggcctcctttcttcttggtttcttcccaactcctgttgccaccatctttgcttccttgcccctctggcctaaatgtgggctcgcatggtggctttggtctcctaagcaccccagagggcaggccaaggtggacagaagcccagcatgcccagaaagcctggttgaatggccttccagacagcctctgccacatgggtccctaagcagagaagaaaggacagcctgggtgcccctttcaagtttccagtccatctccatttcgcagcagcctcctgtgagaccctccgcccacagcccatgcccagaccctaagcgcagccctgtcgtccacccctggactcatcctaaggcccctcttctctgtggttgacactcttcagactggccctgcccagattgcaggccgcagaacagcccgacaggagcctcactcaccaagcatttccctcatgatgtcgcggcagtgactgctgggtgggattcatcctgggaggcagagcaggcggagaggtattcccaaaggcactgcactcgagtcctgccaccacccggctgcaaccaggcagacgttaccagctggttgcgtcactccccagcgagcctgatgctccctctctgcccagtcttccaggaatccactggagttgacacttgagacagaacccacgttctcccttcctagcaaaaggtgtggggtatccggttctttgaaggtcgtagaggcagttggggtgtttaggactacatcctgaccctgtttttgagtctaaaaggcccctcctggctgtgccgaagggccctggggctggactgattgcgggcctggctcactgtgggcttttcccctgtagttcgcatttcacccctcccagaaggaaacccaccactgactctggggacaggcagtgcccagtatggatgagatttgctccccctcaccacactcccgtctcgtctcaaagattcatactcttgtcttttttatttattttttattttgagacagggtcttgctctgttgcccaggcctgagtgcagtggcactcagcctcggcctcccaggctcaagccatcctcccacttcagcctccagagtagctgagactacaggcttgcaccaccacacctggctaatttttttgttttcttgtatttttattagagatggattcttgccatattgcccaggctggtctcgaactcctgggctcaagggatccgcccaccttggcctcccacagtgctctggatgacaggcttgagccattctgcacacgcacccagctaccctcttgcctgctctgtgtttgggtggttatgtgtttattggaggcagtcagtttgaaactaactcatggtgcagaggatggaaccatggaagactgagcagtctggattcaagtgtggaccccgctctgctgtgtgagcttgggcaagttactcaacctctttgaggcttaggtcccttttctggaagaggccataataatagtagctgcagtattgccctggggattaaatgagagtgtgaatacagagccgctcacctgtgctgggtggtgttctgtgtgcgagactctctggtccctgaagaaggggtaataggggcccaagtgggagttgactgggcccctgacaccccaaggggtgggcactacaagcactgagcagcctggaccctgggttagagcgattttcctgatcctgcagagcgtcttcactttttaatacgaggtgtgtctgtcgggcgcaggcccccgcgtgtgccccatctgcacccctgaccagctctgactcactcctcctgtctcctgcccccagcaatatgtcggacgccttggccaacgccgtgtgccagcgctgccaggcccgcttctcccccgccgagcgcattgtcaacagcaatggggagctgtaccatgagcactgcttcgtgtgtgcccagtgcttccggcccttccccgaggggctcttctatgaggtgaggacactactgagggctttctcagacccagctcggagtctgccctctatgagcgggtgggccgggctccatgcagtggtcccgactggtgacagggccaggtctggagccagcccagaaccaggcttgagctcctgcacgggcccatccttcacctgtgagatgtgaacagcaccccaggtgccctgggtgctaacagagagccacctttcaccagcctcctctgggcagatgctgggcaggccctgggggcaggaagagcctgccctggtggtgcttgccctccctggggactagacagtgagcacagcaaccgcatggcccaccagctggtgctgatgccctgggggtcagggttcccggggtggggtgcggtggtgctcagggaaggtgaggtttgggcacacctgaggggagggagacatactgggcagagggcaccgcatatgcacataccctgtggtgggagaacatggggtgtatggagagcagtaggaagactggtgtgatggaagccgagggcatgagagggagaaggccaggagctgaggaaagggaggtggatctcgcttggccccacgggcctctacggagccataggcttcccctctgcaagaggcaggagccacctcggggtgtggagcagaggagtcacactatctgctgacatttgaaaaggtgacctggccgggcgcggcggctcacgcctgtaatcccagcactttgggaggcggaggcagatggatcacctgaggtcaggagttcaagaccagcctggccaacatggtgaaaccctgtctgtactaaaaatacaaaaaatgagcctggcatggtggcaggtgcctgtaatcccagctactcgggaggctgaggcaggagaatcacttgaacctgggaggcagaggttgcagtgagccgagatcgcgccattgcactccagcctgtgggacagagcaagactccatctaaaaaaaaaaaaaaaaagaaagaaaaaaaaaaggaggcttgtggccgctgtgctgaggagaggatgtaaggcggggcaggaacagaggctgggccaggaggctggggggaccaggagctgaattagtgcaatcacccagatgaaagtgaaggggcccccaccagctcacaggagcagtcgttaaatcatcaacaatcttgggagctggttgggcaacagagttattgtttaaaaattaaattatatcagcgtacaatgggatacaattttattaaaaacaaaggtaacaaatactcaaagcataccacttgctaattattttgttccactttactatcgtctatgctgatggggttatttctgtccattgtgctggtgtggccactgcacatctcccctcaagtccacatcgatgtcatgttggcagccaggagttggccatgacgggaatattcacaccatggacactggcaaacgccccacagcagggcctgcctctgcgccccagagagctggctgttgagcatttaccagaacatcacttgtgcttgtggtggcggtggtggccaggggtcagatgctggctctgtttcaaggtagagctgatgggactggctggtggatggatgtggggcctgtggtccgcctggcagagcaagagccgctgttcctcacagtgtcttcagcctcctgaggaatgctgtctaagtgtagaggcagcgggaggggtgggcaaagctctaggaggggtggccatatgcccagaacaaagcctctctctctcacacacagcaggtgcccagaagattttcattgctgaaagagtttaagcccttcctgactctacaggtcactgggtagggctatatccagtttagtctaataagacactcattttagagaacagggaaaaaccaattaaaaaacagaaaatacaattgttagaggaaagcagaggcaggctttggccccgcttgtggccagcacaggggccctcgctggcagctgccgcctggagggtgtgcacactggctcctgctggccgcagccctgagctcttcccacttccccgtgcccaggcccttcctgcgttcccttccttctgtctcctatacccgggtcttcatggcctctgagagagctggatactcccacagagaaggtatacgaaataggaccaagtgacactacacttcagactggatctcatccctcctggcttaaaaccgcctcgcccccagcctgttctccggaccaacagggtccagatcctcagtagacaccagtggccctttgacaggtggcctcacggacctctccagcttccacgggggcacctccctttgcaccccaccatcccaaaagggccagtgtcctctctggccaggcctgggacccactgctccagcctcagcccggcatgcccctgcctcagtgcctcatcccctgctgtcaggtcctgacccaacaagggcctgggctgctcatggggatgataggtggtttgcttgtcctctctctgcgacccctttgcagtttgaaggccggaagtactgcgaacacgacttccaaatgctgtttgctccgtgctgtggatcctgcggtaaggccggtgacagtacacatcctgggctgcctgggaagtgggcagcagtggcggggggcagggggccgagggggtacacagaactggcccagctctttcctaactccccaccttgcctctctgagcggcagccgtcaggccccctacaggcatcaccatcccacgagggagcccatgggccaggcagagagcaggcggagtgctaggtggacagggcttgggagggtccgaagaggggacaggcacgtgctccccagccagcagggacctgtcttcttccaggtgagttcatcattggccgcgtcatcaaggccatgaacaacaactggcacccgggctgcttccgctgcgagctgtgtgatgtggagctggctgacctgggctttgtgaagaatgccggcaggtgaggtggccgtgttgggccagagaggactgggccacagcccttcctggcacacctgccacctctcctgtgtgctacccacttgctgagggcgcagaagggtcccggtgctgcagcctgcactgatgtagctgccctccctccaggtcaccccggggcggatagtccagctcccagtttacagggccccacgctcagcgagctcctggcagcctctcgggagccatgagaaatcctcacactctgccacccccctggccaccccatctactgaccccacctgtccaccttctcctgcctgtacctgtgcagctcagtgtggctggagggagatgcccacatttactctaaattgagggccacaaacctcatgggtactccagaagttcccaccttctgcgaacccttggtctctcatcctcccttcccaagcactgtccctatagcaggtggccttgtctcccacctcccctggccctagctctgagatcccgtgcagcccggcctctgtctgtgagccctgttcatccccacactttctccagggcttgcttctccacgccactctctcgtcctttctgaaggactgggctggggagctgggttaaaaacactgctgggccttcctccccggcttctcccagcacacccgctgcccctcgcgtgtgctaccctggcctcatctgcccagggacccacacctcctcttgacccctcagcagccctcaccacagctgctgaggtgcagaaacgccccccttctggcacccgggaccctgagttcctgtggttctgcccgcccccacagctgcacctgctcactcccctcctctgagtcacctttctccctgtctctccatggggagtcgtctggggctccgtgcccggccctcatggctgcccttgcagacagaatcctagagccctaaatggcacatgtgtctggagaattccaggctccacttcaggcctctctctcgctgtcctcagctgcccacatgtcacctccacttggtgtccaccaggcatcccaaacgcaatgaggcacaagcagtttgggattctcctccactgaccaccaaggctgcctctgcatgcgtcccctgtatcagtgagaggcagcgccgacccccagaggccccagccatgcttcccctgccacactctctctgtccgggcactctgctccctcccgcagctcctccgagatgcttccccgacactaccgagctcttgtccgtgtgctgcccgtgagagaggcacgtggcctggggcctggcgtccggcccactgtcctcggagctgggcggtgcctggcattgagcagcttgtctaaatgaagggctgaggggcagacggtgcagtgcaggggccgagggacagcaccaggagctcgtgctgaccagcaacgtcgccgacagggtgtgtggagcgagcccaatctccttcctgagccaaggtttgcacagggccactgccccaagggctggttggggaaatctgaaagatgctggaaacgttttggaaagtcaaacatgctacaaaagcatgttgccgtaaggacggtgcagggtggcagctagagtgaggaatgagggcccctacttggccctcccagccccacagtgcagaacctcagaatctgggcagatgtgctgtgagctgccagagccccagcaagagagcccacgaggctgcctctgccactgtaccaccacttcaccattcttgggtcagagaagttctgggaaacgcttcatgttgaccaaacataacaacctgtgtagtcttaaagctacagttatatttatggtccgtacaaacaaatacaaaaaaggacatgttagggaaatatctgcacactagcaagggaaatagctcaggcggagagaggcctctctggaggaagtgggtctgggtcagtgggaggcaggtgcacagcccagccctggcctgagctgagctcccgtgactgcacatgcttgtccaggactgggaggcctgggagcctgtcaaagagctctgggggttgcaggcttgtgcgtggggttacagcaggagagatccagaatccagagctgtgctgagtccctgcaggccgtgagtgctgacgtccgctggcaaccagcctgaaatgtgtggcctgtgtctcttcaactcaggcagtgtgtgtctggcagaggcactacagaggggactcagagtaccttgcactgcaaaggagtattgagactccctccccgtccccaccaggactcccaggtccctcttctgggtcatttgcagcctgccttcagggtctttctgctgagcctcgccgatgagcgattctgtagcgggaaggaggctgggagcctagcgggaaagaaaggcctccattgttcaggggttgttcttccggcctcctctctccctgccacagatgaagtcgttgagtgtctaggagccattgtagccatcacaagcccctgcagaggggtggccgatggatcccctttgtcagttcttcctttttatgggttgagactaggcgatctagagaaatggtgggcatctgctgagatttcaggttgcttgctggggaggtggctggggaaagggcagatgcctcttgctgggtctgctgagtcctaaacagtctgcgctcggcctggacggcgccccccgctcacagctctgacttggcactcagcgagctctcgttggttttcccttcgaagctggggggcgggcccttgagccttttgccacagagcaagttgcacagggcgtggcggaacttctcagccacgaagaaatacatgatggggtcgagtgccccgttgaggctggtgaggcaggaggtgatgcggtttgccagggccaggatgcgctgggtggcgcaggaggccccatggctgcggtagtgcagcacgtagacggagcggttgacgtggtagggcacgaagcagaccaggaagatggccagcactatggcgatcatgcgcactgccttggtcttgaggcgcttctccacacgcaggccctgccgcaggctgcggatgatcagcaggtagcaggtgaccgtggtgatgaacgggaaggtgaaggccactgccagggacaccagggcatggtgggaggccttctcccggtacagctgcaggcagaccaccgtgtggttggtctgcacggtctgtgggctcaccagcagcggggccatggccacagccaccaccacccacaggaaggcacaggccaggtgtgcgtagaggggcctgcggagcttgagggacttgaccgggtgcacaatggccaggaaacggtcggcgctgatgcaggtgaggaagtagatgctggcgtacatgttgaggtagaagaggaagccggtgagacggcatgcgatttccccaaatggccagtggttcccagagaagtggtagaccaggcgggtgggcaggaccagcacgcacgacaagtcggccacggccagatgcatcaggaacacgttggccggggtcccggacttgtggtctcggatgaaaagccacagagccagggtattgccaactaaagccaggataaaatccagaaggtagaaggaggcgaacagcatgttctccagtggcgtctcctggccacattgctctgccgtggccagggagaagttggtgatcagacctgggggagccacttcaaggccattcatgctttggctggagtcagagcctggagggaacaagcaaacagttcacaatgagcttgcgatctaggcagcttcacgctctctgaagtccagaagtcaggcctccaatgccttcagaacctcccactttcaagctcagcaccgcccacggggctgctgaggggacctccttgtccatttggtgtgcgtgagcgtcagaggcattctgaacttcagcacaaggcaaacgcagaaccagggcttggaatttcgccgctatgcagctgcacccctgccacccaggagatctgaggctcctcagagctgggaggaccgggtcagtgccatggcggggaatgggacgtgagccttgcctgggtgaggctctgggttttctgttctgcctctgaggtgtgctgtctgagtgacaggggtggtgaggggcgggggcagtgtgtctccgggattccagctcctcctcagcccaagccttggcaggtgagttctgttcatcctgagtgcctggaccctccctgacccacctgcccacaggtgcagtggccggggtgtcaccgctttctgcttcccctgaccatggcttgcccctggcacttaggagggtgcccccaggatggcagcaagggctgtaccctgggacgtcagaggtctactctttttacccacctgagagtttcagcatctctcttgggggctttctggatccagcccaccaactccgtttggacatcctgacaggtggggagacctgtgtttaggagaagcctgtgcctgggtatcaggccagctgggagtattttctctcccagagtagatccaccaccagggggcagcatctcttccaggaggggaagacccattttacccagcgtcagagacactggccagcgctgttgaggacggatctgcagccccagagaggcctggaggcctcgtggcttgcccacgtttgaaggccaagtgcagagccctgtgacagtcctgggtaacaagtcatgtccgtctggtgaaccctgggtctggatagggtgctccccaccctcagcagagaaacccactcttgttttgattttagtcaactcagaagattgaagaaggagagtgagggtcccaaacactctgcctccccaacccaggcctgcgagtggcagtgtgggcaggcggtggggccagagcagcccgcagcccggaaccagggcaggacagcgcacctggcctgcctttgaattggggtcaccagcgggcttcggccaggtgggtgctgatgatggcacagcttctggggctcctctgggcacctggcttcccagtatccaccatccccaccctgcacagccaggctgaagcagaggctggagagaggtttgcataagagaagctggcatcctgcctgtgcccattgtggcagcaggaggggaggaggcacgggccacagccctggcagggtcctcatcctgggcgagcctggctctgcaccgaacagccggggtcctgcctgcagcaaattcactctgcacatttctccctgcccttccttccttccttccttccttccttccttccttccttccttcctaccttcctctctctctcacttcgctttgcttgtttgcttgcttttctttattttccttttttcttttcttttttctttttttcttttctttttccttccttccttcctttcttcttttctctttctttctttttctttctttcctccctccctccccttcctcccctcccctccctcccctcccctccctcccctccccccctcccctcccctcccctccctctcttttttctttttttctttctctttttcaaggtctccctctgtcacccaggctggagtgcagtggtgcaatcagctcactgcagcctcaacctccagggctcaagtgatcctcccacctcaacctcctgaatagctgggactacaggcgcacaccaccacacccggctaatttttgtattttttggtagagacggttttgccatgttgcccaggctggtctcaaactcctgggctcaagtgatcctctctccttggcctcccaaagtgctccttggcctcccaaagtgctgggattacaggcatgagtcactgcgcccagcccctctcctcttactgattccacagggctgtctcaggatgctggtggcacggggcagagagggcatggtgactgttcatggacacagcagcccctcgaggaggaggctggagccatcctcatatggaggagaagcaggcatggtggtggccctagccctagggaagggtgggccgcacccttccttcaggagagcgagtggccagctgctgtggccctcacatggagggtgagggctggcccgagcacctggccatcaatgtcctcaagcaaaggggagggcaactacctaataatattaccttttagctatttctctaggcaggttcccctacctgaaaagattgcccccggcttcagagtgtttcaagatgcctgaagttctaacaccagagatggtttcctgctgcttccaggaacagggtctgttcttagtccaatgtggagttcctcatggggaccccattccccaggaatccaggttccacagtactctgacttggtctggctggtctcggctggcactttccctaggactgctaaaaccacggtgagggcggagagctgagggccgaagaaggcggggtgagtgatgcttgggagagggagacaggcttggctgaagccctggggaagggctgagggctgtgaagggggctgtggaggagaggtaaaaggagggaggaacacagcccttgacagggcctgtgaggcaggggagaacagggagcaggtaccggtgggacggtggcaggggaggggggcccatgactttgagggtgtcgtgttgcatgtgctgggggtgaggacccggagactggaggaacagggctccagggcagacgcatgggcaagcagagaggacagcccatggtagatgggaggggcacacaggtgtgctgttttcaggttggcaggagaggaggaaggtgtgtgcggggaggccctggagactggaagaggagagggggcccagtgagtgaggggcccttgttagaacctgggggtgggaaggggccaaggtgggtgccctccaccccaggctgtccctcaggcctgtgctgtgccccacagtgcaggcatcacctggccccacgagagagcagctcataggtacgactgaccactctgcctggcatggtgggggcctgcctgtgctggctcaaaccagttttagccccatgttgcaggttagggagtcaaggctgagtgtctgctaacttgtcttaggtcacttgaccaggggacattggccctggagctggaagtgagaccggggaaacggtctcactccctggaagaccgccagggtggggagtgtgactcagtctcagagtttgccatggagttgtctcccaggctcagcaccccctcctggccctggggccactccctcattttaggggcccatgtatgaaatgagaatgtgcagccccttgctcaaaaaggaagagtttcaggacagtgacggcagagtgttactgggctcagggccctgagtgacggcaggggtggcatatctcatggcaccaggtgggcctgtggtgcctcctgcctccagcccgggggcctcagcctgggcactgccctccacttcctgcccgggccgaagggcgtgcccctcgctctctctgggactgagactccattttaaacagctttctggttggtttcaggtttgctgaggtttcttctccctttctgtcccccgtttgaggagttctgatactgattgttgcagtttggtctgagatgggccccgcttcactctctgttgccctttagaaacacaaacttcagtctagactcgctggttcctcacgactcactggtcagacggccaccgagccggtgtccgtaagaggaaagggcgtggcatgggccggggcctgggcagtgttgggtcccgtggctgtgggtgagtcgagcatctaggacaggtcataggcctctgtggaggtggcaggtgggcatgtgtggcctcggggagggcctgtggtggcagcgccatggccaggtggtggcagtttcctttgcattagcgccactccatccctggcccgagccctctcccaggcatctggctcctctatgggtcaaggctgcctaatggttaggggcagcggtgctgtcattgcagcctggactgccggcaagccacttcccctctgcaagcccccatcagagggacgaaacaccgctttgtgggctgctgtgaattcagactgtggtcagccttcgatgcacaggtcagaccatcaccaaagagatgggacgagacaggctgctgcctgtctccctgggcagggctccccgctgagtgtttcctctgcttagccctgggctcccagtccaccccacccagcctgccccttacctctagctgctggtccgggaggaagggacaggggtctgcggggcagcaggtgatctccgcccgtgggtgtcggtggtggcagggggctccttgccgctgtgggtggaacgctggctatttaaggagaggaagggagaccacagcccctctggccctgaaaggctgcttcattcctgaggggtcccttgttgtgtcgggctgctcctctggctgctgctgctgctgccaccggagcgtgaatattctagtgtgtccctagcccatgccccccgcccccagcttggccacatagtctgagtgtgtgactgtctcagagactcagagcaggcgggggctgggtggggggcttgggctggagctgagggacacaacaggacgtttcagaaggggatgatttcctactgatggggggcagggaggggccggctgtcatggcaacaggcggcgctcccaggcctgcgcccgcagacggcggagggggcctgtgaacggagggtgggaggccgaggagtcttgctcacggagtgagaggcgactctttgaggacacttgctgtagggtccttgtgtcctgccctgtataatgaggccccatttgggcacacagaataaatcatggcctttatctggagcgaggaacagctgcaggagcctcataatggggcgctgtcctgtccgtgaggatgcggctcagctcagaggccgggtgctcgccggtgcagctccccttctgcacggaagcccatgaatctgaccgctggcctggggctcctccctggggtggctccgggctggggtgcctttgaatgctgccggcggccgcctctgagactgagtgaacaaagttcatttctctctgtctttctgaaaatgatacatccagcaacatgggaaaccaaatcacccttcctggtttcaaaagactttacattttgttgtttaaacattgaaaactgtatgtatgtggctagcatttaaggggcagtgtcttaaatttgtctcttcacatcaccctgtgcagctgggattattgccccattttacagacaaggaaactgaggctcaggcaaatgaagaaactcacccatcaacaaacagtaggaagcaacagagccaggatttgaacccaagcacatgtcactccagaacttaggctccgtgtgtgtgtgtgttttgtttttctgctgcattttgaatttagaattcttagatttgatcctaattcaacctgaaaaagaattctgaaggccacctttagatctgatgctgtgatctggtctgttgagaagctgtttcccatctggacttccttcaagagagatgggcttcccagtttgtctggcctgagagccagctgggtgtgaggtgtctgagccggggcgcaggtctctttcctgttgtgcccgcaggcggctgtctggaagaactggcccaggctggttggaaaggtggtggcttgaagctaaccaccctgagcagggcatttctgggctcacagaccttctgttattggggtgatcactgtcgatggcttcaagggcattgaccgtggtgatggagttttgaggcgttgagctgattcctgcatctttgagacagaaataattcctcgtgggttgagtgttgtcctgacgctcaggaggagtcaccagaatgtggagtggggtcatggggcctacatgctgagtctgggacagaggcaccgcagggggcatgggctggccgccataggcgccaggtggggcagctcagccccagacctgctgaggaggtggcctggggttggggctggggcacaggtgtctgggcaagggtgggcttcagggattgtggtgatgaagactgaagccacaggccacaactgcttcccgtcgctggggtgtaagagccagggctctggccagtagtcgaggggagatgatgcccaccgaggctcccttcctctcttgtagagtcattcattcaccgaggcattcggtcagctgaccctgagctgttgccccctgctgggcacatagggtcttggggaggcacagagagccagtcggcagcttagccagtgactgctgggcctttgtttgggccccttgccctgcacacagctgatgatgagacaccccagggcagatggagcacagtgctgtgcaggatggagtccagacacccagcagtagcaggtcctggggtccagggagggatgctgaatgggtggccctggcatctggggtctgcccaccataacctgggtggggatcttgggtctgcgattggatctcttccgtatcctccctgaccagcctgtcagaggggccaacactgggcgtcgggcagccgtggaggctcgtgaggagtggagagggcccctggggctggggggcctgggaagggaggcctggatgcagcaggagcaccagagagagattcgggtggcaggtggagacgggggccagggaggttggattggggcctttgtgtatctttgcctggggactctgaatctagattcctgccacctttgaggtccaaggaaacagaaaccatgttgatttgtctctccgttgagaacacagctgtcgtccaacacagcgagtagcatcagaaattattctgaggtcttcacaaaaagactctgtagtgacagttcctgggtttgggggcctccatctgacatagcagtgcttgtctttggagacagaaatcgcctgtacgtgtttgggcccttcttcatctggcaaaccccgaaggaagggggtgagtgggcctcccgggacactcactggccactctgctgggcacagtgacactcattataactcgtgtgtgttaaatacattgggaaaataatgctttcagcagatatcaattaaatgtctactgtattctgcagcatgccccaggcttagagaaagtagaaagaggaaaataccatccagagacagtaacctcgagcattctggcatctttcctgctgagcatgcgtcccattcccaggacacacttgtgaccttctgggccttgtgacagggcagtctgctttcccataccctgggctgagcccctttgaagcccccagctgctcagtgaagttgcaggggtctggcctctcttctcctggaggtggccaggctgtgtgggagtgggggctctgcccctaatgcccccgcctcccgcaggcatctctgccggccttgccacaaccgtgagaaggccaagggcctgggcaagtacatctgccagcggtgccacctggtcatcgacgagcagcccctcatgttcaggagcgacgcctaccaccctgaccacttcaactgcacccactgtgggtaggtgcgcagcccggccctgcagttgtgggggcggggagccagggctggcccagggtaagggcggtggggcctccacctggggaagtgttgaggagggagaggggagcagggtgggcagacagaggggtcccgagagcaaggctgcagggcagaggtgggctgggggctgggaagcagccatggcaggaagcttctctctccagggctctgtttggggggcacttgagactcaggaggcgggtgggctggacccctagactgcagacgagggttgagatggagcagtggaagggacctgagggggcagggcaagagaccgggagtgggcttggtgctggtgttggagagaggagttgcataggcagcccctcagcccccgtcctcgcccacccccaccgtcccctccagtcctctccgtgcctatccagacaccccctctggtttggaggaggaggggggcccaagaacagacctgcttctcagaggcctgggtgcagaacacagcccactcttctgggctgtgcaggaagtctgtgctccagggcctgtctggggcacaggaagtcttcaaagtgcccagagatcagaaggcgctgccgcctcggctctgcagggacagaatgggcccctcggggagccgtgccctggggtggaggcgctgctggcatgaccctgcagaagggcaggggtggcacctgggggctgcacgctgtcttccaggaaggagctgacagccgaggcccgcgagctgaagggtgagctctactgcctgccctgccatgacaagatgggcgtccccatctgcggggcctgccgccggcccatcgagggccgagtggtcaacgcgctgggcaagcagtggcacgtggaggtgagccaggctggtggacacgtggcctcaggttggggggtgccccagctcagggtcatggtaagagccctaaagctcctccacactcccagcccagggcgggtggctggctcccaacgaggcccttcctcaggggtactgcccctccctgtgctcagccagggaccccagcctgcccacgggagccaggagacccgagtgcacacacacggttgggtagctgtgcccacctctcctcttccccctgctggcattctaagagactccaaggtcaggagaaaaccttgggggcagtctgtccagagtgcctgggggttgtggatgacagaacccgctgcatggacagccctgtgcagacacggagctgaagagttcctcaggtgtgagcactgggtcacctggagtgcccccaccgggtggtgggctctcatgttctcatgggtacactgggaacagtgagcccaccacctcccctgatgacctggccagcgctgtgtccggaagctgtgccttgggtggcggcttgggtgggaggccatgcggtcctgccctgatgcaggccccagcccccagccctcatcctcacatgcagatccctgggggaatgcaaggtgctgctcagtgatcccaggcttgcagggggtgcctgcaggaggccccacgtggacaggcagggccgcctctgcctatgagggcccaccatgccgcagcaccaggctggcacctgactcctggggctgaggctgccgagggggaggccagactgggaggggatggtgactcacaaggttaccatcagtgccttagaggaggggtagggtctgctgaccccagggcattcacagaggtgtcagtcccctctgcccagtgtgaatcctgaaaggcctgcacctgcccagactctgctttctgtccccttctgtcactgctgcctcctggggccactgtggtcccctggagtcactggctcctggggtcactgttgtccccgggtcaccactgtccctcggggtcaccgctctagccctgatgccacccggcccgccctttgtccttgcagcactttgtctgtgccaagtgtgagaagccattcctggggcaccggcactatgagaagaagggcctggcctactgcgagactcactacaaccaggtgagcccggtgcagaaccttcagggatgcgggtctggaggggtggccaggagagctgccgtgagcaagggaggctgtgggcaccccctcaggagctctgccaggtgctgagcccaggcctgcaccctcagccctggctcctggcctggggtctcgagacctgggcagctctcttcagtctcagtgtcttcctttgaagaatgttctggggctggtgtgaggtcccgggcacatggggctgacagtgccagcaaccccctccctcccttgctctggtacagaaggcagggggcgctggtgggatgcagtcaccacctgggcccacctccttgcaggacagcagtggccagagcagaggggccttctggggagcaacgccccagcctgttgtccttcccggaagggtggttctcatgggttgccgtgccctcaacccagccttgcagctgggccctgggaggcagggcctgggagatgcctgagaggggccgtgttggagggccaggctggctgcatgatggccctgggctggggtgtgactgcctgcagctactctgacagcctgctcggcccacagctcttcggggacgtctgctacaactgcagccatgtgattgaaggcgatggtgaggccctgtgttccctcccccaccccacctgctctcctggggcctgggtgctgcagctgtgagcccagccgggcctgcggcagcctagccaggcctgctgagtcccacgcttccctcacagtggtgtcggccctcaacaaggcctggtgtgtgagctgcttctcctgctccacctgcaacagcaagctcaccctgaagtgagtccctgtgatcgtgggatggggctcagggtggagggggctcctgcaggtccttcctctcagcagccctcctgcacaccagctgagtctggcctggggatatggtggggacaaggggcagcccggccttataccacccagggagatgggggcaggttcagggggtctaggggatccagggaccccagggaccccaggcacagtgagaggaggaggaacactcatgcctccaacacacctgccagaaccctgggctctggggagggaagggcattccagctcagggaacagcatatgcaaaagcagcagtgtcagctgctcatccaggaagcctcgaggggtgtgggatggctggagctgggagaggagagatggcgtccaggtttccaagggctgtggggaggcatagagggttctggggtttcagaacctgagagaagcctctgggaggcaagggaagcctcaaggcccttctcatccctatgctctctggccatctcaccctagggcctggcctgctggctaggagaggctggtgtggggaggctgggggctgagggaagcccactccacagtcacctgtctggggttaaaggggtgggcgtggggctctgctgacagctcagcttcctcctcaggaacaagtttgtggagttcgacatgaagcccgtgtgtaagaggtgctacgagaagttcccgctggagctgaagaagcggctgaagaagctgtcggagctgacctcccgcaaggcccagcccaaggccacagacctcaactctgcctgaaggccctcttgcgcagctgcctctcggcccctccgccttctcccctcctgctgtccatgcttggccccctcgtccccatccacctgtgccctccgcatcttaccctccctttctctttcctcattgccttctcccttcctgttccctcatctctgccttccccatgtctctcctctccttggccgtggcttctgtctgtgaggaggcaggagctggggagtgggagcctatgaccccacgtctgacagccatgtccacctgtgcccacagcttccgcccacagacctccagggacaggagcaaattgcaccacagctccccgcctggcctggccctccccaggcggctcagtggctcatgctgtcctgtgagagcccctgccccagagcggccccactaagcgcatgtggctcctgggctacccacagccagggcagcctgctggagccacagggccagggccatgcagatggaggcctctgggagccacctccaatccctcaccactcactcaaccagtggcacagtgtccttgtgcccacactgagccagcaagtcctgctgtccacacccacaagctacctggagggacaggacccacctccatccttcggaaggccttcctggaatcccaccttggcctccgccctcggttccgccccgcccctctccccccgaccttggggcttgtgtcgagcccttgggtggggccaggaggaggtgatggcgtcagaggaggtgtggtcagaggtgacttgttcccacctccagggaggacgcttcgtcttcggccagcgcagacctggtgtttgtttgttgggctcacgcttgcacaatgaaggcttgttcacac

SEQ ID NO: 15670 - DNA, 43359 bp, Homo sapiens
ttttgcagtctgtccgtggatactgtgaacatcaggctactcggccgggctcctgcgctcagggcttcgagaaatgctcattttggggctgcccctctgccggcctctctggattcagagggcagccgctgctccttttgttttgtgggcctggctctgggcccggagcagcacctccctggggaggccgcctttccttccgcggcttcttccgtctcctcctgaccccaaggtgcctccggcctctgcctccagctaaggacctctggccaagcctcctgcccagggagaggtgaagctgccgtgcctgggtgccccgtggtggccggacactcctggcggctgctcagtcttgcacgtggctgtgccaagcgggccaggcagctgctatttccctcagagaagttgctggcggcgctcagggaaggaagcacccgaggaggcggagcggcatctcagccacagaggtaaagactctgtgatgggcacagggccccgggaggtcctttccacctgccaatcgctgcgctgcccctgcaattccctgtactctgagtggttgtgctaatgttgctcatttggggtcaaggaacagccctggaggggctgccctccgtcaggcggcatggggacggtgaaggttcagcccactgtggccgcacgcggggccttctgcgggcgaggccacgtttggataggctgggcttgggatgggcagctgctctttcccctggacagagtggaacaagctccagtgggaaggtcacaatgggaaaaaagaagcaaagtgaccctcagtatgtggaagagatactctcagaggcagggagaggcaggtgccccgcaggtgaggagctctgcgcccaggaggcttcttgctggatactcgacggcatgatgtgttgaggtgttaaaatgtggcattcctggatatgtggtgggggctgccctcgggtagccaaacccatgagatgaatggagtctgtcccagagcaaaggcgagagtgagatggccttttcctcccgaactccaaggccaggtcatctttggaaaattgtgaagctcgatggtccacctctactcctgagtaaatcagactttcaagaagggcactgtgttcccctcagactgaaaagaatccctgggtctcttgtgtgttctgcaaatgttgagagaattgtggatcgacattccgccagcttctctcactgagctgccgtgtggcacagggagaagtaaggccattttgtgctggtcagagggtgtgtctaatgacagttctgagggcaggctcatatttttatttttatttatttattatgattatttttaaaagacaggagattgctctgctgcccaggctagagtgcagtgacacaatcatagctcactgtaacctcgaaatcctgggctcaagcgatcctcccacctcagcctcatgaagagctaggcccacaggcatgcaccatcgtgcccagctggttttatgctcctagttttaaaaagagacatttacttttcaatgtgttgtgaaacctgtgggtgccaggggcggtgtcctgctcactattcttcctttggcccagggagccgcccgggagggctccggctgtgcaggtgcttccccgctcccccccggggggttctcacagccacttcccaagttaactttggtctcgcaggaggcggctgaaggctttgaactttgtgttgatattcggcaggtctctgtgttttgccagttcccagtgccctgaaagggacaggccttaaccagatttggggcacaggccttgtagagtggccgtctgggtggcctcacatcacacggggccattcttggaacaggcaggatgaacagcctacctgttgggaaggcatgctagctcctgccccaggacctgggctgtggcaggagaccctgaggcctcctgagagctgcaaggccttctccattccctgtggtcacatggggacagggctgtggctctggatattggcggaggctcattgaggcactttgagaccccgggttctcctcagcctcctactgctgattagccacgctgaccaagcccagcccctctcttggccctgggtcccagctcccacgagcgttgggccctgggctgtctcaggtagctgtcccctggagtagggaagggagaaggtggggggtggagaaactcgggtacctgcccagcaaagggggtgcccacctgccctgaaccccagagggcagaaggctcgtgcccagggagatgctgcacctccttcaccttctaggacagctgtcatgtcactctgtggcccagcctcagcctcagagccccactgtcccccagcgaagactaagtgtgtgattcaagccactctctgaatgtccctcagtgatgccatcccataagacctgggaatggacactgcattctcaccttccctccccttcccctccccacttccaactgccgtctcttctctgccccccctttcagagcattctccccccaggggcactgtgtgcagcactctggggagcaccatctacacagaccccagggaggggtgctcctgggggaggcattgcaggggccctgcctgcccctctgcagctggactcaggcccctcactccaagggaccggctcttgacccaaacccagatgcttccctggcctctgcacgcagcagtgtgcacacggggcagtggcgcacctcctccctggagctctttccctccgggcttctgtggcacctcacactctcctgctctccccctcactttctgccagtcccacctcttacccttggagggctcctgactggtacagacaccccagggtctccatggagccctagagttgaaattccatttgtaccaagccttctgcatctacgctggagaatggacctctcttccctgctccaggttcacagtgccccgcccaccatctcccctgggatgcctggggagggcccaatgcaacgtcacccctcgctaacctgcccagactgtcccactgccaccaatatctaggaaagcaaggccacctgcaagtcctcttgactcccacggctgtacattcacacctgccacacacacacctgccccacaaccaccacacctgtgctgaccacgcccacgccggccacacacacacatccagattcccagcaaatcctgttggttgcaaaatagatcctgtgtttgatgccttctcaatgtccctactgtcgcacggcccaaggcaccagtccctcctggacgctcaccatagcctctaatcagactgtccctgagaccactctgtccctcacacagtggccacacagcagctagggacacttcccccttttgctatgaaaaagttcaagcactcatcaaagttgaaaacccagatacccaccacctagattctcccattaatatcgtcgtagactcacgttaccacctctctgtccttccctttacccatctccccatcttgagttcattttttagaggcagagtcatgctatgttgcccaagctggtcttgaattcctggcctcaagtgatcctccctcctcagcctccccgtagctaaggactagctgggactacggggatccaccacatcggctcatcttgatttaaacaatgtatttcaaagtaagttgcagacatcagtacctttctacctaaacacttcagcattgtatgtcattaactggagttcagtatcgtttacggtatttttcttttgaggtaaaatgtacatataatgaaatgtgcaaatcctggccatatattccatgagttttaacaaaggcatatacacttgtgtgacccaaactcctactaaaacattgcctgttaccccagaaactccctcacattccttcctagtcaacccctgtcctgccacctcagggcagtccggggtgtaatagaccagcctgaggcagccaccgttctgattttttctaccacagacaaatgttgcctattctagaacttgatatagatggaaaaggtgctcttttttcattcagtcagtatttctgagattcacccctgctgatgctagagtgttgtgtctgtctttgcttagaactctccatctaagggtggaatcctacttctgctgtggccctgctgctctgccctgggccctctcctttatttcccgtgcccctccacctgccacctcccctttttccagacccactggtcttctttctgaccttgcgtaccccaagctcatgtcacctcagggctgttgcacttgctgttctgccggaatgcttttcctgcagatggctgagggctggctctttcccttattctggtttagcttgaatgtcacctgctcagaaactttccctcacccttcactctaaagcagccaccaccattgtccttttctttgcagcacttacccttgtctaaaatctagtttgcgtatttatttatttgtttattgcccatcctccacctcctgctaaactccatgagagcctggtccatggcttctttctccccctagtacttccagtgcccatgcggtataaatactcttgaaggaacaagtggataagtgtgtgaatgtgtgattgccagctctttcctgcaactctgccctcttggctgaactgtgggaggctggccctggctccttgaagcctctgcatctccagcagggctaagccatgcccacaacccctaccagctgttactgagcttgccctggcccagggatgaggcacactgggagctgcatagggtcctggtttggccacatacagatccgtgtgtgctcagctatcatatgcagggaggcttttgggctaaaaggcaggaatgtggtctcctctgtggagagcatgggcctctggtgtaatgctttcaacttttcatcctctttggttcccacaagaccctgatattcaattaaccgtccagcagtggatttctggtgcacggccccagcatgcctacacctctgtgtcagtaatggtggaaagcctttctccctgtatgagcaggtgagccaagaaattatccatacttaagcttaatcaaccatcaaattacagttaagccgaatcagctgagacacgctcgcaacaagaagtaataactcgagacagtcggatcacctgaggccaggagtttgcaaccagcctgaccaacatggtgaaacccatctctatcaaaaatacaaaattagctgggtgtggtggcatatgcttgtaatcccagctacttgggaggctgaggcaggagaatcgcttgaacctgggaggcggaggttgcagtgagcggagattgcaccattgcactccagcctgggcaataagagcgaaactccgtctcaaaaaaaaaaaaaaaaaaaaagtaacaactgcaaaggcactccacaataccagccacttaggaacaggtgtcttttcccagcttatttctgcaggtggaactgcaggatactatcaactcatctttctgaacggcaccagtttatttgtgggttgctaattcacaccgtcatttctagatcatctttctctgctgccaagaccggagtagcaccacatttacacatcaggccgcccagctcccaaacctcagtgtgacatctgggctgcttccaaagatgagctgcacgccactgtccagctggaaatatctgcctttaggcagggcgggggttttttgttttgtttgtttgaaaatttcctccgaagagattccctaaatagtttatattacccctccatcttaacgcctctaatggtagcttctcagcgcttcattatacagaggcgtgcctggttcccctggaaacctgggagctgggcatttggttttgtcgtttaagaaatatctttcgccaagttagggcgatggcccgcaacgggggatgaaatcggaatttcccggggaaagcagctttgcgactgaagagggacgcctctcggctttagcctccctgggggcgggactgcgtggactcggcggtcccgggtgcctcgggagggagtcagtgcccagatccgcggtgggaactccgggctaggaaagcccgggagggaggtggtctcagcatcgcccccacgcctaccatctcctgcacgcgtttgcggttggggcggcccagggactgcagagggggcgccgggcggggcgtcccggcggggctgtgggggtgggggtgcttgttcgcgtttattataactttactccctttaaaaggaaagctatgcccggaatccaggaggtggcgagcagagcccgggttgggaaggacttgacccgcgcccgccgctggccgcgctccgtgtccctggagctggggctgtgcgggagcggggcccaccctctacctttacccctacttttacccccactcccacccccgcctcactctcacccctccaaccccaccgtcagccccacctttaacccccacccctccaaccctacccgccgccacccccacctgccacccccacccccacctatactcccgcaacctcccaccgtcacctccccaacacccccaccaccctcagccttgacctccccatcccaccccgccccgcgggccccaccctgccacccccgcccacccctctcgcgggcggagcggctcttggccttttttgggcgtctccctgctccgcggcccgggctggcgggcgggcgctcggctggcggctgcagcagcagagggagacccgcggcaaccccggcaacccagggctcggcgtcgctgccaccatgacgggaaggtaacggcccccacccacgcccccgggccggggaggcgggactgcgggacccctggccgaggcgcagctcgccctcgtacagccccgcggcgccacgatccccgctccgccctggcgcgtcggattctcgcagctgccggggcggcagcgcccgtcggggcaggggtcccccagcccccgcgcctcttcctctgggcgagcgcctgcagcggaaggtggagctcctgcccacccgcccgctgcaagatgggacagccgtctgctcacaaccgacgcccagggctgcgggagggggtcttgtccaaggtcagacaccaaccacgggcaaaaggttcaaaggttgcgtgcctcccccaacttccccgagcccgcgctgtgcgatccccgatcccggtgagtgtcatctctggagccttccgtttcctcctctgtaaacctggggtggtaaaaatgttaaaaatgttgaagggtatgttggaacttggccagagctgcgcccaagcaccagctgtgcaggggttggttggggacagggcgctcccctgggcctggcccaccctctgctctcaggcccctcgttgccatttcacagatgaggtcaccagaggccacagaggctgagccactcaggaggccagtcacaggtccaccagtgtccggccagtgtttgtccctgcagccctttctggaacctagctgggtacaagtgcatgactcaggactgggtgggagggggctgtccctgaggccctggtctcccccagccaagtcctggcagggggatgctgttcttcaggatcccatgacctggggctcttggggagccccagcccggagagtgacctgtggctttgctggggaaaggggcttggagggtacagggcagtgtccaggattgcagtctcaaatccgaggcccacaggggagctgcctctgtgatcgccattaaggctgtggcctggggtctcagggcagcccaggaaccaaaaatagcctgtaacttgtcactttgtaagtcctgccctccagacacacttccctttcttctccccaagcctctcttcccagttagctcccctgacttggagtcacctctaagccttggcccaggcccctctgcagtgagatggagggactcatcccccggagagtggcatctgcaggcccactggctgcctgtggtcaccccctagggttctagcggggctgcctcccattttcctcagagcatccctgccagctggctggttctcactctcctgttttctaggaaaagaaagtggggagagacaggaacagggtccggagcagccccagcagcagcattgaggtggaggtgggtgagaggcggttccttcaggcacaggagggatgtcgaggagaacagagccgtgaagggtgcggggctggaatgggaggccccgaggtgccactgctccctggcaagggtcctcttgcccctgagtcccttgggcctttccctggagacggaggccgtcaggtgagcccggccggaaccgctgggaaggcaggtggtggcgagcaggggtcagccttcccttgctgctgtgggctccaagggcctgagaaactcttaccctcaaatgacacagggatgacagtcagcctttggcaggcactgtgtagggcgttcctcgtccaggcaatactactcgtcttagagaataaggagaaacctggaaacataaaagataacagaaacataaagagaaggaaactgccacagttccactcccaagagcctccctttatgcagttcggtggctccccgcagtcctttctcctggagtttgtttgacgcagctgtgagcgatctgagtgtaatgcacccgctccttcaaaggtgaccctgctgcccgcagtgctggtgccccactggcttccctgccttccatacacagggattgggccgggccagtctgtgaggaacagacatccaacccggccttcggagtgggcgagagttttcctgtcccagaagcagtggagtttcatttccaccgtttcatgctgggtgcccttccccacgtccactgttcccatgtgatcccgggcagctcctcgtgcctggatcctggttctctcgggatcccccatgctgcccagagccaggctgcttttgggaaacaccctctctgctcgcataccttcagggcttctccctgccagctctccctaggacctcaccaggcaagagcagagggagggctgtggggagccaccaaagtgacctggagtggcatgtgtggccatgctgtctgcagatgaacccatgggtgctgtgtggagaaagggctgctgggaaggagatggggaaggagacagaaggcagccactagggaggcctctcctgggtggctgagcgggtggaggagaggaggctgactcagggttctgggaggtggagtggacaggacccaactgactggctgtgaggtgggccacagagggtggggctcgggaggatgcccctcctgtgatgacaggtgggggtggatggcatgcttggtgtggttgtggagtgcttgaagagctgtggcaagtctgagggggagccgtgggaggcacctgggcatggaggggctgaagcccaggagtagccagctgggcagggagtgaaggcagcccagagcatggggtggcacgccgtgggaagagagggggctcggcctcagcagcaactcagggactttgcaacttacaaccacaagatctttgactatcacagctgaagggacctctggcatcaccattgttctacagggaggatattaaggccacctacctagggacccagctgtccctggcattcctggaaatggagcctgggatgttgacacccacggccacgtgagctcagtggcttggctgcataaagtggagtcccacccatggtgtgaccgtcatgtgtgtcacatgtgaggctgtcgtatgcctgattgtgtgctgagcccatgcttagtacagcgcagagcaggctgctagatccctgccctcatatccaccaatcttgcccctcctccgggtgaggagtgtgcccggtggtcccctaggcagaaggtgtcggccaaggggcagctgactgcagctagagccctcagcacagcacacgaggctgcagtggcgtcaggggcttaagcaaactgtaaagtgggtaacaagtgatgtggcttgtgatgtggcaccactgagccctgagccccagactgggccaggtggcactgccatggcccctcacctccttcctttttcttctacttctggtgctgactggccccttctagccggccagtggcataatagggatggagggactgatctgcagggtgtccagtcccgtggtgtgatacccccacctgggctcatttcaagccaccaacatggcattaacgctttacggaattcctgaatagttaacagtcagcacttgtgaactggcaagggacagcccagggagccactggggagaggagcccgggctttctatccacagcgggttatccttcttctgtctgtccctatctgtgctgtgccgcatgcaggctcttttttttttttttgagatggagtctcgctctgtcacccaagctggagtgcagtggcgtgatctcagctcactgcaacctctgcctcccaggttcaagcaattctcttgcctcagcctcccaagtagctgggactacaggtgcataccaccacaaccggctaattttttttgtatttttattggagatggggttttaccgtgttggccatggtggtcttgatcttctgacctcttgatccacccaccttggcctcccaaagtgctgtgattacaggcgtgaacaaccgtgcccagcctgcatgcaggcttaaccatcccttaggtcttcacttccaggtgggaaaggggccaagggaggcactgtcactgtcttgcttgttctgttgaggtgtagcgtgtacatttctgaaggtgaatatttacttagatgacttagcaggatgaccaccctagtgagatacctccatgagtgaatgcatatgtcttgctgagatgaggtgactgaatacacatatgaacataaaacctactgtgtcctcacccacgtccttggaggaatacacgggaaactcatggagttgtcttcagcctcccagcgaggagtctggtgggggagctggctctggaggacagcctgtttgtggcatctctgcctctgtccgtctctgcctctgcccactgggctgagggcacgtgccccagggccttggggaggcagccctgcctcatagcttggggcctcagttccagcctctaagaagccatgtagttgcattcttcattactcacgtgttttttaaaatctgagacatagttcacatattattaaattcaccactttagattgtaaaattcagtggtttttcgtgcattcacaaggctgtgcaaccatcaccattaattccagaacattttaatcattcctaaaagaaaccttgtactcatttgcagacagtcctcatttccccctcctcccagccctggccaccagtaacctgccttctgtctctacagatttgtctgttctggacatttcacataaatggagccatatattatatagccttttgtgcctggcttctttcatttattaacaacatatttccaagattcatccgtatattgtagcatgaatcagtacttcattcctttttctgggtgaataatattccattgtgccatagtttgtttcttccttcatccgtggtagacatttgcattgtttccactttttggctaccgtgaataatactgctatgaacattcccatacaagttttggtgtgaacatacattttctccttgaatatatacctaggactggaattgctggcatatggtaactctatgttaaactttttgaggaattatcaagctgttttccaagtaattgaacaattttacatttattaaattttacaccaggaatgtatgaaggttccaatttcccgacatccttgctgatgcttgttattgttgtccggtttagtaggtgtgaagtggtgtcatattgtggttttgatttccatttccctaatgactgataatgttgagcatcttttcatgtatctgttggccacttgtaaatcctctttggaaaaatgtccattcaaactctttgcccattttttaaatcgggttgtctttttattgttgaattgtaagagttccttatttatttgaatactagacacttctcagacatatgatttgcaaattttttttttttaagatggagtctcactgtgtcgcccaggctggagtgcagtagtgcaatctcagctcactgcaacctccgcctcctgggttcaagcgattcttctgcctcagcccctccagtagctgggactacaggcgtgtgccaccatgcctggctattttttttttgtatttttagtagagatggggtttcaccatgttggccaggctggtctcaaactcctgacctcaggtgatcctcccgcttcagcctcccaaagtgctgggattacaggcacgagccaccgtgcccagccgatttacaaatattttttccttttctgtggatcatcttttcactttcttgattgtgtcgtttgatacacacgttttaacttttaatgaaatccaatttatttccttattctttagttgcttgagttttttttgtcatgtttaggaaactattgcctaatcctggctcatgaaatgaaaacatctgttttcttctaggagttttatactgttagcatgtagctatccagttgtcctagcatcatttgttgataagactactcttcgccccattgaatggtcttggcactcttgtcaaaaatcagttgaccacaaatatatgggattatttttggactctcgagacagggtttcactctttcacccaggctggagtgcagtggcaagatcttggtacattgcagtctcaacctccctgggctcaggtgatcctcctacctgagcctcctgagtagctggaaccacaggtacacaccaccacacctggctactttctgtattttttgtagagatgagattttgccatgttgcccaggctggtcttgaattcctgggctctgcctgcctcagccttccaaagtactgggattataggcgtgagccactgcacccagcctatttctggactcttggttctgttctatgggtgtatatgtctatccttacaccactgccacacttacaattttttagtaagtaaattgtaatttttaagtaaggtgtttttttttttttttttttttttttttttttttttttttttttgagacggagtctcactctgtcacccagggtggaatgcagtggcctgatctcagctcactgcaacctccacctcctgggttcaagcgattctcctgcctcagccttctgagtagctgggactacaggtatgtgccaccacacctggctaatttttatatttgtagtagagatcgggttttgccatgtgggccagggtagtcttgaactcctgacctcaagtgatccacctgccttggcctcccaaagtgctaggattacaggtgtgagccactgcacctggcctctttgtttttttttaaagttgttttgattattctgtgtcacttgcattttcatataaattttaggaatgccttgtctatttctttaaaaaaggcaggaattttaatggagattgtattgaatctataggtcaatttgatgtagtgttgtattgccatcttaacaatattaagttttccaatccatgaacatgggatatctttatttaggtcttctttaatttatatcaataatgttttataatttcagtgaataagaagtcttgcatttattttgttaaacttactcctaagtattttattcattttgatgctgtcccaaatggggttgttttatttcatattcagatttctcattgctagcgattctggtatattgagtgtataccttgcagacttactgaactcatttcttatctgtaaatagggtttctttttttgaggagggattcttccgagttttctatatatgagtatgtaatatgtaaataaaaatagttttactcttccttctcaaactagatgtcttttatttctttttcttgtctaactgtccttgatagaatctgcagtgcaatgttgaaaacaaatagcggactggaaatccccctgaccttaggaggaaagcattcattttctcatcactaagtatgatgttagctatgggttttgggtagatgccccttatcaaattgaagaagttcccttctattcccagtttgttgggtgcttttattatgaaaagatgttggattttgccaaatgtgttttctgcatctgttgagatggtcatagagtgtcctccctatattctattgatatggtatattacattgaattttggatgtgaaaccaaccctatgttcttgggataaatcccatttggtcacggtgtataatactttttatagagtgttagatttattgtattttatcgaggacatttgcatctatgtgactttagcattttattttgagatcaagataatatttatagaatgagttgtgaagtattccctcctagtctttcttttcttttgtttggaaagattttgtgaaggtttgttgttttttgttttttgtttttttctctttttgagacaagatctcactctgtcacccaggctggagtgcagtggcgtgatctcagctcactgcaacctccgccttccaggttcaagtgattctcctgcctcagcctcctgagtagctgggattataggcatgtgccaccacactggtgttttgtatgtttgtttgtaggtttggtgttaattctagttaaacctttgatataattcatcagtgaagccatgtcgctctggctttactttgtgacaagttttttggttactgtctcagtctctttacatgttactggccttactaagtgatttgggtaggctttgtgtccccaactaaatctcatcttgaattgtaatccctataatccccacgtgtcaagggagagaccaggtggaggtcattcaatcatgggggtgtttccccccatgctgttcttgtgatagtgagttctcacaagatctgctggttttataaggggctcatccccctttgcttggtatttcttcctgccaccttgtgaagaaggtgccttgattcccctttgccttctgccacgactataagtttcctgagtcctccccagccctgttcaactgtgagtcgattaaacctctttcctttataatttaccgagtctcatgaagttcttaatagcagtatgaaaatttagactgatacatttggattttctatttcttcttgagttcgttttggtagtgtccttctaggaatctctccatttcagtaggttatttcatttattggcatacagttgttcataatattccattctgctacctccttactgggaccacgagctattattattcaaggaagccatggagttagggagcaggaataagggactaggataagttaaaacaacacaaacctcactggtttgtgtttgtttgtttgtttaccaagattcatctgtttttcttgaccaaatgttcctagggttactgaaaacctttggtggatttgcagagttctgaaagagtagattctgataatttttgctaggtttttcattgcttttatggagggatgaacttctggaggtccttactccaccactttctgctgacatcactctcggtgtttttgcaaatatctagagccagagcactgaaccaaatcccatttggtcatggtgtataatactttgtatagagttctagattcagtttacagtatctgtggctcccaatcccatccctgcagcaggacaggctgcagaatgggtggtaaggttgtgcagagatttgggatttgggctcaatcagactctaagcctctctcaatttctagccttcgatgtccgcttttatagtaaatatttgttgaattgattagtacttggtaaacttgtgcttgaacttcatttacagattatgttgcacaaaacacttgtggctgtagcctcctttccagtgctatatgtgacccttggagccctaaataaatgtttcctccttacagaaaactgcgggtctgcatgagagtcctggattctagtgttgaggatttccacatggatgggctgagtcgggagtggtgagagggtctaggccctatggcattgacttgtagctgctgttaagaacattttcggtgtaagttttcttaagcattcggctacctacatcagagagtcagcggtattccctattcattttggctcctctgggctcagcttctccatgccctttagcccctggggccacctttaaaaactatttgttgaactgatcagtgttgggcaactttggaattggactacatttacaaattatactgtacccaatgcttgtcgtcacttgactgccagggtgcttaatgagtacctcctcctgttgggacttgctgggtgagtgtgttcctcagtggcgtgtgggcctggtatctgaatgccagtgagcccctccaaggctttctcccaccctagtttgggaggatcagtgccctgctgtctttagtgacggctgccagctcttgctttcagaaggcagaagaagatactgctcaagctttctgacctttctagaaaggtctttcagggaaatgggatcaatgctaaagatttccatgagtgctctggatctttattgtactgctgaccaggcttaccttggtcacagtttggatgcctaccgcgggtgtttatgaatcacaagtaactttgccagtctctctgggtaaaaatgcggggtacatggtgccttcctggtggttgccaccaggtccctctgcgtctgctcccctggaagctggaggattgccttttctctaaaataaggacctcttttggggtgcctgaccatttgttggccagatccagaggatcggctctgccctggtctgggtgccccacggtgatgtttgtggcagagggtctcagagaagggagcaaagcagaatgtgggcctgtgtggctccggtcctcggtttcctaactgttggcagggatcctaaaggcgccaggtcctccctgtcctcctcagctgactctgccctcctcagtgtgtccacgggcacaggctttcctcctggcaggtggcagccggagacctcctgggtgtcctgccgccactgtggacctcacctcagtgctgtctggggccttcccagaccagtcccctcccagcgggacccaacccccgccagcctcagctttcaggagctgcccccgcggcgcgaacaatatcctttctatttggagttgactctgctgccctttggagatcccagcgcgtaacgtgagctcgcgaccagcgcgggggaggcgcccacacgcccgtcccgtcttggtgtctggccccaggcggccgcgcctcccctccgaggtggtcccatagcccctgcaccaggcggcccgcgcccgcgacctcaaggcggctgccccgcgccatggcggcccggctgggtgcgctggccgcgtcggggctgtaccggcggcgccagcaccggcagagcccgccgccagccacggggtaggtggccaggggcggggcgggtggcggggacaatggccggaaagctgcggcggcagggcaggccttccctcggaaacccgaccggggccctccgacgccgtgggctctgccccggcgtcggatgggccctgggttggcgacagggtgggcgcgtgcgactttatctaacagggttggatgtcacctgtgatcagctctcctggcagggtgcgcccagggacctatgttagagacgagggagcctgtgtagcccccagcactgctttcagacgggggtgatcatgctgcactttatagatgagcagacaggttctgagcagagcagacacctgctggactcacccaccccaaacatggctatgctgtgatttgaacccaggttagactgactccagcagtggggttcaggatggtcctcagggcatctcagagaatgagttggctctggatggggaggttgggaggggcacggggatggtggtggagccacctcccctcactcttggggtcaggggcatgaggaggagctcctgaaaatgttgcctttgcagtgccgaggggccagcggggaagagagagcaatagggctgtgaccttggggtccttggcatcaaggtgacagatagggaccctggggaggaggccaaggctgggcagaagggctggggcgggggggcagggagggagccaggaacataagtcgcagaggtaggggagggcctggaggacccaggagcagaggaaggccagtgccacccagggcaagcatagcccactctcagctccttgtgtgtggtcagggaaggctcccagagtggcaattagaggactgagccatcaaagatatcttttgctgagaacagaagaggaaggagggcaccgagtggagggcgggaactgcaggccggcagcacggccatctgtggagtccctgctgcatgctgggctcccgcttgtgctggcatggcaggtctggggcagcctgctgttcaggtggggacccccagactcaggaggccaagtcactcacctgagtgtggcagagctggagcaggcaccctccctggtcaacctctggacagccctggatgcgtgtggcataactgtggtaccaggctgcgagtggccagggcactgatggccccaaggctgttctggagtgattttcacagtactgataccacagctgagatgcaggcaggacaggcacgatgatgacaggcctggggcagccctgagcatgcatgcgcatgtgactattcacactgtttttctttgaacttctggttcatgtcctttgtcagttctttgttgttagtgtaacatgtttcagttgtacctgcttaaaagaaaagccactagagcaaagagatatggcaagggcttcaaaaaagctctaatttcagacaggtttcatactgatttggagtctgtttctgatggtgtcaatgcatcttgtgtatagcagcccaggcagcatgttaattttttcttttttattttattattattagactttaagttttagggtacatgtgcacaacctgcaggtttgttccatatgtatacatgtgccatgttggtttgctgcacccattaactcgtcatttagcattaggtatatctcctaatgctatccctccccccaccccccaccccccaccccccaccccacaagagcctctggtgtgtgatgttccccttcctgtgtccatgtgttctcaatgttcaattcccacctacgagtgagaacaggcagcatgttaattttctagcgtccccatggtgggctggctttttgtacatttttgttgacctcatgtggccaggtgacccgacactggcctctggctggcttcatggaggcggggcagggaggaagcccaggcagtgctgagggactggagctgctccctgggctgtgctgcagtagggtccctccccgaaaccctctgcatctggaatagtgcctatcagtgcaggtgctcagtgaggacttcgttggaaggaggacagaagcatgggctgtgcttgcaggaatggcctcactgaaccctcccaacagtccctggaggtagctattcctggcccattttataaacgaggaagttgaggttcagagtcctgtgctgcaggtcacacagacagggggcgtcggggccagggttgcagcctggtgtgcctggctataggggacacacccttggtctgactgctgctcaggccgacgtggcctcagcaacacttgctcatcttgggtgtgaccagacttcttgtggctggcccccaactcttcccagatccttacacacacttccttgactcagatatcaggaaggctgggatggaggaaggtctggggttgttgaagaaacagaatccggaatgggggatgccaagaggagatgggaggaacatgagtccaatcctctgtgaccctcagctggttactgactctctctgtgcttcaatctccttatctggaaccagcctcctccccttatacaaaggcctggaacagagcaggctcctctgatcccacctcagactcagggacatcttgcaacaaattggcttgtattggctgtcaaaactgagagccttctggggtgctggagagggctgaggaagggcatgagatggtgtgctctcccccacctctggggtttggcttccaggctgggtgtgccctgggcagtatgttctacgtagtccagctgggggtgggtagtggtgtctcctgggggataactggacagactctgtgctctctatcttgaaggaatgtgcaaaggaggacatggaatgtccacgtctctgaccctctgacctctcgcagggaccgcaggcagcctgcaggccttcccctaggctgagccatgcagagggactctggaaggctcccagagttgctggaaaacaacagttctccttatccagcgctttgccctgcctggcctggtgctctgtgctggacacgtgggtgccattcattcactttggctcctcgatgtggctgtttctctggtgcacctctttacaaaagagaacgtgaggcctacagaagcgagcatctctctccaggtcccaggctggtggctggggctatcacgtgtagagctgagcggctgggcccaggcctctgccggcctctctgtgtcacactgcctctcttcctcccctgcaggagtcaggaagcgtgttctctcatggtgctgtgtctccgttgtctctgcatgcttctgtctgtcccgtctttgctcttggagcagaatgttccctcacagagctgctgttaggggctctctgtgacttgggctggggcagcccctgggcacaggaaggaggtggccacccccacatccgccccccccacccccacctatgccacgctttgtgcgatactgtcggccacaggcagcaatgatctccctggatgcattcagggaccagccgaggaactgcttacagactggctatcaggtctaactggaagatgagccggaaggtagaggagagtgtgtgtggccaggctgctgtcaggttgaccaggtgtgtccagcattggctccttttggtgggttcttggtctcgctgacttcaacaataaagccatggaccctcacggtgagtgttacagttcttcaagactgtatgtctggagtttgatccttcagacgttcagatatgtccggagtttcttccttccggtggggttgtggtcttactgacttcagaagtgaaggctcagaccctcccactgagtgttacagttcttaaaggtggcacatccggaattatctgttcctcgaaacgattcctccccgtcggttcatggtctcgctggcttcaggattgaaactgcagaccttcgctgtgaacattacagctcataaaggtggcgcagacccaaagaacgtgcagcagcaaaagctactacaaagagcaaaagaacaaactttccacaccaagcaaaggaaccccaactggttgctgctgtgggttcgagtggcctggttttattcccttatttggcccctcccacatcctgctgattggtccattttacagagtgctaattggtctattttatagagtgctgattggtcagtttttaccaagtgctgattggtgtgtttacaaacctttagctagacacagagcactgattggtgcatttacaatcctttggctagacagaaaagttctccaagtccccaccccaaccagaagcccagccagcttcccctttcagtgggaagcaaggtaactggggagtgctagttgagggtgtgtttatgaaacggcgagggaggaagggtggtgaagcagctgggctagcagggcaggagtgcccataaccacaaggaaagtcacaggtcccagcagcacctggcccgtgggagtagggtcagcacagctggaagccagagggggcaggcgtgtgggtgcaggccctaaacagcagttcctggaggcagagaacaggagcctggaagggggtgcgagggatgtgtgctcactcactggggtctagaggtctggctttaaggcggaatctgaaaggctggggctgggtggaagtccttaatttggcttcgttttctgggtccttggagtgaggaattccaggcccagagccatgggatttcctgttgatttccgacttctctaagactcccaaggtctcgctcatgggcaggcactggaatgtcctccctgccaccttgggtgtgtgtttcagaagaggaggttcacagtgttctcccggaaggaaaccaagcctgtcctagtgaagccctgcccagccctcgagggtggcttggggcggccaggctccaccttggtggcctgcctggctcgccccgtggagaccagcagggagctgggagcactgaggaccagccgctgggtgccgaggcctcctttcttcttggtttcttcccaactcctgttgccaccatctttgcttccttgcccctctggcctaaatgtgggctcgcatggtggctttggtctcctaagcaccccagagggcaggccaaggtggacagaagcccagcatgcccagaaagcctggttgaatggccttccagacagcctctgccacatgggtccctaagcagagaagaaaggacagcctgggtgcccctttcaagtttccagtccatctccatttcgcagcagcctcctgtgagaccctccgcccacagcccatgcccagaccctaagcgcagccctgtcgtccacccctggactcatcctaaggcccctcttctctgtggttgacactcttcagactggccctgcccagattgcaggccgcagaacagcccgacaggagcctcactcaccaagcatttccctcatgatgtcgcggcagtgactgctgggtgggattcatcctgggaggcagagcaggcggagaggtattcccaaaggcactgcactcgagtcctgccaccacccggctgcaaccaggcagacgttaccagctggttgcgtcactccccagcgagcctgatgctccctctctgcccagtcttccaggaatccactggagttgacacttgagacagaacccacgttctcccttcctagcaaaaggtgtggggtatccggttctttgaaggtcgtagaggcagttggggtgtttaggactacatcctgaccctgtttttgagtctaaaaggcccctcctggctgtgccgaagggccctggggctggactgattgcgggcctggctcactgtgggcttttcccctgtagttcgcatttcacccctcccagaaggaaacccaccactgactctggggacaggcagtgcccagtatggatgagatttgctccccctcaccacactcccgtctcgtctcaaagattcatactcttgtcttttttatttattttttattttgagacagggtcttgctctgttgcccaggcctgagtgcagtggcactcagcctcggcctcccaggctcaagccatcctcccacttcagcctccagagtagctgagactacaggcttgcaccaccacacctggctaatttttttgttttcttgtatttttattagagatggattcttgccatattgcccaggctggtctcgaactcctgggctcaagggatccgcccaccttggcctcccacagtgctctggatgacaggcttgagccattctgcacacgcacccagctaccctcttgcctgctctgtgtttgggtggttatgtgtttattggaggcagtcagtttgaaactaactcatggtgcagaggatggaaccatggaagactgagcagtctggattcaagtgtggaccccgctctgctgtgtgagcttgggcaagttactcaacctctttgaggcttaggtcccttttctggaagaggccataataatagtagctgcagtattgccctggggattaaatgagagtgtgaatacagagccgctcacctgtgctgggtggtgttctgtgtgcgagactctctggtccctgaagaaggggtaataggggcccaagtgggagttgactgggcccctgacaccccaaggggtgggcactacaagcactgagcagcctggaccctgggttagagcgattttcctgatcctgcagagcgtcttcactttttaatacgaggtgtgtctgtcgggcgcaggcccccgcgtgtgccccatctgcacccctgaccagctctgactcactcctcctgtctcctgcccccagcaatatgtcggacgccttggccaacgccgtgtgccagcgctgccaggcccgcttctcccccgccgagcgcattgtcaacagcaatggggagctgtaccatgagcactgcttcgtgtgtgcccagtgcttccggcccttccccgaggggctcttctatgaggtgaggacactactgagggctttctcagacccagctcggagtctgccctctatgagcgggtgggccgggctccatgcagtggtcccgactggtgacagggccaggtctggagccagcccagaaccaggcttgagctcctgcacgggcccatccttcacctgtgagatgtgaacagcaccccaggtgccctgggtgctaacagagagccacctttcaccagcctcctctgggcagatgctgggcaggccctgggggcaggaagagcctgccctggtggtgcttgccctccctggggactagacagtgagcacagcaaccgcatggcccaccagctggtgctgatgccctgggggtcagggttcccggggtggggtgcggtggtgctcagggaaggtgaggtttgggcacacctgaggggagggagacatactgggcagagggcaccgcatatgcacataccctgtggtgggagaacatggggtgtatggagagcagtaggaagactggtgtgatggaagccgagggcatgagagggagaaggccaggagctgaggaaagggaggtggatctcgcttggccccacgggcctctacggagccataggcttcccctctgcaagaggcaggagccacctcggggtgtggagcagaggagtcacactatctgctgacatttgaaaaggtgacctggccgggcgcggcggctcacgcctgtaatcccagcactttgggaggcggaggcagatggatcacctgaggtcaggagttcaagaccagcctggccaacatggtgaaaccctgtctgtactaaaaatacaaaaaatgagcctggcatggtggcaggtgcctgtaatcccagctactcgggaggctgaggcaggagaatcacttgaacctgggaggcagaggttgcagtgagccgagatcgcgccattgcactccagcctgtgggacagagcaagactccatctaaaaaaaaaaaaaaaaagaaagaaaaaaaaaaggaggcttgtggccgctgtgctgaggagaggatgtaaggcggggcaggaacagaggctgggccaggaggctggggggaccaggagctgaattagtgcaatcacccagatgaaagtgaaggggcccccaccagctcacaggagcagtcgttaaatcatcaacaatcttgggagctggttgggcaacagagttattgtttaaaaattaaattatatcagcgtacaatgggatacaattttattaaaaacaaaggtaacaaatactcaaagcataccacttgctaattattttgttccactttactatcgtctatgctgatggggttatttctgtccattgtgctggtgtggccactgcacatctcccctcaagtccacatcgatgtcatgttggcagccaggagttggccatgacgggaatattcacaccatggacactggcaaacgccccacagcagggcctgcctctgcgccccagagagctggctgttgagcatttaccagaacatcacttgtgcttgtggtggcggtggtggccaggggtcagatgctggctctgtttcaaggtagagctgatgggactggctggtggatggatgtggggcctgtggtccgcctggcagagcaagagccgctgttcctcacagtgtcttcagcctcctgaggaatgctgtctaagtgtagaggcagcgggaggggtgggcaaagctctaggaggggtggccatatgcccagaacaaagcctctctctctcacacacagcaggtgcccagaagattttcattgctgaaagagtttaagcccttcctgactctacaggtcactgggtagggctatatccagtttagtctaataagacactcattttagagaacagggaaaaaccaattaaaaaacagaaaatacaattgttagaggaaagcagaggcaggctttggccccgcttgtggccagcacaggggccctcgctggcagctgccgcctggagggtgtgcacactggctcctgctggccgcagccctgagctcttcccacttccccgtgcccaggcccttcctgcgttcccttccttctgtctcctatacccgggtcttcatggcctctgagagagctggatactcccacagagaaggtatacgaaataggaccaagtgacactacacttcagactggatctcatccctcctggcttaaaaccgcctcgcccccagcctgttctccggaccaacagggtccagatcctcagtagacaccagtggccctttgacaggtggcctcacggacctctccagcttccacgggggcacctccctttgcaccccaccatcccaaaagggccagtgtcctctctggccaggcctgggacccactgctccagcctcagcccggcatgcccctgcctcagtgcctcatcccctgctgtcaggtcctgacccaacaagggcctgggctgctcatggggatgataggtggtttgcttgtcctctctctgcgacccctttgcagtttgaaggccggaagtactgcgaacacgacttccaaatgctgtttgctccgtgctgtggatcctgcggtaaggccggtgacagtacacatcctgggctgcctgggaagtgggcagcagtggcggggggcagggggccgagggggtacacagaactggcccagctctttcctaactccccaccttgcctctctgagcggcagccgtcaggccccctacaggcatcaccatcccacgagggagcccatgggccaggcagagagcaggcggagtgctaggtggacagggcttgggagggtccgaagaggggacaggcacgtgctccccagccagcagggacctgtcttcttccaggtgagttcatcattggccgcgtcatcaaggccatgaacaacaactggcacccgggctgcttccgctgcgagctgtgtgatgtggagctggctgacctgggctttgtgaagaatgccggcaggtgaggtggccgtgttgggccagagaggactgggccacagcccttcctggcacacctgccacctctcctgtgtgctacccacttgctgagggcgcagaagggtcccggtgctgcagcctgcactgatgtagctgccctccctccaggtcaccccggggcggatagtccagctcccagtttacagggccccacgctcagcgagctcctggcagcctctcgggagccatgagaaatcctcacactctgccacccccctggccaccccatctactgaccccacctgtccaccttctcctgcctgtacctgtgcagctcagtgtggctggagggagatgcccacatttactctaaattgagggccacaaacctcatgggtactccagaagttcccaccttctgcgaacccttggtctctcatcctcccttcccaagcactgtccctatagcaggtggccttgtctcccacctcccctggccctagctctgagatcccgtgcagcccggcctctgtctgtgagccctgttcatccccacactttctccagggcttgcttctccacgccactctctcgtcctttctgaaggactgggctggggagctgggttaaaaacactgctgggccttcctccccggcttctcccagcacacccgctgcccctcgcgtgtgctaccctggcctcatctgcccagggacccacacctcctcttgacccctcagcagccctcaccacagctgctgaggtgcagaaacgccccccttctggcacccgggaccctgagttcctgtggttctgcccgcccccacagctgcacctgctcactcccctcctctgagtcacctttctccctgtctctccatggggagtcgtctggggctccgtgcccggccctcatggctgcccttgcagacagaatcctagagccctaaatggcacatgtgtctggagaattccaggctccacttcaggcctctctctcgctgtcctcagctgcccacatgtcacctccacttggtgtccaccaggcatcccaaacgcaatgaggcacaagcagtttgggattctcctccactgaccaccaaggctgcctctgcatgcgtcccctgtatcagtgagaggcagcgccgacccccagaggccccagccatgcttcccctgccacactctctctgtccgggcactctgctccctcccgcagctcctccgagatgcttccccgacactaccgagctcttgtccgtgtgctgcccgtgagagaggcacgtggcctggggcctggcgtccggcccactgtcctcggagctgggcggtgcctggcattgagcagcttgtctaaatgaagggctgaggggcagacggtgcagtgcaggggccgagggacagcaccaggagctcgtgctgaccagcaacgtcgccgacagggtgtgtggagcgagcccaatctccttcctgagccaaggtttgcacagggccactgccccaagggctggttggggaaatctgaaagatgctggaaacgttttggaaagtcaaacatgctacaaaagcatgttgccgtaaggacggtgcagggtggcagctagagtgaggaatgagggcccctacttggccctcccagccccacagtgcagaacctcagaatctgggcagatgtgctgtgagctgccagagccccagcaagagagcccacgaggctgcctctgccactgtaccaccacttcaccattcttgggtcagagaagttctgggaaacgcttcatgttgaccaaacataacaacctgtgtagtcttaaagctacagttatatttatggtccgtacaaacaaatacaaaaaaggacatgttagggaaatatctgcacactagcaagggaaatagctcaggcggagagaggcctctctggaggaagtgggtctgggtcagtgggaggcaggtgcacagcccagccctggcctgagctgagctcccgtgactgcacatgcttgtccaggactgggaggcctgggagcctgtcaaagagctctgggggttgcaggcttgtgcgtggggttacagcaggagagatccagaatccagagctgtgctgagtccctgcaggccgtgagtgctgacgtccgctggcaaccagcctgaaatgtgtggcctgtgtctcttcaactcaggcagtgtgtgtctggcagaggcactacagaggggactcagagtaccttgcactgcaaaggagtattgagactccctccccgtccccaccaggactcccaggtccctcttctgggtcatttgcagcctgccttcagggtctttctgctgagcctcgccgatgagcgattctgtagcgggaaggaggctgggagcctagcgggaaagaaaggcctccattgttcaggggttgttcttccggcctcctctctccctgccacagatgaagtcgttgagtgtctaggagccattgtagccatcacaagcccctgcagaggggtggccgatggatcccctttgtcagttcttcctttttatgggttgagactaggcgatctagagaaatggtgggcatctgctgagatttcaggttgcttgctggggaggtggctggggaaagggcagatgcctcttgctgggtctgctgagtcctaaacagtctgcgctcggcctggacggcgccccccgctcacagctctgacttggcactcagcgagctctcgttggttttcccttcgaagctggggggcgggcccttgagccttttgccacagagcaagttgcacagggcgtggcggaacttctcagccacgaagaaatacatgatggggtcgagtgccccgttgaggctggtgaggcaggaggtgatgcggtttgccagggccaggatgcgctgggtggcgcaggaggccccatggctgcggtagtgcagcacgtagacggagcggttgacgtggtagggcacgaagcagaccaggaagatggccagcactatggcgatcatgcgcactgccttggtcttgaggcgcttctccacacgcaggccctgccgcaggctgcggatgatcagcaggtagcaggtgaccgtggtgatgaacgggaaggtgaaggccactgccagggacaccagggcatggtgggaggccttctcccggtacagctgcaggcagaccaccgtgtggttggtctgcacggtctgtgggctcaccagcagcggggccatggccacagccaccaccacccacaggaaggcacaggccaggtgtgcgtagaggggcctgcggagcttgagggacttgaccgggtgcacaatggccaggaaacggtcggcgctgatgcaggtgaggaagtagatgctggcgtacatgttgaggtagaagaggaagccggtgagacggcatgcgatttccccaaatggccagtggttcccagagaagtggtagaccaggcgggtgggcaggaccagcacgcacgacaagtcggccacggccagatgcatcaggaacacgttggccggggtcccggacttgtggtctcggatgaaaagccacagagccagggtattgccaactaaagccaggataaaatccagaaggtagaaggaggcgaacagcatgttctccagtggcgtctcctggccacattgctctgccgtggccagggagaagttggtgatcagacctgggggagccacttcaaggccattcatgctttggctggagtcagagcctggagggaacaagcaaacagttcacaatgagcttgcgatctaggcagcttcacgctctctgaagtccagaagtcaggcctccaatgccttcagaacctcccactttcaagctcagcaccgcccacggggctgctgaggggacctccttgtccatttggtgtgcgtgagcgtcagaggcattctgaacttcagcacaaggcaaacgcagaaccagggcttggaatttcgccgctatgcagctgcacccctgccacccaggagatctgaggctcctcagagctgggaggaccgggtcagtgccatggcggggaatgggacgtgagccttgcctgggtgaggctctgggttttctgttctgcctctgaggtgtgctgtctgagtgacaggggtggtgaggggcgggggcagtgtgtctccgggattccagctcctcctcagcccaagccttggcaggtgagttctgttcatcctgagtgcctggaccctccctgacccacctgcccacaggtgcagtggccggggtgtcaccgctttctgcttcccctgaccatggcttgcccctggcacttaggagggtgcccccaggatggcagcaagggctgtaccctgggacgtcagaggtctactctttttacccacctgagagtttcagcatctctcttgggggctttctggatccagcccaccaactccgtttggacatcctgacaggtggggagacctgtgtttaggagaagcctgtgcctgggtatcaggccagctgggagtattttctctcccagagtagatccaccaccagggggcagcatctcttccaggaggggaagacccattttacccagcgtcagagacactggccagcgctgttgaggacggatctgcagccccagagaggcctggaggcctcgtggcttgcccacgtttgaaggccaagtgcagagccctgtgacagtcctgggtaacaagtcatgtccgtctggtgaaccctgggtctggatagggtgctccccaccctcagcagagaaacccactcttgttttgattttagtcaactcagaagattgaagaaggagagtgagggtcccaaacactctgcctccccaacccaggcctgcgagtggcagtgtgggcaggcggtggggccagagcagcccgcagcccggaaccagggcaggacagcgcacctggcctgcctttgaattggggtcaccagcgggcttcggccaggtgggtgctgatgatggcacagcttctggggctcctctgggcacctggcttcccagtatccaccatccccaccctgcacagccaggctgaagcagaggctggagagaggtttgcataagagaagctggcatcctgcctgtgcccattgtggcagcaggaggggaggaggcacgggccacagccctggcagggtcctcatcctgggcgagcctggctctgcaccgaacagccggggtcctgcctgcagcaaattcactctgcacatttctccctgcccttccttccttccttccttccttccttccttccttccttccttcctaccttcctctctctctcacttcgctttgcttgtttgcttgcttttctttattttccttttttcttttcttttttctttttttcttttctttttccttccttccttcctttcttcttttctctttctttctttttctttctttcctccctccctccccttcctcccctcccctccctcccctcccctccctcccctccccccctcccctcccctcccctccctctcttttttctttttttctttctctttttcaaggtctccctctgtcacccaggctggagtgcagtggtgcaatcagctcactgcagcctcaacctccagggctcaagtgatcctcccacctcaacctcctgaatagctgggactacaggcgcacaccaccacacccggctaatttttgtattttttggtagagacggttttgccatgttgcccaggctggtctcaaactcctgggctcaagtgatcctctctccttggcctcccaaagtgctccttggcctcccaaagtgctgggattacaggcatgagtcactgcgcccagcccctctcctcttactgattccacagggctgtctcaggatgctggtggcacggggcagagagggcatggtgactgttcatggacacagcagcccctcgaggaggaggctggagccatcctcatatggaggagaagcaggcatggtggtggccctagccctagggaagggtgggccgcacccttccttcaggagagcgagtggccagctgctgtggccctcacatggagggtgagggctggcccgagcacctggccatcaatgtcctcaagcaaaggggagggcaactacctaataatattaccttttagctatttctctaggcaggttcccctacctgaaaagattgcccccggcttcagagtgtttcaagatgcctgaagttctaacaccagagatggtttcctgctgcttccaggaacagggtctgttcttagtccaatgtggagttcctcatggggaccccattccccaggaatccaggttccacagtactctgacttggtctggctggtctcggctggcactttccctaggactgctaaaaccacggtgagggcggagagctgagggccgaagaaggcggggtgagtgatgcttgggagagggagacaggcttggctgaagccctggggaagggctgagggctgtgaagggggctgtggaggagaggtaaaaggagggaggaacacagcccttgacagggcctgtgaggcaggggagaacagggagcaggtaccggtgggacggtggcaggggaggggggcccatgactttgagggtgtcgtgttgcatgtgctgggggtgaggacccggagactggaggaacagggctccagggcagacgcatgggcaagcagagaggacagcccatggtagatgggaggggcacacaggtgtgctgttttcaggttggcaggagaggaggaaggtgtgtgcggggaggccctggagactggaagaggagagggggcccagtgagtgaggggcccttgttagaacctgggggtgggaaggggccaaggtgggtgccctccaccccaggctgtccctcaggcctgtgctgtgccccacagtgcaggcatcacctggccccacgagagagcagctcataggtacgactgaccactctgcctggcatggtgggggcctgcctgtgctggctcaaaccagttttagccccatgttgcaggttagggagtcaaggctgagtgtctgctaacttgtcttaggtcacttgaccaggggacattggccctggagctggaagtgagaccggggaaacggtctcactccctggaagaccgccagggtggggagtgtgactcagtctcagagtttgccatggagttgtctcccaggctcagcaccccctcctggccctggggccactccctcattttaggggcccatgtatgaaatgagaatgtgcagccccttgctcaaaaaggaagagtttcaggacagtgacggcagagtgttactgggctcagggccctgagtgacggcaggggtggcatatctcatggcaccaggtgggcctgtggtgcctcctgcctccagcccgggggcctcagcctgggcactgccctccacttcctgcccgggccgaagggcgtgcccctcgctctctctgggactgagactccattttaaacagctttctggttggtttcaggtttgctgaggtttcttctccctttctgtcccccgtttgaggagttctgatactgattgttgcagtttggtctgagatgggccccgcttcactctctgttgccctttagaaacacaaacttcagtctagactcgctggttcctcacgactcactggtcagacggccaccgagccggtgtccgtaagaggaaagggcgtggcatgggccggggcctgggcagtgttgggtcccgtggctgtgggtgagtcgagcatctaggacaggtcataggcctctgtggaggtggcaggtgggcatgtgtggcctcggggagggcctgtggtggcagcgccatggccaggtggtggcagtttcctttgcattagcgccactccatccctggcccgagccctctcccaggcatctggctcctctatgggtcaaggctgcctaatggttaggggcagcggtgctgtcattgcagcctggactgccggcaagccacttcccctctgcaagcccccatcagagggacgaaacaccgctttgtgggctgctgtgaattcagactgtggtcagccttcgatgcacaggtcagaccatcaccaaagagatgggacgagacaggctgctgcctgtctccctgggcagggctccccgctgagtgtttcctctgcttagccctgggctcccagtccaccccacccagcctgccccttacctctagctgctggtccgggaggaagggacaggggtctgcggggcagcaggtgatctccgcccgtgggtgtcggtggtggcagggggctccttgccgctgtgggtggaacgctggctatttaaggagaggaagggagaccacagcccctctggccctgaaaggctgcttcattcctgaggggtcccttgttgtgtcgggctgctcctctggctgctgctgctgctgccaccggagcgtgaatattctagtgtgtccctagcccatgccccccgcccccagcttggccacatagtctgagtgtgtgactgtctcagagactcagagcaggcgggggctgggtggggggcttgggctggagctgagggacacaacaggacgtttcagaaggggatgatttcctactgatggggggcagggaggggccggctgtcatggcaacaggcggcgctcccaggcctgcgcccgcagacggcggagggggcctgtgaacggagggtgggaggccgaggagtcttgctcacggagtgagaggcgactctttgaggacacttgctgtagggtccttgtgtcctgccctgtataatgaggccccatttgggcacacagaataaatcatggcctttatctggagcgaggaacagctgcaggagcctcataatggggcgctgtcctgtccgtgaggatgcggctcagctcagaggccgggtgctcgccggtgcagctccccttctgcacggaagcccatgaatctgaccgctggcctggggctcctccctggggtggctccgggctggggtgcctttgaatgctgccggcggccgcctctgagactgagtgaacaaagttcatttctctctgtctttctgaaaatgatacatccagcaacatgggaaaccaaatcacccttcctggtttcaaaagactttacattttgttgtttaaacattgaaaactgtatgtatgtggctagcatttaaggggcagtgtcttaaatttgtctcttcacatcaccctgtgcagctgggattattgccccattttacagacaaggaaactgaggctcaggcaaatgaagaaactcacccatcaacaaacagtaggaagcaacagagccaggatttgaacccaagcacatgtcactccagaacttaggctccgtgtgtgtgtgtgttttgtttttctgctgcattttgaatttagaattcttagatttgatcctaattcaacctgaaaaagaattctgaaggccacctttagatctgatgctgtgatctggtctgttgagaagctgtttcccatctggacttccttcaagagagatgggcttcccagtttgtctggcctgagagccagctgggtgtgaggtgtctgagccggggcgcaggtctctttcctgttgtgcccgcaggcggctgtctggaagaactggcccaggctggttggaaaggtggtggcttgaagctaaccaccctgagcagggcatttctgggctcacagaccttctgttattggggtgatcactgtcgatggcttcaagggcattgaccgtggtgatggagttttgaggcgttgagctgattcctgcatctttgagacagaaataattcctcgtgggttgagtgttgtcctgacgctcaggaggagtcaccagaatgtggagtggggtcatggggcctacatgctgagtctgggacagaggcaccgcagggggcatgggctggccgccataggcgccaggtggggcagctcagccccagacctgctgaggaggtggcctggggttggggctggggcacaggtgtctgggcaagggtgggcttcagggattgtggtgatgaagactgaagccacaggccacaactgcttcccgtcgctggggtgtaagagccagggctctggccagtagtcgaggggagatgatgcccaccgaggctcccttcctctcttgtagagtcattcattcaccgaggcattcggtcagctgaccctgagctgttgccccctgctgggcacatagggtcttggggaggcacagagagccagtcggcagcttagccagtgactgctgggcctttgtttgggccccttgccctgcacacagctgatgatgagacaccccagggcagatggagcacagtgctgtgcaggatggagtccagacacccagcagtagcaggtcctggggtccagggagggatgctgaatgggtggccctggcatctggggtctgcccaccataacctgggtggggatcttgggtctgcgattggatctcttccgtatcctccctgaccagcctgtcagaggggccaacactgggcgtcgggcagccgtggaggctcgtgaggagtggagagggcccctggggctggggggcctgggaagggaggcctggatgcagcaggagcaccagagagagattcgggtggcaggtggagacgggggccagggaggttggattggggcctttgtgtatctttgcctggggactctgaatctagattcctgccacctttgaggtccaaggaaacagaaaccatgttgatttgtctctccgttgagaacacagctgtcgtccaacacagcgagtagcatcagaaattattctgaggtcttcacaaaaagactctgtagtgacagttcctgggtttgggggcctccatctgacatagcagtgcttgtctttggagacagaaatcgcctgtacgtgtttgggcccttcttcatctggcaaaccccgaaggaagggggtgagtgggcctcccgggacactcactggccactctgctgggcacagtgacactcattataactcgtgtgtgttaaatacattgggaaaataatgctttcagcagatatcaattaaatgtctactgtattctgcagcatgccccaggcttagagaaagtagaaagaggaaaataccatccagagacagtaacctcgagcattctggcatctttcctgctgagcatgcgtcccattcccaggacacacttgtgaccttctgggccttgtgacagggcagtctgctttcccataccctgggctgagcccctttgaagcccccagctgctcagtgaagttgcaggggtctggcctctcttctcctggaggtggccaggctgtgtgggagtgggggctctgcccctaatgcccccgcctcccgcaggcatctctgccggccttgccacaaccgtgagaaggccaagggcctgggcaagtacatctgccagcggtgccacctggtcatcgacgagcagcccctcatgttcaggagcgacgcctaccaccctgaccacttcaactgcacccactgtgggtaggtgcgcagcccggccctgcagttgtgggggcggggagccagggctggcccagggtaagggcggtggggcctccacctggggaagtgttgaggagggagaggggagcagggtgggcagacagaggggtcccgagagcaaggctgcagggcagaggtgggctgggggctgggaagcagccatggcaggaagcttctctctccagggctctgtttggggggcacttgagactcaggaggcgggtgggctggacccctagactgcagacgagggttgagatggagcagtggaagggacctgagggggcagggcaagagaccgggagtgggcttggtgctggtgttggagagaggagttgcataggcagcccctcagcccccgtcctcgcccacccccaccgtcccctccagtcctctccgtgcctatccagacaccccctctggtttggaggaggaggggggcccaagaacagacctgcttctcagaggcctgggtgcagaacacagcccactcttctgggctgtgcaggaagtctgtgctccagggcctgtctggggcacaggaagtcttcaaagtgcccagagatcagaaggcgctgccgcctcggctctgcagggacagaatgggcccctcggggagccgtgccctggggtggaggcgctgctggcatgaccctgcagaagggcaggggtggcacctgggggctgcacgctgtcttccaggaaggagctgacagccgaggcccgcgagctgaagggtgagctctactgcctgccctgccatgacaagatgggcgtccccatctgcggggcctgccgccggcccatcgagggccgagtggtcaacgcgctgggcaagcagtggcacgtggaggtgagccaggctggtggacacgtggcctcaggttggggggtgccccagctcagggtcatggtaagagccctaaagctcctccacactcccagcccagggcgggtggctggctcccaacgaggcccttcctcaggggtactgcccctccctgtgctcagccagggaccccagcctgcccacgggagccaggagacccgagtgcacacacacggttgggtagctgtgcccacctctcctcttccccctgctggcattctaagagactccaaggtcaggagaaaaccttgggggcagtctgtccagagtgcctgggggttgtggatgacagaacccgctgcatggacagccctgtgcagacacggagctgaagagttcctcaggtgtgagcactgggtcacctggagtgcccccaccgggtggtgggctctcatgttctcatgggtacactgggaacagtgagcccaccacctcccctgatgacctggccagcgctgtgtccggaagctgtgccttgggtggcggcttgggtgggaggccatgcggtcctgccctgatgcaggccccagcccccagccctcatcctcacatgcagatccctgggggaatgcaaggtgctgctcagtgatcccaggcttgcagggggtgcctgcaggaggccccacgtggacaggcagggccgcctctgcctatgagggcccaccatgccgcagcaccaggctggcacctgactcctggggctgaggctgccgagggggaggccagactgggaggggatggtgactcacaaggttaccatcagtgccttagaggaggggtagggtctgctgaccccagggcattcacagaggtgtcagtcccctctgcccagtgtgaatcctgaaaggcctgcacctgcccagactctgctttctgtccccttctgtcactgctgcctcctggggccactgtggtcccctggagtcactggctcctggggtcactgttgtccccgggtcaccactgtccctcggggtcaccgctctagccctgatgccacccggcccgccctttgtccttgcagcactttgtctgtgccaagtgtgagaagccattcctggggcaccggcactatgagaagaagggcctggcctactgcgagactcactacaaccaggtgagcccggtgcagaaccttcagggatgcgggtctggaggggtggccaggagagctgccgtgagcaagggaggctgtgggcaccccctcaggagctctgccaggtgctgagcccaggcctgcaccctcagccctggctcctggcctggggtctcgagacctgggcagctctcttcagtctcagtgtcttcctttgaagaatgttctggggctggtgtgaggtcccgggcacatggggctgacagtgccagcaaccccctccctcccttgctctggtacagaaggcagggggcgctggtgggatgcagtcaccacctgggcccacctccttgcaggacagcagtggccagagcagaggggccttctggggagcaacgccccagcctgttgtccttcccggaagggtggttctcatgggttgccgtgccctcaacccagccttgcagctgggccctgggaggcagggcctgggagatgcctgagaggggccgtgttggagggccaggctggctgcatgatggccctgggctggggtgtgactgcctgcagctactctgacagcctgctcggcccacagctcttcggggacgtctgctacaactgcagccatgtgattgaaggcgatggtgaggccctgtgttccctcccccaccccacctgctctcctggggcctgggtgctgcagctgtgagcccagccgggcctgcggcagcctagccaggcctgctgagtcccacgcttccctcacagtggtgtcggccctcaacaaggcctggtgtgtgagctgcttctcctgctccacctgcaacagcaagctcaccctgaagtgagtccctgtgatcgtgggatggggctcagggtggagggggctcctgcaggtccttcctctcagcagccctcctgcacaccagctgagtctggcctggggatatggtggggacaaggggcagcccggccttataccacccagggagatgggggcaggttcagggggtctaggggatccagggaccccagggaccccaggcacagtgagaggaggaggaacactcatgcctccaacacacctgccagaaccctgggctctggggagggaagggcattccagctcagggaacagcatatgcaaaagcagcagtgtcagctgctcatccaggaagcctcgaggggtgtgggatggctggagctgggagaggagagatggcgtccaggtttccaagggctgtggggaggcatagagggttctggggtttcagaacctgagagaagcctctgggaggcaagggaagcctcaaggcccttctcatccctatgctctctggccatctcaccctagggcctggcctgctggctaggagaggctggtgtggggaggctgggggctgagggaagcccactccacagtcacctgtctggggttaaaggggtgggcgtggggctctgctgacagctcagcttcctcctcaggaacaagtttgtggagttcgacatgaagcccgtgtgtaagaggtgctacgagaagttcccgctggagctgaagaagcggctgaagaagctgtcggagctgacctcccgcaaggcccagcccaaggccacagacctcaactctgcctgaaggccctcttgcgcagctgcctctcggcccctccgccttctcccctcctgctgtccatgcttggccccctcgtccccatccacctgtgccctccgcatcttaccctccctttctctttcctcattgccttctcccttcctgttccctcatctctgccttccccatgtctctcctctccttggccgtggcttctgtctgtgaggaggcaggagctggggagtgggagcctatgaccccacgtctgacagccatgtccacctgtgcccacagcttccgcccacagacctccagggacaggagcaaattgcaccacagctccccgcctggcctggccctccccaggcggctcagtggctcatgctgtcctgtgagagcccctgccccagagcggccccactaagcgcatgtggctcctgggctacccacagccagggcagcctgctggagccacagggccagggccatgcagatggaggcctctgggagccacctccaatccctcaccactcactcaaccagtggcacagtgtccttgtgcccacactgagccagcaagtcctgctgtccacacccacaagctacctggagggacaggacccacctccatccttcggaaggccttcctggaatcccaccttggcctccgccctcggttccgccccgcccctctccccccgaccttggggcttgtgtcgagcccttgggtggggccaggaggaggtgatggcgtcagaggaggtgtggtcagaggtgacttgttcccacctccagggaggacgcttcgtcttcggccagcgcagacctggtgtttgtttgttgggctcacgcttgcacaatgaaggcttgttcacac

SEQ ID NO: 15671 - DNA, 36382 bp, Homo sapiens
gcgctcggctggcggctgcagcagcagagggagacccgcggcaaccccggcaacccagggctcggcgtcgctgccaccatgacgggaaggtaacggcccccacccacgcccccgggccggggaggcgggactgcgggacccctggccgaggcgcagctcgccctcgtacagccccgcggcgccacgatccccgctccgccctggcgcgtcggattctcgcagctgccggggcggcagcgcccgtcggggcaggggtcccccagcccccgcgcctcttcctctgggcgagcgcctgcagcggaaggtggagctcctgcccacccgcccgctgcaagatgggacagccgtctgctcacaaccgacgcccagggctgcgggagggggtcttgtccaaggtcagacaccaaccacgggcaaaaggttcaaaggttgcgtgcctcccccaacttccccgagcccgcgctgtgcgatccccgatcccggtgagtgtcatctctggagccttccgtttcctcctctgtaaacctggggtggtaaaaatgttaaaaatgttgaagggtatgttggaacttggccagagctgcgcccaagcaccagctgtgcaggggttggttggggacagggcgctcccctgggcctggcccaccctctgctctcaggcccctcgttgccatttcacagatgaggtcaccagaggccacagaggctgagccactcaggaggccagtcacaggtccaccagtgtccggccagtgtttgtccctgcagccctttctggaacctagctgggtacaagtgcatgactcaggactgggtgggagggggctgtccctgaggccctggtctcccccagccaagtcctggcagggggatgctgttcttcaggatcccatgacctggggctcttggggagccccagcccggagagtgacctgtggctttgctggggaaaggggcttggagggtacagggcagtgtccaggattgcagtctcaaatccgaggcccacaggggagctgcctctgtgatcgccattaaggctgtggcctggggtctcagggcagcccaggaaccaaaaatagcctgtaacttgtcactttgtaagtcctgccctccagacacacttccctttcttctccccaagcctctcttcccagttagctcccctgacttggagtcacctctaagccttggcccaggcccctctgcagtgagatggagggactcatcccccggagagtggcatctgcaggcccactggctgcctgtggtcaccccctagggttctagcggggctgcctcccattttcctcagagcatccctgccagctggctggttctcactctcctgttttctaggaaaagaaagtggggagagacaggaacagggtccggagcagccccagcagcagcattgaggtggaggtgggtgagaggcggttccttcaggcacaggagggatgtcgaggagaacagagccgtgaagggtgcggggctggaatgggaggccccgaggtgccactgctccctggcaagggtcctcttgcccctgagtcccttgggcctttccctggagacggaggccgtcaggtgagcccggccggaaccgctgggaaggcaggtggtggcgagcaggggtcagccttcccttgctgctgtgggctccaagggcctgagaaactcttaccctcaaatgacacagggatgacagtcagcctttggcaggcactgtgtagggcgttcctcgtccaggcaatactactcgtcttagagaataaggagaaacctggaaacataaaagataacagaaacataaagagaaggaaactgccacagttccactcccaagagcctccctttatgcagttcggtggctccccgcagtcctttctcctggagtttgtttgacgcagctgtgagcgatctgagtgtaatgcacccgctccttcaaaggtgaccctgctgcccgcagtgctggtgccccactggcttccctgccttccatacacagggattgggccgggccagtctgtgaggaacagacatccaacccggccttcggagtgggcgagagttttcctgtcccagaagcagtggagtttcatttccaccgtttcatgctgggtgcccttccccacgtccactgttcccatgtgatcccgggcagctcctcgtgcctggatcctggttctctcgggatcccccatgctgcccagagccaggctgcttttgggaaacaccctctctgctcgcataccttcagggcttctccctgccagctctccctaggacctcaccaggcaagagcagagggagggctgtggggagccaccaaagtgacctggagtggcatgtgtggccatgctgtctgcagatgaacccatgggtgctgtgtggagaaagggctgctgggaaggagatggggaaggagacagaaggcagccactagggaggcctctcctgggtggctgagcgggtggaggagaggaggctgactcagggttctgggaggtggagtggacaggacccaactgactggctgtgaggtgggccacagagggtggggctcgggaggatgcccctcctgtgatgacaggtgggggtggatggcatgcttggtgtggttgtggagtgcttgaagagctgtggcaagtctgagggggagccgtgggaggcacctgggcatggaggggctgaagcccaggagtagccagctgggcagggagtgaaggcagcccagagcatggggtggcacgccgtgggaagagagggggctcggcctcagcagcaactcagggactttgcaacttacaaccacaagatctttgactatcacagctgaagggacctctggcatcaccattgttctacagggaggatattaaggccacctacctagggacccagctgtccctggcattcctggaaatggagcctgggatgttgacacccacggccacgtgagctcagtggcttggctgcataaagtggagtcccacccatggtgtgaccgtcatgtgtgtcacatgtgaggctgtcgtatgcctgattgtgtgctgagcccatgcttagtacagcgcagagcaggctgctagatccctgccctcatatccaccaatcttgcccctcctccgggtgaggagtgtgcccggtggtcccctaggcagaaggtgtcggccaaggggcagctgactgcagctagagccctcagcacagcacacgaggctgcagtggcgtcaggggcttaagcaaactgtaaagtgggtaacaagtgatgtggcttgtgatgtggcaccactgagccctgagccccagactgggccaggtggcactgccatggcccctcacctccttcctttttcttctacttctggtgctgactggccccttctagccggccagtggcataatagggatggagggactgatctgcagggtgtccagtcccgtggtgtgatacccccacctgggctcatttcaagccaccaacatggcattaacgctttacggaattcctgaatagttaacagtcagcacttgtgaactggcaagggacagcccagggagccactggggagaggagcccgggctttctatccacagcgggttatccttcttctgtctgtccctatctgtgctgtgccgcatgcaggctcttttttttttttttgagatggagtctcgctctgtcacccaagctggagtgcagtggcgtgatctcagctcactgcaacctctgcctcccaggttcaagcaattctcttgcctcagcctcccaagtagctgggactacaggtgcataccaccacaaccggctaattttttttgtatttttattggagatggggttttaccgtgttggccatggtggtcttgatcttctgacctcttgatccacccaccttggcctcccaaagtgctgtgattacaggcgtgaacaaccgtgcccagcctgcatgcaggcttaaccatcccttaggtcttcacttccaggtgggaaaggggccaagggaggcactgtcactgtcttgcttgttctgttgaggtgtagcgtgtacatttctgaaggtgaatatttacttagatgacttagcaggatgaccaccctagtgagatacctccatgagtgaatgcatatgtcttgctgagatgaggtgactgaatacacatatgaacataaaacctactgtgtcctcacccacgtccttggaggaatacacgggaaactcatggagttgtcttcagcctcccagcgaggagtctggtgggggagctggctctggaggacagcctgtttgtggcatctctgcctctgtccgtctctgcctctgcccactgggctgagggcacgtgccccagggccttggggaggcagccctgcctcatagcttggggcctcagttccagcctctaagaagccatgtagttgcattcttcattactcacgtgttttttaaaatctgagacatagttcacatattattaaattcaccactttagattgtaaaattcagtggtttttcgtgcattcacaaggctgtgcaaccatcaccattaattccagaacattttaatcattcctaaaagaaaccttgtactcatttgcagacagtcctcatttccccctcctcccagccctggccaccagtaacctgccttctgtctctacagatttgtctgttctggacatttcacataaatggagccatatattatatagccttttgtgcctggcttctttcatttattaacaacatatttccaagattcatccgtatattgtagcatgaatcagtacttcattcctttttctgggtgaataatattccattgtgccatagtttgtttcttccttcatccgtggtagacatttgcattgtttccactttttggctaccgtgaataatactgctatgaacattcccatacaagttttggtgtgaacatacattttctccttgaatatatacctaggactggaattgctggcatatggtaactctatgttaaactttttgaggaattatcaagctgttttccaagtaattgaacaattttacatttattaaattttacaccaggaatgtatgaaggttccaatttcccgacatccttgctgatgcttgttattgttgtccggtttagtaggtgtgaagtggtgtcatattgtggttttgatttccatttccctaatgactgataatgttgagcatcttttcatgtatctgttggccacttgtaaatcctctttggaaaaatgtccattcaaactctttgcccattttttaaatcgggttgtctttttattgttgaattgtaagagttccttatttatttgaatactagacacttctcagacatatgatttgcaaattttttttttttaagatggagtctcactgtgtcgcccaggctggagtgcagtagtgcaatctcagctcactgcaacctccgcctcctgggttcaagcgattcttctgcctcagcccctccagtagctgggactacaggcgtgtgccaccatgcctggctattttttttttgtatttttagtagagatggggtttcaccatgttggccaggctggtctcaaactcctgacctcaggtgatcctcccgcttcagcctcccaaagtgctgggattacaggcacgagccaccgtgcccagccgatttacaaatattttttccttttctgtggatcatcttttcactttcttgattgtgtcgtttgatacacacgttttaacttttaatgaaatccaatttatttccttattctttagttgcttgagttttttttgtcatgtttaggaaactattgcctaatcctggctcatgaaatgaaaacatctgttttcttctaggagttttatactgttagcatgtagctatccagttgtcctagcatcatttgttgataagactactcttcgccccattgaatggtcttggcactcttgtcaaaaatcagttgaccacaaatatatgggattatttttggactctcgagacagggtttcactctttcacccaggctggagtgcagtggcaagatcttggtacattgcagtctcaacctccctgggctcaggtgatcctcctacctgagcctcctgagtagctggaaccacaggtacacaccaccacacctggctactttctgtattttttgtagagatgagattttgccatgttgcccaggctggtcttgaattcctgggctctgcctgcctcagccttccaaagtactgggattataggcgtgagccactgcacccagcctatttctggactcttggttctgttctatgggtgtatatgtctatccttacaccactgccacacttacaattttttagtaagtaaattgtaatttttaagtaaggtgtttttttttttttttttttttttttttttttttttttttttttgagacggagtctcactctgtcacccagggtggaatgcagtggcctgatctcagctcactgcaacctccacctcctgggttcaagcgattctcctgcctcagccttctgagtagctgggactacaggtatgtgccaccacacctggctaatttttatatttgtagtagagatcgggttttgccatgtgggccagggtagtcttgaactcctgacctcaagtgatccacctgccttggcctcccaaagtgctaggattacaggtgtgagccactgcacctggcctctttgtttttttttaaagttgttttgattattctgtgtcacttgcattttcatataaattttaggaatgccttgtctatttctttaaaaaaggcaggaattttaatggagattgtattgaatctataggtcaatttgatgtagtgttgtattgccatcttaacaatattaagttttccaatccatgaacatgggatatctttatttaggtcttctttaatttatatcaataatgttttataatttcagtgaataagaagtcttgcatttattttgttaaacttactcctaagtattttattcattttgatgctgtcccaaatggggttgttttatttcatattcagatttctcattgctagcgattctggtatattgagtgtataccttgcagacttactgaactcatttcttatctgtaaatagggtttctttttttgaggagggattcttccgagttttctatatatgagtatgtaatatgtaaataaaaatagttttactcttccttctcaaactagatgtcttttatttctttttcttgtctaactgtccttgatagaatctgcagtgcaatgttgaaaacaaatagcggactggaaatccccctgaccttaggaggaaagcattcattttctcatcactaagtatgatgttagctatgggttttgggtagatgccccttatcaaattgaagaagttcccttctattcccagtttgttgggtgcttttattatgaaaagatgttggattttgccaaatgtgttttctgcatctgttgagatggtcatagagtgtcctccctatattctattgatatggtatattacattgaattttggatgtgaaaccaaccctatgttcttgggataaatcccatttggtcacggtgtataatactttttatagagtgttagatttattgtattttatcgaggacatttgcatctatgtgactttagcattttattttgagatcaagataatatttatagaatgagttgtgaagtattccctcctagtctttcttttcttttgtttggaaagattttgtgaaggtttgttgttttttgttttttgtttttttctctttttgagacaagatctcactctgtcacccaggctggagtgcagtggcgtgatctcagctcactgcaacctccgccttccaggttcaagtgattctcctgcctcagcctcctgagtagctgggattataggcatgtgccaccacactggtgttttgtatgtttgtttgtaggtttggtgttaattctagttaaacctttgatataattcatcagtgaagccatgtcgctctggctttactttgtgacaagttttttggttactgtctcagtctctttacatgttactggccttactaagtgatttgggtaggctttgtgtccccaactaaatctcatcttgaattgtaatccctataatccccacgtgtcaagggagagaccaggtggaggtcattcaatcatgggggtgtttccccccatgctgttcttgtgatagtgagttctcacaagatctgctggttttataaggggctcatccccctttgcttggtatttcttcctgccaccttgtgaagaaggtgccttgattcccctttgccttctgccacgactataagtttcctgagtcctccccagccctgttcaactgtgagtcgattaaacctctttcctttataatttaccgagtctcatgaagttcttaatagcagtatgaaaatttagactgatacatttggattttctatttcttcttgagttcgttttggtagtgtccttctaggaatctctccatttcagtaggttatttcatttattggcatacagttgttcataatattccattctgctacctccttactgggaccacgagctattattattcaaggaagccatggagttagggagcaggaataagggactaggataagttaaaacaacacaaacctcactggtttgtgtttgtttgtttgtttaccaagattcatctgtttttcttgaccaaatgttcctagggttactgaaaacctttggtggatttgcagagttctgaaagagtagattctgataatttttgctaggtttttcattgcttttatggagggatgaacttctggaggtccttactccaccactttctgctgacatcactctcggtgtttttgcaaatatctagagccagagcactgaaccaaatcccatttggtcatggtgtataatactttgtatagagttctagattcagtttacagtatctgtggctcccaatcccatccctgcagcaggacaggctgcagaatgggtggtaaggttgtgcagagatttgggatttgggctcaatcagactctaagcctctctcaatttctagccttcgatgtccgcttttatagtaaatatttgttgaattgattagtacttggtaaacttgtgcttgaacttcatttacagattatgttgcacaaaacacttgtggctgtagcctcctttccagtgctatatgtgacccttggagccctaaataaatgtttcctccttacagaaaactgcgggtctgcatgagagtcctggattctagtgttgaggatttccacatggatgggctgagtcgggagtggtgagagggtctaggccctatggcattgacttgtagctgctgttaagaacattttcggtgtaagttttcttaagcattcggctacctacatcagagagtcagcggtattccctattcattttggctcctctgggctcagcttctccatgccctttagcccctggggccacctttaaaaactatttgttgaactgatcagtgttgggcaactttggaattggactacatttacaaattatactgtacccaatgcttgtcgtcacttgactgccagggtgcttaatgagtacctcctcctgttgggacttgctgggtgagtgtgttcctcagtggcgtgtgggcctggtatctgaatgccagtgagcccctccaaggctttctcccaccctagtttgggaggatcagtgccctgctgtctttagtgacggctgccagctcttgctttcagaaggcagaagaagatactgctcaagctttctgacctttctagaaaggtctttcagggaaatgggatcaatgctaaagatttccatgagtgctctggatctttattgtactgctgaccaggcttaccttggtcacagtttggatgcctaccgcgggtgtttatgaatcacaagtaactttgccagtctctctgggtaaaaatgcggggtacatggtgccttcctggtggttgccaccaggtccctctgcgtctgctcccctggaagctggaggattgccttttctctaaaataaggacctcttttggggtgcctgaccatttgttggccagatccagaggatcggctctgccctggtctgggtgccccacggtgatgtttgtggcagagggtctcagagaagggagcaaagcagaatgtgggcctgtgtggctccggtcctcggtttcctaactgttggcagggatcctaaaggcgccaggtcctccctgtcctcctcagctgactctgccctcctcagtgtgtccacgggcacaggctttcctcctggcaggtggcagccggagacctcctgggtgtcctgccgccactgtggacctcacctcagtgctgtctggggccttcccagaccagtcccctcccagcgggacccaacccccgccagcctcagctttcaggagctgcccccgcggcgcgaacaatatcctttctatttggagttgactctgctgccctttggagatcccagcgcgtaacgtgagctcgcgaccagcgcgggggaggcgcccacacgcccgtcccgtcttggtgtctggccccaggcggccgcgcctcccctccgaggtggtcccatagcccctgcaccaggcggcccgcgcccgcgacctcaaggcggctgccccgcgccatggcggcccggctgggtgcgctggccgcgtcggggctgtaccggcggcgccagcaccggcagagcccgccgccagccacggggtaggtggccaggggcggggcgggtggcggggacaatggccggaaagctgcggcggcagggcaggccttccctcggaaacccgaccggggccctccgacgccgtgggctctgccccggcgtcggatgggccctgggttggcgacagggtgggcgcgtgcgactttatctaacagggttggatgtcacctgtgatcagctctcctggcagggtgcgcccagggacctatgttagagacgagggagcctgtgtagcccccagcactgctttcagacgggggtgatcatgctgcactttatagatgagcagacaggttctgagcagagcagacacctgctggactcacccaccccaaacatggctatgctgtgatttgaacccaggttagactgactccagcagtggggttcaggatggtcctcagggcatctcagagaatgagttggctctggatggggaggttgggaggggcacggggatggtggtggagccacctcccctcactcttggggtcaggggcatgaggaggagctcctgaaaatgttgcctttgcagtgccgaggggccagcggggaagagagagcaatagggctgtgaccttggggtccttggcatcaaggtgacagatagggaccctggggaggaggccaaggctgggcagaagggctggggcgggggggcagggagggagccaggaacataagtcgcagaggtaggggagggcctggaggacccaggagcagaggaaggccagtgccacccagggcaagcatagcccactctcagctccttgtgtgtggtcagggaaggctcccagagtggcaattagaggactgagccatcaaagatatcttttgctgagaacagaagaggaaggagggcaccgagtggagggcgggaactgcaggccggcagcacggccatctgtggagtccctgctgcatgctgggctcccgcttgtgctggcatggcaggtctggggcagcctgctgttcaggtggggacccccagactcaggaggccaagtcactcacctgagtgtggcagagctggagcaggcaccctccctggtcaacctctggacagccctggatgcgtgtggcataactgtggtaccaggctgcgagtggccagggcactgatggccccaaggctgttctggagtgattttcacagtactgataccacagctgagatgcaggcaggacaggcacgatgatgacaggcctggggcagccctgagcatgcatgcgcatgtgactattcacactgtttttctttgaacttctggttcatgtcctttgtcagttctttgttgttagtgtaacatgtttcagttgtacctgcttaaaagaaaagccactagagcaaagagatatggcaagggcttcaaaaaagctctaatttcagacaggtttcatactgatttggagtctgtttctgatggtgtcaatgcatcttgtgtatagcagcccaggcagcatgttaattttttcttttttattttattattattagactttaagttttagggtacatgtgcacaacctgcaggtttgttccatatgtatacatgtgccatgttggtttgctgcacccattaactcgtcatttagcattaggtatatctcctaatgctatccctccccccaccccccaccccccaccccccaccccacaagagcctctggtgtgtgatgttccccttcctgtgtccatgtgttctcaatgttcaattcccacctacgagtgagaacaggcagcatgttaattttctagcgtccccatggtgggctggctttttgtacatttttgttgacctcatgtggccaggtgacccgacactggcctctggctggcttcatggaggcggggcagggaggaagcccaggcagtgctgagggactggagctgctccctgggctgtgctgcagtagggtccctccccgaaaccctctgcatctggaatagtgcctatcagtgcaggtgctcagtgaggacttcgttggaaggaggacagaagcatgggctgtgcttgcaggaatggcctcactgaaccctcccaacagtccctggaggtagctattcctggcccattttataaacgaggaagttgaggttcagagtcctgtgctgcaggtcacacagacagggggcgtcggggccagggttgcagcctggtgtgcctggctataggggacacacccttggtctgactgctgctcaggccgacgtggcctcagcaacacttgctcatcttgggtgtgaccagacttcttgtggctggcccccaactcttcccagatccttacacacacttccttgactcagatatcaggaaggctgggatggaggaaggtctggggttgttgaagaaacagaatccggaatgggggatgccaagaggagatgggaggaacatgagtccaatcctctgtgaccctcagctggttactgactctctctgtgcttcaatctccttatctggaaccagcctcctccccttatacaaaggcctggaacagagcaggctcctctgatcccacctcagactcagggacatcttgcaacaaattggcttgtattggctgtcaaaactgagagccttctggggtgctggagagggctgaggaagggcatgagatggtgtgctctcccccacctctggggtttggcttccaggctgggtgtgccctgggcagtatgttctacgtagtccagctgggggtgggtagtggtgtctcctgggggataactggacagactctgtgctctctatcttgaaggaatgtgcaaaggaggacatggaatgtccacgtctctgaccctctgacctctcgcagggaccgcaggcagcctgcaggccttcccctaggctgagccatgcagagggactctggaaggctcccagagttgctggaaaacaacagttctccttatccagcgctttgccctgcctggcctggtgctctgtgctggacacgtgggtgccattcattcactttggctcctcgatgtggctgtttctctggtgcacctctttacaaaagagaacgtgaggcctacagaagcgagcatctctctccaggtcccaggctggtggctggggctatcacgtgtagagctgagcggctgggcccaggcctctgccggcctctctgtgtcacactgcctctcttcctcccctgcaggagtcaggaagcgtgttctctcatggtgctgtgtctccgttgtctctgcatgcttctgtctgtcccgtctttgctcttggagcagaatgttccctcacagagctgctgttaggggctctctgtgacttgggctggggcagcccctgggcacaggaaggaggtggccacccccacatccgccccccccacccccacctatgccacgctttgtgcgatactgtcggccacaggcagcaatgatctccctggatgcattcagggaccagccgaggaactgcttacagactggctatcaggtctaactggaagatgagccggaaggtagaggagagtgtgtgtggccaggctgctgtcaggttgaccaggtgtgtccagcattggctccttttggtgggttcttggtctcgctgacttcaacaataaagccatggaccctcacggtgagtgttacagttcttcaagactgtatgtctggagtttgatccttcagacgttcagatatgtccggagtttcttccttccggtggggttgtggtcttactgacttcagaagtgaaggctcagaccctcccactgagtgttacagttcttaaaggtggcacatccggaattatctgttcctcgaaacgattcctccccgtcggttcatggtctcgctggcttcaggattgaaactgcagaccttcgctgtgaacattacagctcataaaggtggcgcagacccaaagaacgtgcagcagcaaaagctactacaaagagcaaaagaacaaactttccacaccaagcaaaggaaccccaactggttgctgctgtgggttcgagtggcctggttttattcccttatttggcccctcccacatcctgctgattggtccattttacagagtgctaattggtctattttatagagtgctgattggtcagtttttaccaagtgctgattggtgtgtttacaaacctttagctagacacagagcactgattggtgcatttacaatcctttggctagacagaaaagttctccaagtccccaccccaaccagaagcccagccagcttcccctttcagtgggaagcaaggtaactggggagtgctagttgagggtgtgtttatgaaacggcgagggaggaagggtggtgaagcagctgggctagcagggcaggagtgcccataaccacaaggaaagtcacaggtcccagcagcacctggcccgtgggagtagggtcagcacagctggaagccagagggggcaggcgtgtgggtgcaggccctaaacagcagttcctggaggcagagaacaggagcctggaagggggtgcgagggatgtgtgctcactcactggggtctagaggtctggctttaaggcggaatctgaaaggctggggctgggtggaagtccttaatttggcttcgttttctgggtccttggagtgaggaattccaggcccagagccatgggatttcctgttgatttccgacttctctaagactcccaaggtctcgctcatgggcaggcactggaatgtcctccctgccaccttgggtgtgtgtttcagaagaggaggttcacagtgttctcccggaaggaaaccaagcctgtcctagtgaagccctgcccagccctcgagggtggcttggggcggccaggctccaccttggtggcctgcctggctcgccccgtggagaccagcagggagctgggagcactgaggaccagccgctgggtgccgaggcctcctttcttcttggtttcttcccaactcctgttgccaccatctttgcttccttgcccctctggcctaaatgtgggctcgcatggtggctttggtctcctaagcaccccagagggcaggccaaggtggacagaagcccagcatgcccagaaagcctggttgaatggccttccagacagcctctgccacatgggtccctaagcagagaagaaaggacagcctgggtgcccctttcaagtttccagtccatctccatttcgcagcagcctcctgtgagaccctccgcccacagcccatgcccagaccctaagcgcagccctgtcgtccacccctggactcatcctaaggcccctcttctctgtggttgacactcttcagactggccctgcccagattgcaggccgcagaacagcccgacaggagcctcactcaccaagcatttccctcatgatgtcgcggcagtgactgctgggtgggattcatcctgggaggcagagcaggcggagaggtattcccaaaggcactgcactcgagtcctgccaccacccggctgcaaccaggcagacgttaccagctggttgcgtcactccccagcgagcctgatgctccctctctgcccagtcttccaggaatccactggagttgacacttgagacagaacccacgttctcccttcctagcaaaaggtgtggggtatccggttctttgaaggtcgtagaggcagttggggtgtttaggactacatcctgaccctgtttttgagtctaaaaggcccctcctggctgtgccgaagggccctggggctggactgattgcgggcctggctcactgtgggcttttcccctgtagttcgcatttcacccctcccagaaggaaacccaccactgactctggggacaggcagtgcccagtatggatgagatttgctccccctcaccacactcccgtctcgtctcaaagattcatactcttgtcttttttatttattttttattttgagacagggtcttgctctgttgcccaggcctgagtgcagtggcactcagcctcggcctcccaggctcaagccatcctcccacttcagcctccagagtagctgagactacaggcttgcaccaccacacctggctaatttttttgttttcttgtatttttattagagatggattcttgccatattgcccaggctggtctcgaactcctgggctcaagggatccgcccaccttggcctcccacagtgctctggatgacaggcttgagccattctgcacacgcacccagctaccctcttgcctgctctgtgtttgggtggttatgtgtttattggaggcagtcagtttgaaactaactcatggtgcagaggatggaaccatggaagactgagcagtctggattcaagtgtggaccccgctctgctgtgtgagcttgggcaagttactcaacctctttgaggcttaggtcccttttctggaagaggccataataatagtagctgcagtattgccctggggattaaatgagagtgtgaatacagagccgctcacctgtgctgggtggtgttctgtgtgcgagactctctggtccctgaagaaggggtaataggggcccaagtgggagttgactgggcccctgacaccccaaggggtgggcactacaagcactgagcagcctggaccctgggttagagcgattttcctgatcctgcagagcgtcttcactttttaatacgaggtgtgtctgtcgggcgcaggcccccgcgtgtgccccatctgcacccctgaccagctctgactcactcctcctgtctcctgcccccagcaatatgtcggacgccttggccaacgccgtgtgccagcgctgccaggcccgcttctcccccgccgagcgcattgtcaacagcaatggggagctgtaccatgagcactgcttcgtgtgtgcccagtgcttccggcccttccccgaggggctcttctatgaggtgaggacactactgagggctttctcagacccagctcggagtctgccctctatgagcgggtgggccgggctccatgcagtggtcccgactggtgacagggccaggtctggagccagcccagaaccaggcttgagctcctgcacgggcccatccttcacctgtgagatgtgaacagcaccccaggtgccctgggtgctaacagagagccacctttcaccagcctcctctgggcagatgctgggcaggccctgggggcaggaagagcctgccctggtggtgcttgccctccctggggactagacagtgagcacagcaaccgcatggcccaccagctggtgctgatgccctgggggtcagggttcccggggtggggtgcggtggtgctcagggaaggtgaggtttgggcacacctgaggggagggagacatactgggcagagggcaccgcatatgcacataccctgtggtgggagaacatggggtgtatggagagcagtaggaagactggtgtgatggaagccgagggcatgagagggagaaggccaggagctgaggaaagggaggtggatctcgcttggccccacgggcctctacggagccataggcttcccctctgcaagaggcaggagccacctcggggtgtggagcagaggagtcacactatctgctgacatttgaaaaggtgacctggccgggcgcggcggctcacgcctgtaatcccagcactttgggaggcggaggcagatggatcacctgaggtcaggagttcaagaccagcctggccaacatggtgaaaccctgtctgtactaaaaatacaaaaaatgagcctggcatggtggcaggtgcctgtaatcccagctactcgggaggctgaggcaggagaatcacttgaacctgggaggcagaggttgcagtgagccgagatcgcgccattgcactccagcctgtgggacagagcaagactccatctaaaaaaaaaaaaaaaaagaaagaaaaaaaaaaggaggcttgtggccgctgtgctgaggagaggatgtaaggcggggcaggaacagaggctgggccaggaggctggggggaccaggagctgaattagtgcaatcacccagatgaaagtgaaggggcccccaccagctcacaggagcagtcgttaaatcatcaacaatcttgggagctggttgggcaacagagttattgtttaaaaattaaattatatcagcgtacaatgggatacaattttattaaaaacaaaggtaacaaatactcaaagcataccacttgctaattattttgttccactttactatcgtctatgctgatggggttatttctgtccattgtgctggtgtggccactgcacatctcccctcaagtccacatcgatgtcatgttggcagccaggagttggccatgacgggaatattcacaccatggacactggcaaacgccccacagcagggcctgcctctgcgccccagagagctggctgttgagcatttaccagaacatcacttgtgcttgtggtggcggtggtggccaggggtcagatgctggctctgtttcaaggtagagctgatgggactggctggtggatggatgtggggcctgtggtccgcctggcagagcaagagccgctgttcctcacagtgtcttcagcctcctgaggaatgctgtctaagtgtagaggcagcgggaggggtgggcaaagctctaggaggggtggccatatgcccagaacaaagcctctctctctcacacacagcaggtgcccagaagattttcattgctgaaagagtttaagcccttcctgactctacaggtcactgggtagggctatatccagtttagtctaataagacactcattttagagaacagggaaaaaccaattaaaaaacagaaaatacaattgttagaggaaagcagaggcaggctttggccccgcttgtggccagcacaggggccctcgctggcagctgccgcctggagggtgtgcacactggctcctgctggccgcagccctgagctcttcccacttccccgtgcccaggcccttcctgcgttcccttccttctgtctcctatacccgggtcttcatggcctctgagagagctggatactcccacagagaaggtatacgaaataggaccaagtgacactacacttcagactggatctcatccctcctggcttaaaaccgcctcgcccccagcctgttctccggaccaacagggtccagatcctcagtagacaccagtggccctttgacaggtggcctcacggacctctccagcttccacgggggcacctccctttgcaccccaccatcccaaaagggccagtgtcctctctggccaggcctgggacccactgctccagcctcagcccggcatgcccctgcctcagtgcctcatcccctgctgtcaggtcctgacccaacaagggcctgggctgctcatggggatgataggtggtttgcttgtcctctctctgcgacccctttgcagtttgaaggccggaagtactgcgaacacgacttccaaatgctgtttgctccgtgctgtggatcctgcggtaaggccggtgacagtacacatcctgggctgcctgggaagtgggcagcagtggcggggggcagggggccgagggggtacacagaactggcccagctctttcctaactccccaccttgcctctctgagcggcagccgtcaggccccctacaggcatcaccatcccacgagggagcccatgggccaggcagagagcaggcggagtgctaggtggacagggcttgggagggtccgaagaggggacaggcacgtgctccccagccagcagggacctgtcttcttccaggtgagttcatcattggccgcgtcatcaaggccatgaacaacaactggcacccgggctgcttccgctgcgagctgtgtgatgtggagctggctgacctgggctttgtgaagaatgccggcaggtgaggtggccgtgttgggccagagaggactgggccacagcccttcctggcacacctgccacctctcctgtgtgctacccacttgctgagggcgcagaagggtcccggtgctgcagcctgcactgatgtagctgccctccctccaggtcaccccggggcggatagtccagctcccagtttacagggccccacgctcagcgagctcctggcagcctctcgggagccatgagaaatcctcacactctgccacccccctggccaccccatctactgaccccacctgtccaccttctcctgcctgtacctgtgcagctcagtgtggctggagggagatgcccacatttactctaaattgagggccacaaacctcatgggtactccagaagttcccaccttctgcgaacccttggtctctcatcctcccttcccaagcactgtccctatagcaggtggccttgtctcccacctcccctggccctagctctgagatcccgtgcagcccggcctctgtctgtgagccctgttcatccccacactttctccagggcttgcttctccacgccactctctcgtcctttctgaaggactgggctggggagctgggttaaaaacactgctgggccttcctccccggcttctcccagcacacccgctgcccctcgcgtgtgctaccctggcctcatctgcccagggacccacacctcctcttgacccctcagcagccctcaccacagctgctgaggtgcagaaacgccccccttctggcacccgggaccctgagttcctgtggttctgcccgcccccacagctgcacctgctcactcccctcctctgagtcacctttctccctgtctctccatggggagtcgtctggggctccgtgcccggccctcatggctgcccttgcagacagaatcctagagccctaaatggcacatgtgtctggagaattccaggctccacttcaggcctctctctcgctgtcctcagctgcccacatgtcacctccacttggtgtccaccaggcatcccaaacgcaatgaggcacaagcagtttgggattctcctccactgaccaccaaggctgcctctgcatgcgtcccctgtatcagtgagaggcagcgccgacccccagaggccccagccatgcttcccctgccacactctctctgtccgggcactctgctccctcccgcagctcctccgagatgcttccccgacactaccgagctcttgtccgtgtgctgcccgtgagagaggcacgtggcctggggcctggcgtccggcccactgtcctcggagctgggcggtgcctggcattgagcagcttgtctaaatgaagggctgaggggcagacggtgcagtgcaggggccgagggacagcaccaggagctcgtgctgaccagcaacgtcgccgacagggtgtgtggagcgagcccaatctccttcctgagccaaggtttgcacagggccactgccccaagggctggttggggaaatctgaaagatgctggaaacgttttggaaagtcaaacatgctacaaaagcatgttgccgtaaggacggtgcagggtggcagctagagtgaggaatgagggcccctacttggccctcccagccccacagtgcagaacctcagaatctgggcagatgtgctgtgagctgccagagccccagcaagagagcccacgaggctgcctctgccactgtaccaccacttcaccattcttgggtcagagaagttctgggaaacgcttcatgttgaccaaacataacaacctgtgtagtcttaaagctacagttatatttatggtccgtacaaacaaatacaaaaaaggacatgttagggaaatatctgcacactagcaagggaaatagctcaggcggagagaggcctctctggaggaagtgggtctgggtcagtgggaggcaggtgcacagcccagccctggcctgagctgagctcccgtgactgcacatgcttgtccaggactgggaggcctgggagcctgtcaaagagctctgggggttgcaggcttgtgcgtggggttacagcaggagagatccagaatccagagctgtgctgagtccctgcaggccgtgagtgctgacgtccgctggcaaccagcctgaaatgtgtggcctgtgtctcttcaactcaggcagtgtgtgtctggcagaggcactacagaggggactcagagtaccttgcactgcaaaggagtattgagactccctccccgtccccaccaggactcccaggtccctcttctgggtcatttgcagcctgccttcagggtctttctgctgagcctcgccgatgagcgattctgtagcgggaaggaggctgggagcctagcgggaaagaaaggcctccattgttcaggggttgttcttccggcctcctctctccctgccacagatgaagtcgttgagtgtctaggagccattgtagccatcacaagcccctgcagaggggtggccgatggatcccctttgtcagttcttcctttttatgggttgagactaggcgatctagagaaatggtgggcatctgctgagatttcaggttgcttgctggggaggtggctggggaaagggcagatgcctcttgctgggtctgctgagtcctaaacagtctgcgctcggcctggacggcgccccccgctcacagctctgacttggcactcagcgagctctcgttggttttcccttcgaagctggggggcgggcccttgagccttttgccacagagcaagttgcacagggcgtggcggaacttctcagccacgaagaaatacatgatggggtcgagtgccccgttgaggctggtgaggcaggaggtgatgcggtttgccagggccaggatgcgctgggtggcgcaggaggccccatggctgcggtagtgcagcacgtagacggagcggttgacgtggtagggcacgaagcagaccaggaagatggccagcactatggcgatcatgcgcactgccttggtcttgaggcgcttctccacacgcaggccctgccgcaggctgcggatgatcagcaggtagcaggtgaccgtggtgatgaacgggaaggtgaaggccactgccagggacaccagggcatggtgggaggccttctcccggtacagctgcaggcagaccaccgtgtggttggtctgcacggtctgtgggctcaccagcagcggggccatggccacagccaccaccacccacaggaaggcacaggccaggtgtgcgtagaggggcctgcggagcttgagggacttgaccgggtgcacaatggccaggaaacggtcggcgctgatgcaggtgaggaagtagatgctggcgtacatgttgaggtagaagaggaagccggtgagacggcatgcgatttccccaaatggccagtggttcccagagaagtggtagaccaggcgggtgggcaggaccagcacgcacgacaagtcggccacggccagatgcatcaggaacacgttggccggggtcccggacttgtggtctcggatgaaaagccacagagccagggtattgccaactaaagccaggataaaatccagaaggtagaaggaggcgaacagcatgttctccagtggcgtctcctggccacattgctctgccgtggccagggagaagttggtgatcagacctgggggagccacttcaaggccattcatgctttggctggagtcagagcctggagggaacaagcaaacagttcacaatgagcttgcgatctaggcagcttcacgctctctgaagtccagaagtcaggcctccaatgccttcagaacctcccactttcaagctcagcaccgcccacggggctgctgaggggacctccttgtccatttggtgtgcgtgagcgtcagaggcattctgaacttcagcacaaggcaaacgcagaaccagggcttggaatttcgccgctatgcagctgcacccctgccacccaggagatctgaggctcctcagagctgggaggaccgggtcagtgccatggcggggaatgggacgtgagccttgcctgggtgaggctctgggttttctgttctgcctctgaggtgtgctgtctgagtgacaggggtggtgaggggcgggggcagtgtgtctccgggattccagctcctcctcagcccaagccttggcaggtgagttctgttcatcctgagtgcctggaccctccctgacccacctgcccacaggtgcagtggccggggtgtcaccgctttctgcttcccctgaccatggcttgcccctggcacttaggagggtgcccccaggatggcagcaagggctgtaccctgggacgtcagaggtctactctttttacccacctgagagtttcagcatctctcttgggggctttctggatccagcccaccaactccgtttggacatcctgacaggtggggagacctgtgtttaggagaagcctgtgcctgggtatcaggccagctgggagtattttctctcccagagtagatccaccaccagggggcagcatctcttccaggaggggaagacccattttacccagcgtcagagacactggccagcgctgttgaggacggatctgcagccccagagaggcctggaggcctcgtggcttgcccacgtttgaaggccaagtgcagagccctgtgacagtcctgggtaacaagtcatgtccgtctggtgaaccctgggtctggatagggtgctccccaccctcagcagagaaacccactcttgttttgattttagtcaactcagaagattgaagaaggagagtgagggtcccaaacactctgcctccccaacccaggcctgcgagtggcagtgtgggcaggcggtggggccagagcagcccgcagcccggaaccagggcaggacagcgcacctggcctgcctttgaattggggtcaccagcgggcttcggccaggtgggtgctgatgatggcacagcttctggggctcctctgggcacctggcttcccagtatccaccatccccaccctgcacagccaggctgaagcagaggctggagagaggtttgcataagagaagctggcatcctgcctgtgcccattgtggcagcaggaggggaggaggcacgggccacagccctggcagggtcctcatcctgggcgagcctggctctgcaccgaacagccggggtcctgcctgcagcaaattcactctgcacatttctccctgcccttccttccttccttccttccttccttccttccttccttccttcctaccttcctctctctctcacttcgctttgcttgtttgcttgcttttctttattttccttttttcttttcttttttctttttttcttttctttttccttccttccttcctttcttcttttctctttctttctttttctttctttcctccctccctccccttcctcccctcccctccctcccctcccctccctcccctccccccctcccctcccctcccctccctctcttttttctttttttctttctctttttcaaggtctccctctgtcacccaggctggagtgcagtggtgcaatcagctcactgcagcctcaacctccagggctcaagtgatcctcccacctcaacctcctgaatagctgggactacaggcgcacaccaccacacccggctaatttttgtattttttggtagagacggttttgccatgttgcccaggctggtctcaaactcctgggctcaagtgatcctctctccttggcctcccaaagtgctccttggcctcccaaagtgctgggattacaggcatgagtcactgcgcccagcccctctcctcttactgattccacagggctgtctcaggatgctggtggcacggggcagagagggcatggtgactgttcatggacacagcagcccctcgaggaggaggctggagccatcctcatatggaggagaagcaggcatggtggtggccctagccctagggaagggtgggccgcacccttccttcaggagagcgagtggccagctgctgtggccctcacatggagggtgagggctggcccgagcacctggccatcaatgtcctcaagcaaaggggagggcaactacctaataatattaccttttagctatttctctaggcaggttcccctacctgaaaagattgcccccggcttcagagtgtttcaagatgcctgaagttctaacaccagagatggtttcctgctgcttccaggaacagggtctgttcttagtccaatgtggagttcctcatggggaccccattccccaggaatccaggttccacagtactctgacttggtctggctggtctcggctggcactttccctaggactgctaaaaccacggtgagggcggagagctgagggccgaagaaggcggggtgagtgatgcttgggagagggagacaggcttggctgaagccctggggaagggctgagggctgtgaagggggctgtggaggagaggtaaaaggagggaggaacacagcccttgacagggcctgtgaggcaggggagaacagggagcaggtaccggtgggacggtggcaggggaggggggcccatgactttgagggtgtcgtgttgcatgtgctgggggtgaggacccggagactggaggaacagggctccagggcagacgcatgggcaagcagagaggacagcccatggtagatgggaggggcacacaggtgtgctgttttcaggttggcaggagaggaggaaggtgtgtgcggggaggccctggagactggaagaggagagggggcccagtgagtgaggggcccttgttagaacctgggggtgggaaggggccaaggtgggtgccctccaccccaggctgtccctcaggcctgtgctgtgccccacagtgcaggcatcacctggccccacgagagagcagctcataggtacgactgaccactctgcctggcatggtgggggcctgcctgtgctggctcaaaccagttttagccccatgttgcaggttagggagtcaaggctgagtgtctgctaacttgtcttaggtcacttgaccaggggacattggccctggagctggaagtgagaccggggaaacggtctcactccctggaagaccgccagggtggggagtgtgactcagtctcagagtttgccatggagttgtctcccaggctcagcaccccctcctggccctggggccactccctcattttaggggcccatgtatgaaatgagaatgtgcagccccttgctcaaaaaggaagagtttcaggacagtgacggcagagtgttactgggctcagggccctgagtgacggcaggggtggcatatctcatggcaccaggtgggcctgtggtgcctcctgcctccagcccgggggcctcagcctgggcactgccctccacttcctgcccgggccgaagggcgtgcccctcgctctctctgggactgagactccattttaaacagctttctggttggtttcaggtttgctgaggtttcttctccctttctgtcccccgtttgaggagttctgatactgattgttgcagtttggtctgagatgggccccgcttcactctctgttgccctttagaaacacaaacttcagtctagactcgctggttcctcacgactcactggtcagacggccaccgagccggtgtccgtaagaggaaagggcgtggcatgggccggggcctgggcagtgttgggtcccgtggctgtgggtgagtcgagcatctaggacaggtcataggcctctgtggaggtggcaggtgggcatgtgtggcctcggggagggcctgtggtggcagcgccatggccaggtggtggcagtttcctttgcattagcgccactccatccctggcccgagccctctcccaggcatctggctcctctatgggtcaaggctgcctaatggttaggggcagcggtgctgtcattgcagcctggactgccggcaagccacttcccctctgcaagcccccatcagagggacgaaacaccgctttgtgggctgctgtgaattcagactgtggtcagccttcgatgcacaggtcagaccatcaccaaagagatgggacgagacaggctgctgcctgtctccctgggcagggctccccgctgagtgtttcctctgcttagccctgggctcccagtccaccccacccagcctgccccttacctctagctgctggtccgggaggaagggacaggggtctgcggggcagcaggtgatctccgcccgtgggtgtcggtggtggcagggggctccttgccgctgtgggtggaacgctggctatttaaggagaggaagggagaccacagcccctctggccctgaaaggctgcttcattcctgaggggtcccttgttgtgtcgggctgctcctctggctgctgctgctgctgccaccggagcgtgaatattctagtgtgtccctagcccatgccccccgcccccagcttggccacatagtctgagtgtgtgactgtctcagagactcagagcaggcgggggctgggtggggggcttgggctggagctgagggacacaacaggacgtttcagaaggggatgatttcctactgatggggggcagggaggggccggctgtcatggcaacaggcggcgctcccaggcctgcgcccgcagacggcggagggggcctgtgaacggagggtgggaggccgaggagtcttgctcacggagtgagaggcgactctttgaggacacttgctgtagggtccttgtgtcctgccctgtataatgaggccccatttgggcacacagaataaatcatggcctttatctggagcgaggaacagctgcaggagcctcataatggggcgctgtcctgtccgtgaggatgcggctcagctcagaggccgggtgctcgccggtgcagctccccttctgcacggaagcccatgaatctgaccgctggcctggggctcctccctggggtggctccgggctggggtgcctttgaatgctgccggcggccgcctctgagactgagtgaacaaagttcatttctctctgtctttctgaaaatgatacatccagcaacatgggaaaccaaatcacccttcctggtttcaaaagactttacattttgttgtttaaacattgaaaactgtatgtatgtggctagcatttaaggggcagtgtcttaaatttgtctcttcacatcaccctgtgcagctgggattattgccccattttacagacaaggaaactgaggctcaggcaaatgaagaaactcacccatcaacaaacagtaggaagcaacagagccaggatttgaacccaagcacatgtcactccagaacttaggctccgtgtgtgtgtgtgttttgtttttctgctgcattttgaatttagaattcttagatttgatcctaattcaacctgaaaaagaattctgaaggccacctttagatctgatgctgtgatctggtctgttgagaagctgtttcccatctggacttccttcaagagagatgggcttcccagtttgtctggcctgagagccagctgggtgtgaggtgtctgagccggggcgcaggtctctttcctgttgtgcccgcaggcggctgtctggaagaactggcccaggctggttggaaaggtggtggcttgaagctaaccaccctgagcagggcatttctgggctcacagaccttctgttattggggtgatcactgtcgatggcttcaagggcattgaccgtggtgatggagttttgaggcgttgagctgattcctgcatctttgagacagaaataattcctcgtgggttgagtgttgtcctgacgctcaggaggagtcaccagaatgtggagtggggtcatggggcctacatgctgagtctgggacagaggcaccgcagggggcatgggctggccgccataggcgccaggtggggcagctcagccccagacctgctgaggaggtggcctggggttggggctggggcacaggtgtctgggcaagggtgggcttcagggattgtggtgatgaagactgaagccacaggccacaactgcttcccgtcgctggggtgtaagagccagggctctggccagtagtcgaggggagatgatgcccaccgaggctcccttcctctcttgtagagtcattcattcaccgaggcattcggtcagctgaccctgagctgttgccccctgctgggcacatagggtcttggggaggcacagagagccagtcggcagcttagccagtgactgctgggcctttgtttgggccccttgccctgcacacagctgatgatgagacaccccagggcagatggagcacagtgctgtgcaggatggagtccagacacccagcagtagcaggtcctggggtccagggagggatgctgaatgggtggccctggcatctggggtctgcccaccataacctgggtggggatcttgggtctgcgattggatctcttccgtatcctccctgaccagcctgtcagaggggccaacactgggcgtcgggcagccgtggaggctcgtgaggagtggagagggcccctggggctggggggcctgggaagggaggcctggatgcagcaggagcaccagagagagattcgggtggcaggtggagacgggggccagggaggttggattggggcctttgtgtatctttgcctggggactctgaatctagattcctgccacctttgaggtccaaggaaacagaaaccatgttgatttgtctctccgttgagaacacagctgtcgtccaacacagcgagtagcatcagaaattattctgaggtcttcacaaaaagactctgtagtgacagttcctgggtttgggggcctccatctgacatagcagtgcttgtctttggagacagaaatcgcctgtacgtgtttgggcccttcttcatctggcaaaccccgaaggaagggggtgagtgggcctcccgggacactcactggccactctgctgggcacagtgacactcattataactcgtgtgtgttaaatacattgggaaaataatgctttcagcagatatcaattaaatgtctactgtattctgcagcatgccccaggcttagagaaagtagaaagaggaaaataccatccagagacagtaacctcgagcattctggcatctttcctgctgagcatgcgtcccattcccaggacacacttgtgaccttctgggccttgtgacagggcagtctgctttcccataccctgggctgagcccctttgaagcccccagctgctcagtgaagttgcaggggtctggcctctcttctcctggaggtggccaggctgtgtgggagtgggggctctgcccctaatgcccccgcctcccgcaggcatctctgccggccttgccacaaccgtgagaaggccaagggcctgggcaagtacatctgccagcggtgccacctggtcatcgacgagcagcccctcatgttcaggagcgacgcctaccaccctgaccacttcaactgcacccactgtgggtaggtgcgcagcccggccctgcagttgtgggggcggggagccagggctggcccagggtaagggcggtggggcctccacctggggaagtgttgaggagggagaggggagcagggtgggcagacagaggggtcccgagagcaaggctgcagggcagaggtgggctgggggctgggaagcagccatggcaggaagcttctctctccagggctctgtttggggggcacttgagactcaggaggcgggtgggctggacccctagactgcagacgagggttgagatggagcagtggaagggacctgagggggcagggcaagagaccgggagtgggcttggtgctggtgttggagagaggagttgcataggcagcccctcagcccccgtcctcgcccacccccaccgtcccctccagtcctctccgtgcctatccagacaccccctctggtttggaggaggaggggggcccaagaacagacctgcttctcagaggcctgggtgcagaacacagcccactcttctgggctgtgcaggaagtctgtgctccagggcctgtctggggcacaggaagtcttcaaagtgcccagagatcagaaggcgctgccgcctcggctctgcagggacagaatgggcccctcggggagccgtgccctggggtggaggcgctgctggcatgaccctgcagaagggcaggggtggcacctgggggctgcacgctgtcttccaggaaggagctgacagccgaggcccgcgagctgaagggtgagctctactgcctgccctgccatgacaagatgggcgtccccatctgcggggcctgccgccggcccatcgagggccgagtggtcaacgcgctgggcaagcagtggcacgtggaggtgagccaggctggtggacacgtggcctcaggttggggggtgccccagctcagggtcatggtaagagccctaaagctcctccacactcccagcccagggcgggtggctggctcccaacgaggcccttcctcaggggtactgcccctccctgtgctcagccagggaccccagcctgcccacgggagccaggagacccgagtgcacacacacggttgggtagctgtgcccacctctcctcttccccctgctggcattctaagagactccaaggtcaggagaaaaccttgggggcagtctgtccagagtgcctgggggttgtggatgacagaacccgctgcatggacagccctgtgcagacacggagctgaagagttcctcaggtgtgagcactgggtcacctggagtgcccccaccgggtggtgggctctcatgttctcatgggtacactgggaacagtgagcccaccacctcccctgatgacctggccagcgctgtgtccggaagctgtgccttgggtggcggcttgggtgggaggccatgcggtcctgccctgatgcaggccccagcccccagccctcatcctcacatgcagatccctgggggaatgcaaggtgctgctcagtgatcccaggcttgcagggggtgcctgcaggaggccccacgtggacaggcagggccgcctctgcctatgagggcccaccatgccgcagcaccaggctggcacctgactcctggggctgaggctgccgagggggaggccagactgggaggggatggtgactcacaaggttaccatcagtgccttagaggaggggtagggtctgctgaccccagggcattcacagaggtgtcagtcccctctgcccagtgtgaatcctgaaaggcctgcacctgcccagactctgctttctgtccccttctgtcactgctgcctcctggggccactgtggtcccctggagtcactggctcctggggtcactgttgtccccgggtcaccactgtccctcggggtcaccgctctagccctgatgccacccggcccgccctttgtccttgcagcactttgtctgtgccaagtgtgagaagccattcctggggcaccggcactatgagaagaagggcctggcctactgcgagactcactacaaccaggtgagcccggtgcagaaccttcagggatgcgggtctggaggggtggccaggagagctgccgtgagcaagggaggctgtgggcaccccctcaggagctctgccaggtgctgagcccaggcctgcaccctcagccctggctcctggcctggggtctcgagacctgggcagctctcttcagtctcagtgtcttcctttgaagaatgttctggggctggtgtgaggtcccgggcacatggggctgacagtgccagcaaccccctccctcccttgctctggtacagaaggcagggggcgctggtgggatgcagtcaccacctgggcccacctccttgcaggacagcagtggccagagcagaggggccttctggggagcaacgccccagcctgttgtccttcccggaagggtggttctcatgggttgccgtgccctcaacccagccttgcagctgggccctgggaggcagggcctgggagatgcctgagaggggccgtgttggagggccaggctggctgcatgatggccctgggctggggtgtgactgcctgcagctactctgacagcctgctcggcccacagctcttcggggacgtctgctacaactgcagccatgtgattgaaggcgatggtgaggccctgtgttccctcccccaccccacctgctctcctggggcctgggtgctgcagctgtgagcccagccgggcctgcggcagcctagccaggcctgctgagtcccacgcttccctcacagtggtgtcggccctcaacaaggcctggtgtgtgagctgcttctcctgctccacctgcaacagcaagctcaccctgaagtgagtccctgtgatcgtgggatggggctcagggtggagggggctcctgcaggtccttcctctcagcagccctcctgcacaccagctgagtctggcctggggatatggtggggacaaggggcagcccggccttataccacccagggagatgggggcaggttcagggggtctaggggatccagggaccccagggaccccaggcacagtgagaggaggaggaacactcatgcctccaacacacctgccagaaccctgggctctggggagggaagggcattccagctcagggaacagcatatgcaaaagcagcagtgtcagctgctcatccaggaagcctcgaggggtgtgggatggctggagctgggagaggagagatggcgtccaggtttccaagggctgtggggaggcatagagggttctggggtttcagaacctgagagaagcctctgggaggcaagggaagcctcaaggcccttctcatccctatgctctctggccatctcaccctagggcctggcctgctggctaggagaggctggtgtggggaggctgggggctgagggaagcccactccacagtcacctgtctggggttaaaggggtgggcgtggggctctgctgacagctcagcttcctcctcaggaacaagtttgtggagttcgacatgaagcccgtgtgtaagaggtgctacgagaagttcccgctggagctgaagaagcggctgaagaagctgtcggagctgacctcccgcaaggcccagcccaaggccacagacctcaactctgcctgaaggccctcttgcgcagctgcctctcggcccctccgccttctcccctcctgctgtccatgcttggccccctcgtccccatccacctgtgccctccgcatcttaccctccctttctctttcctcattgccttctcccttcctgttccctcatctctgccttccccatgtctctcctctccttggccgtggcttctgtctgtgaggaggcaggagctggggagtgggagcctatgaccccacgtctgacagccatgtccacctgtgcccacagcttccgcccacagacctccagggacaggagcaaattgcaccacagctccccgcctggcctggccctccccaggcggctcagtggctcatgctgtcctgtgagagcccctgccccagagcggccccactaagcgcatgtggctcctgggctacccacagccagggcagcctgctggagccacagggccagggccatgcagatggaggcctctgggagccacctccaatccctcaccactcactcaaccagtggcacagtgtccttgtgcccacactgagccagcaagtcct

SEQ ID NO: 15672 - DNA, 76623 bp, Homo sapiens
gttcttccgcccctgcctccgcggctcggaggcgagcggaaggtgccccggggccgaggcccgtgacggggcgggcgggagccccggcagtccggggtcgccggcgagggccatgtcgctgttgggggacccgctacaggccctgccgccctcggccgcccccacggggccgctgctcgcccctccggccggcgcgaccctcaaccgcctgcgggagccgctgctgcggaggctcagcgagctcctggatcaggcgcccgagggccggggctggaggagactggcggagctggcggggagtcgcgggcgcctccgcctcaggtgagctcagggccgcggcaggccgggcgcgcgggtcgagcggggtgggctgcggtggggaggtgggggcgctgtcggtggggctgagcgcggcgggggccgccggcgtgagtgagcggaggtggggaggacttcggtcattgaggcggagcggaactcagcagctccccggaacgcctggggtttgagagcggggcccagggctctggagggtggaggcaaaagtggcccagcggctgcctcgctccctgttcccacccccgcccctggtgaaagggagaagtcgaggttgaccccggaggatagtgagagaaggaaagctgtcaggggacccctaggatggggcagtcatccagaggacttaaaatgcaaaagaaagggatgtggacactgctctgggagacctaaggaaggctgggaagaagcgcaggcgaggtgatgaatgcagagggtggggtgcaggaattcatgaacattttgcaaggtattgggaaagactgacgccgaactcatcatctccctccatcaaaccaggttaccacgttctcttcttgacttcaccatgaacatgaaactcgaagtaaaactattttccttgttaggtttggaatggctgtattagggttcctgaagttttggtctcgagactcctttaccctcttaagaattattgaggaccccagagagctcttatgtgggttagagataatacatacatgtaatacatactgatatttaccacctttgaaattaaagctaagacatttaaaaaatattaatttatttaaaaagaataacccattatatggtaacagaaataatactttcgtggaaaaacaaattttccaaaacaaaaaagtctattagagaagtggcattggttttcattttgaagatctctttaatgtcttggcttaatcacagagctggattcgtttatgtgcttctgcattcagtctgtcgcactattacaggtcacagaacgctggaaactgcagtgtccactcctgaaagaatgaatgaaaaagctaaataaagtcttaatattgttatgaaaaatctttatgaccttgtggaccccgcgaaagggtctcaggaactgcactaggggttcccagaccccacttagaaccattactttataccattgttgtaactttggcctgcctttgaaccccttagcagttttttgaacttctcaaatgacaaagatttgtcttacagtataattatttgtacacatctttataaatgccttaagaacaaaaactgtctcttaatattctgttatgtatagaggttagtaaatacttgatgagaggaaagtcattcattcaaaatggtatttattaagtgcttattatttgctagaaattttagaagataaaaaactaacaaatattcaattcctaatcataagggtttatccaggaatggactattatttggggacctttacaataacatattaaatgctgtgttgggtatgaatgataatggatttttatcttttattgaggacatggtatgtaccacaaaatatactaaatgtttacatgctgctgctgctgcttcattcttctttattcttcttatttttgcattatcttttttttttccgagatggagtcttgctctttcgcccaggctggagtgcagtggtgtgatcgtggctcactacaacctccgcctcccaggttcaagcaattctcctgcctcagcctcctgagtagctgggattacaggcgtgcgccactacagcccgctaatttttttgtatttttagtaaagacggggttttgctgtgttagccaggctggtcttgacctaaggtgatccagccgcctcagtcttccaaagtactgggattacaggcatgagctaccctgcctggccacattattttcttaaaccctcctgacaactcttgtttcagagtttgggattgaggcaaaggataatagtgacttgggattattgcttgtgcaaaggagtaatgatgtgaggagggaataactagcaaggcctagcagagaagtggcataatttttttctgttctaggaaaaacacgttgggcttttggatatgcaaaaaaaacaaatacaaaatattgttatgctaggtacataaaattttgaatttctggacttaccataatgtaaaaaattgtctttgggggcagatctccagagtattacggtgctaacgagtactctggttagggaaggttctgggcttcctgaagaaagccaggtatggaggactcctacatggccatgaaggagagagaagaaagtcagcaaggccctgccagggaagaagcgtggctgctggaatccaaaagcagcggatacttgatgttgggtgttgtgttttcctcgcctgccttcagtcagtttttgttaaaggctacaaaatggtcttagctttgtttgggggaactaaaggaaatatttgaggccacttttctgtggagtcacacagagagaaggggacagttgcctaacaagaggtggcaagcacaaagggcatgcagttgtggaatctgagaatttggggtgggaagtctgatgagaggcagatgagtttcacctgtctttcaagatggtaaagattagttttgaggaggttggctggggtgagaagggttggagaatttgggaacgttaagctcatccctatggagatcagaagaattaaacggactttttttcaaaaaacagcactgggagcttgggggctggacagtgaagcaaggtcagctggggatgcttactctatttaagacaaaaaagttattgtaaagtgatttcatgctgttgggagaagatctgtgatactagaaggtcctaaaggtattttttctctggtgccaaagacaggaattatagtgtgagtgtctagtccgtgtgggtgacaagtcccacgaggctgtgaagtgctttcttcagtcactggatctgcagccctagaatctcgaaatgttgcccattctgtttctttttcttctcttcacttttttttctgacactttacatctttcctcaaactgggtgaaaatttaataatacaaataagtaaaccacaagaaaagagcccgttcaaactgtctacaagagattagaaataattgtaaatgttttcattgctgatgactcagagtaaatccttgttgatagcttagttccccacaaccatgtacatttgggaatgtgctatagtcagacccggccctgattccattcaagactgacctggacaccctttgctgttagtgtagatagacacagactctgagggtcttgcccaagctatgtaaattctttggtggcatggaacatctgagccctaaggatggcagaccttccaggaggttctaaatgctgcctaaaattctgttaagtagggagcttagaaatggggctgtggaacctggaccatggaaaaacagtcattgcatacctgctgagtagaaggtgcacttttagctgcagaaatcctgctttcatgcagtttattataggaatgagaacgtgtaaaaggctctaacagaaggtttcctcccagcctgggaaacatactgagaccctgtttctacaaaaaaacaaaaaattagccaggcatagtggcacaggcctgtagtcccagctactctgcaggctgaggtgggattgcttgagcccaggagttcgaggctgcagtgagcctcaacaattattattgaaattcattcagtaatcattcatttatgaataattaatatggacaagacagaattttattgatttaggtattgtcaacctccagcatggtcgacagagaagaccttgtctctaaaacaaataaactaaaaaaggtttccttctcgccctcttggtcttatccttcagtcccatgactttacatttatttgggttgattactcctaatttctatttccagcccatttctctgctttgaactcctagattcacgtatgtaaacacttgtttgccatcttctcttgaatgactaagacacgtcttaaatataacatgtccaaaatttaacacgtcttcccttataaacctctttctttcagtttctgcaccctctggttgttcagtccaaaaacttcgaattcattcctgactccacttttacacacaaatcgtttttgtcagcccatccttcctgctgtaccttcactatatatatgtagaatccaatgtccactgctggcacgctgggccaagccacgttgtctctcaactagattattccagtagccacttaacttctccctgttttgctttgctcccaccccagtctgttaccaatatagcagtaagaattattcttttaaaacatcacatcaggtcttattcctcctctgctcaaaactctcctattgtggccaggcgtggtagcctcacacctgtaatcccagcactttgggaggccagggtgggaggattacttatgcctaggacttcaaaaccagcctgagcaacatagatagaccccattaaaaaaaaatgccaactctcctattgtttttccatctcagagtaaaaacaccattagctaccagttcactcttcaacctgatatcttcttgtctccatccctctctactctggtcacatgtgctttcttgccttcctttggacacagtagtctttgtacttgctgcctactcaggctgagatggtctccacaggtaaccacatgacttgttcacctcactgagctcttctctgatcataatatttaaaattaccctctacatctgctcagtgttacctgtctacttgcgttacctccacaacacttaagaccattggttagttggatacatacacaaaaagatatctctgtgtttatttaaatttatgtctgtacttctctagaatgaaagatccaggaagatacagaattttgttttgtttgctgctgtatcctcaacacctagaaaaaacagtggcctattttaggtgatggagaaatagatcaaattaatgaataaagattccaaatagtaaatgtaccaagaggagaagcagaagaacctaaaaacagcattatggtttgtcccctaaagggtgtataatacattctatttgattatatatttttttaaagataaaaatagagatatttttaaaaagtaaagtacatttgtttcagtcataaagcagtttttaaattaaatcaaaaattctaaattaggactttcagaaactacttcaaagcacactcttacaggaatgtaacttaaaaaggaaagaaagaaaagttaggtatgtataagcatcatcttagctgaaagccagtgcccatacggaaaatcagtaaaaacaaaaagagatacagagtcttctttttctcctgtgcctcttgtaatggaagagaaatcatctgtacttcaatttgatctttgttcttttgggggggaaggaaagccaagtgtttttaattttctctatatcaatatagacattaattaaagcatcacttggttgcatttgatgagatggcttcttaatttcatttatcagatcctggtaaacttctgaatcataaaaattatatttagcatacagcatccctatttttacaaatctcattctaattatttacaaaattagtaatccttgtattgtttctaatacaggttctttcacttgggtatttcagaaactagtaaaataaaatttcacaaaataagagcactaacaggcagcttcacctttttatgttttctgtcatcatagtcaccattgtttcttaaaagaaagaacactttaacacctaaaaatggaaaagacaattttagaataaaagacagctttattgtccttatttttatcattttaccttggactgcagattgtgctgccactggtctacagtccagaatttgagactggttgacttgtgatatgatgattcacatttaacaagaatggcatattgaatataataaaattgaactaggatgcttagaaaagaatacctagtaaatatagtgatcacaggaggccttagaggacattttcaggttaccaaaataatagttactcaaaaaaatgtttaaggaaaagctaaaattgtttcagaaataagcatagttaagaagttagctttaatattcttttaatatccccatattcttattgcataataagagctaacctttattgaatgtctgttacttgccaagcactgtgttaagcacttcttacatggattagctatttaattctaacaaccctatgaggtagataatattactaatgaaattaatttgatcgtatacattttttccatatgaaataatcaacattatcactgaattttaaatcttgggtaacagtataaatgctatgacagcatcttcataagactactcaaaatgaatgaggattaatatttcaagcaataaaatagtttgctaaccttgattctgtcacaccctggcactattatgtttcacctcttgcatctgttcaggctttcagccttgacaattatgattgaaattcattcagtaatcattcattaatgcataattaatatggacaagacagaattttaggtattgagggattttatgtctgcgtgtgtgtgtgtatacacacacatatatgtttaatatgatggggtttctgttttcaaggagtttactataatctagttggataaggcagcttttcttcatgctcatgaagaaaagctcaccgttctaaggtgaaattatgtgagataaaacatgaaacaagtctgcacatgactgcttaaggcccaaatccaggctgctacccgtttcatatagcccatgatctaagactggtttttgtattttacgaattgtaaaacaaaaaacaacaaagaagaatgtgtgatagagactctatggcccagaatatctaaaatatatccttgctggccacttagaaaaacagttgtctataaaataagtgcagttaggagactgtgtctataaagtgtgtttggtggactggtgtggtctaggaggaccttgtagagaagctagagttaatatgggactgtaattcaaattggcaggaaaaggagcaggatctgcaaagatggatgaggtgtgaattctacagtatatcatgcagattatctaaacactttggttggctgttgttggttatgtttctttgggaaagtttttctgtcgttgattgctcggttttttcttgattcttttgtctccccttgaatgtttaatacttgtactttccccttctataaaatgattacaattcatatcattgttccattcttcatggccttctatgatctgatcttaacctgtctttctaatctggtataccactactgcacacaataacatggaaaaggaaattgtatatgtatgttaaatactggtatttttaaaagaatagttttaataaaaggacaataagacattctttaaaggaagggttagcaaactatttccatagagggcccaatggtaaatatttttggctttgcagccaggtattcagctctgcagttgtatcaggagagctgccatagacatttgtgaatatgtgaatgaatgagtgtagctgtgctccagtgaaactttatttacagaaatcaggtagctgaacacatttggcccacaggccatggtccctgcaataggatatttctaggtacttagaagtactttggtttttttctttcttttttttaagaccgagtctcgatctgtcgcccaagctggagtgcagtggcatgatctcagctcactgcaatctccgcctcctgggttcaagcgattcttgtgcctcctgagtagctgggactacaggcgtgcaccaccacacaccggctaacttttgtatttttagtagagatggggcttcaccatgttggccaggctggtctcaaactcctggcttgatgagatccgcgtgccttggcctcccacagtgctgggattacgggtgtgagccaccgtgcccagcctaagtactttgaatgtcaatagtactggttctctttctaaatatactttttaaaaattatcaaaagagccaggagtggtggctccagctctttgggaggcagaggcaggattattgcttgagcccaggagtttgaaaccagcctgggcaacatagcaagacagcatctctattaaaaaaaaattatcaaaaaataaatgcacataaaaaaatcaacagtacaaaaggggttatagtgaaaagtagatcatccagccatgagctctactgtcttaccctctgtgaggcaactatggctacgagtttcttagataccttttcagagtttactctccatgtataagaacacacacaaatgatcttggtaataacaaacgctgttctgtatcttccttttttcatatgaatacacacatagacatactaccttgttaatacaaatagtagtgtattatacacagttttttatgttaattccttcatttctcagtatgtcttaaagacctatgcctttacctcaggctcagtttttttaatgaattaacagtatttcatttgatatacatgccataatttatttaaactagtaattaaggatatttttagtatttttcaattgctaaccttgtaacactgattgttctatccgcttcatttggggtcattttgtatttcatcatctttgaagaaggagtaaggaaatttttctggccttcctattccccattcctaaattaaaggcaaaaaaacctttgtcagtatcaaggctcaatttctctcacatcctgtttctgggtttctcattctcctgatttaataatcatgggacacttggggaggccgaggcaggtggatcatgaggtcaggagatcgagaccatcctggctaacaaggtgaaaccccgtctctactaaaaatacaaaaaattagccgggcgcggtggcgggcgcctgtagtcccagctactcgggaggctgaggcaggagaatggcgtgaacccgggaagcggagcttgcagtgagccgagattgcgccactgcagtccgcagtccggcctgggcgacagagcgagactccgtctcaaaaaaaaaaaaaaaaaaaaaaaaaataatcatgggagctgagtgggagaagggaataaagaggaattccccgtgatgaaagaggaggaaaggatactcgcattcattatgtgaatagtttgtcaccacccacccactcacttgtgatttattccatacagcaccaccgtggtccagatatatagcaggtgtatcatgtggaagaaagctgttgacttgaattctttctgttgctttcagttgcctagacctggagcagtgttctcttaaggtactggagcctgaaggaagccccagcctgtgtctgctgaagttaatgggtgaaaaaggttgcacagtcacagaattgagtgatttcctgcaggctatggaacacactgaagttcttcagcttctcagccccccaggtaggttttgttcttaggattattctccaggagttcatggagccaaacttagaagaaattatctcttttgaccaggtgaactgtgttaagtatttttggaaaatgtaaatgtgtagtgccttgtttgctttcccaggttgaagcaaatgcaatgcatgaatattggttggattgtggttgaagaaaccagctacatgagacatttttgagatagttggaaaaatttgaatgtaactacatatttgatatattaagtaattatcatatgataatgatactataggagaatgtcctttttttaaaaggagatgcattttaaagtatttagggagaagattcctatgacatacattggaatagtgcagccaaaaaaatgaacatatatttattcctatgtatttatatagatgaagtaaagcaagtatgacaaatgtttaagtttttttttgccgcagtgaggcttttgaatgttgattaactcaaccttgtactcttatgagtttttcctgaattaccgatattggatgaggctttgtacttcccacatcaggcgaggcttaggaaacagtccctcttctccattcagctgctctcctctcagctgcagatagagttggtctacagcagtggtggagggcaggagggacatgccattgaagttgcctggttgtggcagcactgcagacctccttctttacctggggatccagtgggccattatttgtcccacaggaagcaaagaggctggttgagcttggaaaggcaggttgagcttggaaagacaaaggacctgatgcactctattttacgtggttttgatgtataccatttcaatatataaccagcttggttatgatatatttttaagttaacatgaggaacttaaaaccataaatgagatgttattttttattgttagttgtgggatagggaattaggaacacatggtatagtggtatgctgtcagttacatgtaccagaaaccccaacccaaataggcataataaagagaatacatttctccttctaattgaaaagcttagagcaggtttggcttcaagagaatcaaggaacaatcctgttctcaacgcattggttggtttttgtctttgctcttcctttcttggcattggcttccttccatgactgactctccacatagcgcaagacgtctgctggctttttctgggctccttcattcttgccccagcaaaacccagagggttcatctagttaactagcttcggtcaaatgcctagctcttaacctgtcactgtgccaaggagatggaatgtgctgactcgcctggcttgaagccaggagtggagttgggttgagtctgctttcctggaaccacatggatcaccaaacaaaattgaaactattagaaggaaaaaggaagtagcagatactggggaggtaaccaaaaagtttactacaaatggaaagggccctggattataaataaggagacttggactcccaatcatcccctgctttacaaggccctctgtagatggtaaaataggcctctgataaatgccctatgaatttgatacacactgtattggatgcttgctttctatttcccagcgcctcttcctaccaacagggctggggtgggaataactagctgctaatgccaccctcccaaatgcaactgttgtttggcaccaaacagtaaactttcttttttaaacctggcccattactgatagaaacagtagagttcctaaagtggtatttattaatttttatattgctggtgcttgaagtagcacccaagagttgtgacatttgaaatctactagtctaggtttcatactgttaaagtccaagttctcatacctagtaaagtctcatacctagtaaagtctacttttgcttactttactaagttctcatactttattgaataccagggcctctgaaagcttaggaaacctttctgggaagtaaatataacatgtatttcattctctttttcaataattatgcttaattactctaaccgttatttgccaagtctataatatgaacataagtattctctacctcacagagttataggagctgcatgagataatgttgtgttgaatttcatctatacaatgacaggggcctcatatctcttttgatttgtgttgtgatcactggcctgagagctagggtttcggaatttttaagtttcccatatgtgaaaccgggcttgactgaaattgagtcatatatttacttaggtgtaacaatttgcctgaattttaaaaataacacaatattttatatttttatttttgacaggccagcaactaataaagtgccaccctaataaacattagtaatcttcctttgaaaaatccatttttgctctttgtgtttttctccaaataggattagcacttttctatcagtgttccccagtgaagattatcctgatgatatttggcttacagactttctcaagattatctcatagggcttttttgcatttgaggagagaataggaaaggaaagcagtttatttttttctttttgtttttaattttctcttcagtacatttgtgagctgtagggaaatattatttgttttattttgttttttaaattttttgtgataaagggtcttgctctgtctcccaggctggaatgcagtgatatgatctcggctcactgcaacttctgcctccggagcctcaagcaatcctcccgcctcagcctcctgagtagctgggactacaagcacgcaccaccatacccagctaatttttgtatttttggtagatacggggttttgccatgttgcccaggctggtcttgaactcctgggctctaagcagtccacctgccctggcctcccaaagtgctgggattacaggcgggagccaccgccctgtttctgtgttaccacttgtgcactgtttctgtgaagttttatgtcatgttagccgtataatatccttaggaattggttgttgcttgaatgttagttattgatttaacagcaaacattttgagatctaataaagctcagtaattttaggaagaagtaattaatttgttagcttactatctgcatctaatatgcataatctaagatttactcttttttttttttttttttttttttgagatggagttttgctcttcttgcccaggctggagtgcaatgtcatgattttggctcaccgcaacctctgcctcccaggttcaagcgattctcctgcctcagcctcccgagtatctgggattacaggcatgtgccaccacgcccagctaattttgtatttttagtagagatggggtttctccatgttgatcaggctggttttgaacttccgacctcaggtcatccacccacctcggcctcccaaagtgctgggattacaggcgtgagccactgcgcccagccaacttactctatttatagatagtagaataaagaaatataagaattacagagaagaattttaatattttaataaagatattgagaataaaaactattttaattatattaagaagataagctctgatagaatcaacttaattggtggtttgcctcgtgtattcaataaagtttactgtattgcaatgcccttgctgtgctaggcattatgctaggtactgtgagtttagagatgaataaaacaatcgtttccacctgctgataggtcatagtttagtaggggagacaaacatataaaagatcatatccaagacagttgtaaaaaatatatatatatagtaagtttatctgatctccagttttctctctttgctatattcttgagtcttagtgaaaatacaaaatagaaatattctaatgttttctctcttttttgcattggtactatttcataggaggacattacttcttattccacaggaagtctgatgattttcctctgtccttacagagagaagcctggtttgggttatgctgtgaactggcctttgaggtctaaatgcagggagatggggaaactttagatttattttgattaaacgagaaactatagtcttacgttgccatattctgttccaagtgacggtggaacaacagtcagaggtagctctgaaaggtaactgtaactgtcatgtggagtttctctgtcttttgagaaactgaccaagtttcttttctggatttgttttggtgcccagaaatagctagagcagtatccatgcatctctaactagagcagtttctgtgatgaggacccagcttcagcagtcactcagcatgtagtctgagtgtaaactcactctggaattataattttatatattttgtgaaggagcctcagaggatcgaggtttttactctctgttgctttctttcttgtcgagcatttccactgcacatgggttggccaacttgcccctcagtgtggtcttacttgaattatatgatagagaaatcgcttctagtttttatttgtggatggtgttcatcccattttccagcgctagtaaattgtttccctacttttattcctttgctcatctcagtgggaattgtagaagggggttaaatggatgtgttgaaagggttttgaaccaaaggtctgtaatgatttttttttttagatcttatttaagtttcaaagactgattccaaagcaaccaatattgacatctgtatagatagacttagatgtgtagttcaaggtgcttttgtttcttttgttgttgttgttgtttgtttgctttttgagtctcactctgtcacccaggctggagtgcagtggcgcgatcttggctcactgcaacctcatctcccaggttcaagcgattcttctgcctcagtctcctgagtagctgggattacaggcacgcgccaccacacccagctaatttttatatttttagtagcgacgaggtttcaccatgttggccaggctggtctgaaactcctgacctcaggtaatccgtccgcctcggcctcccaaagtactgggattgcaggcatgagccaccacacacagcctatttgtttcttttgttttaagtgaaaacattgtgagtgtagaattataggcttcatcagtcctagttacatacatcacgaaatggttgcctggagaagtgatgcccttaacctggaatgggcagagcagaggctgaacgatgggagctgtttagagagaactagcattgttgatgtggatctcattaagatgaatcccaagttgcttttcagctccagtgctgcaatattgccattttatttcactcttcatatgaaaggtgcctcactgagggtacctatgagatgtctgtggcagggtcatgtgccatcttttcagtggcaccttttccatttgcctctactccttttttatttcatacctttttttctcagatccgttgtaacatacgcattgttatgttttggctatttttattactttatctctaaaataagtgcaaaggttgtttaatgttattctttagtttctaaaatacctttacttcacattttatcttcacaattctgtgaagcgacagaacagtgctattgtgaacatttaaattttaaccaacaaacatttacatggaaaatgagatttccaaaagtgatcatttggccaaagtcacaattattgacaaaggtaggattaaaaaccaggtctgctgaccctgacctgaactcaataccatttccataatgctaggaaatttctgaattaagaaacttagttctgtattattacctcagttgcctctttgacccatggacttcaatttttttcttcttgccaacttaaaaagtgctcaaagactggatcttatttgtaagggacttttcttatttcatgaatatgaggaaattggcaattattcctaaaagaaaaatatcaagaagtgaaaagagaaaaagatggtatggatgtgcatgaggataaggaataagtagagggagagaaagggctggtgagcaaggcctgaaggaatgtctttctggatgtggagtgtggaggggagtctcaggcaatgtaacagaataagggatgtgatgtgggaaactagatttagctataatctatacagatttcaattgacatgtaagagaaacatatgtggacatactttgtgtaatgccgtaggagggacacacatggacctactttggttatatactgggggaaattgttagaggaagaggaatgatatttatttgggcacactgtagggcatgtgggtactcttctgtgatagcatagaagattgcagagtaactttgaggacaagttttagatggaagttgataaaaatctttttttgtttcatggcctctgaaagtagatggacttcagtgtatggaatagatctgtttttggaaaaagtatttattgataaactacatcaacatttaaatgcgtcgtgagagagaataacttcaagggaagctatgtgtccttttgtcaaaaattatcctaatttatctttcttataatttcagcagggttttaaatttttgttttattgcttaatagcatgtacttgtttatcggcatatgtgtgtgtagttgaaagcacgatccttggttccatcgtacctagtcacattctcccaggcttacaggaaatcaagtaacttctctgacttctttgtagatgttatctgaaaaatatgcttgtttaccaggaagctgtgtgttcaccgtttaaaatagaactttcatttgtatgccttcgtacagcctacgtagcactataccatattctttttttacctttgttcagcaccttctcactagtgggtgctgcattggggtggctaagggttgaccatgggtccctgtcgcacaaggctttgtgggaggaaggaaatttgtgtggttaaaacatgggaggtattgcaactcattttcttgactattcaccaggggtggtttccaaatcacattttgcctttcaattctcagtctttgaagcaataaattgtatatatatgttacacacacacacacacacacacacacacgcttattaataaagttgttggtgcaggacaggcttataaactgttaatttagatgtacattaaaagctactttgtcttggccaggcacagtggctcacacgtgtaatcccaacactttgggaggctaatgtaggaggatctcttgaggccagcagttccaggcaacatatgaggccaacctgggcaacataatgaggccctgtttctacaaaaaaaaaaaaaaaaaaaaaaaaaaatactaattttaaaaatcacttagtcttgtgtcccatacaaaggaaggataacttttagaacctggccatatgatccctttccagtagtcacctgcttctttgtaagatactctagaggaaaaaccctttccatccttcttgtctcttatctccttgtataatggcagagaatatttgccatggtatattcatgagccgtgtcctggtgtgggattgctctttgtgtgatacactttctcagtaaggtaggctcactgtggcagaaagcgggattaccgtgggagatatattgagaatcaccaagaggccggtcatggtggctcactcctataatcccagtgctttgggaagctgaggtgaggtggattgcttgagcccaggagctcaagaccagcctgggcaacatggcaaaaccctgcctctacaaaaaatgcaaaaattagccgggtatggtgatgcacacccgtagacccagctattgggggtgctgaggtgggaggatggcttcagcccaggaggttgacactgcagtgagccctgatcatgccactgcactccagcctgggtgacagagtgagaccctgtctcaaaaaaacaaaaagacagaatcactgagaaagcaaaacataaggtttaaaacctttaaaaggcaagaaaacctaggtttgcatcctggttctgccattttacaatgtaaaaaaaaaaaaaaagtctcagagagtttaatttaccccaggtaatttgggtgaccttctgcaaattacgtacctttttttcattgtaacatagatgtaattagtatctaccttgtgtggttatttcaaaggttagtgataaaaatgcctggtgcatgtaaagcagtcagtaacttgctgctgtagtaatttctgttattattatatatattcaacaaacacgtgttgaacacccactaacacccactgcagtgccatatgtgggcacaattctaggtgctgaatgaactggtgactaagaccatcaaggtccttggccttgccctcatggagcttctattttaatacctaagacggacagtaagaaacagggattttagagagtgaaggacactgaactgggtgaatgtaatagataactggggggtgggagggtacctaatttagagacatttcccagagaagctggtgatattttagtaagaaacctggatgatgaggaaagagcctgccatgaaacagtagaatagtggaagccagtggggtggcggttgcgggggatggcaaagcggagcttgtggggagaacccagcagaggactggtaagtggaaaggcagaaaagagcttggcttatagaaggaaggaggcccagtatggctggagcttggtgagcctggagaagagcggaggggccaaaggagcagttcgtggaggactttgtagccatggtaaggaatctggattttttattctaagtacaggcacactttgttttattatgcttcactttattgcactttgcagatacttcactttctgcaagttgaaagcttgcggcacccatgtgtctagcaagtctgtcagtgccatttttccaatagcatgtgcctacttcatatctctgtgtcacaccttggtaactcttacaatatttcgaactttttcattatatctgtcgtggtgatctgtgatcggtgatctttggtgttactactgtgattgttggtgcctggtaagatggtggcatccaggtggcggtcttaagaccagatcagtatggtgttggtggtcttaagaccagatcagtatggtgttggcagatcagtatggtgccgctaggcaggcactgactagctccaggcagctcaaccttgggagcttcggggccccgagaggtggagcctgtgagtggggcatgcactccatgtggaagccagagcctcctcccctggatggagtgtacgagatccctggaccggagcccatcccctctgtgagagagatgtacttcacgcccgggctgccaccgctgatcttcctgccctgggaccctgggtagaaacacccaaaattctgttcaccccgttcacgaccctgggaccctggctcgaagcacccaaagttctgctgctcaagctccattcacgagcagccaccatacaaagaccaggcctgctatgtctttcaccagcgttgccgccttctcaggggtgtcaagcaggccctctggcttaccgaggccaagttaataaaatgccttcctgagaaagtacttggccttgttgatgatacaaggaaccacatagagaaccaagatgagcgtcttctgaatttgatctctcatgcctgtctctggcactgtactgagtacggccccaggagagaggcctgctgtctggtcattgtggacagtctgataaagttgtgtaagtctcagattctcaggcatccttctctggccaggcagatttgtgcccaaaactccacgttatccaccacctggaattgtgtctgttcttcagggtcatggttctagtggagccggctgagtgccaaggatcctctgcccccgccatctcctccagagaagaggttgaagctactaaaaatcatgttctcgaggccttctgtcccctctccccactactgatcttcaggaatgcaatgtttctgatgtgaaagatgacacaggattctgggagggctatccttacccctatctccatatcctgcacttcctggagaaagccgatttgcaaccacatagccttcaaccagatcagctgtgggccaagatgatcctgtttgcttttggcattgccctggctcaggcccagctcctctgtggcaatgacaccaagatctcggagcagcccgtggttgtgcagagtacatgcacagacggacgtgcattccatttcctggtgttacagtagaacaccacagacctggcctcttaacaagtgtggcaagagtttggtctgggtggaatcatgccagctactctctcagcatttttggtgtctcccagtgataaaaaagaaggtgggaccgggcccagtggctcgcacctgtaatcccaacactgggagtctgaggtgggtggatcacgaggtcaggagatcgagaccatcctggctaacgtggtgaaaccccgtctttactaaaaatacaaaaaattagctgggcgtagtggcgggcgcctgtagtcccagctactctactcaggaggctgaggcaggagaatggcatgaacccgggaggcggagcttgccgtgagccgagattgcgccactgcactccagcctgggtgacagagcgagactccgtctcaaaaaaaaaaaacaacaaaaaattagccaggcatggtggcacgtgcctgtaatcccagctactcaggagatggaggcaggagaattgcttgaacctgggagatagaggttgcagtgagccaagatcgcgccactgcactccagtctgggcgacggagcgagactccgtctcaaaaaaaaaaaaaaaaaaaaaaaaagagggtggttgtggaatgcgttgggctgactggtttccagtgggagacatccaggaagtttttagctctgtatttacatggtgctacgtgagccaaggaccattctgaggcccgaaacccacctttgccttctcccactgaagagggcctggggtccccctggagcctcagtgctcatctagcctggtggtctcactgacaataaagagcccttgcattgcaaaggaaaaaaaaactattataattgttttggggtgccacaaattatgccactataagaagttgagcttaattgataaatgtcatgtgtattccaactgctccaccgactggccattcctctctctctctctctctctctctctctcactctctccctccctccctccctccctccctgtccctcttcctctcccacctccccactccctctttgggcctccctattccctgagacacaacaatattgaaattaagctgattaataaccctacaatcgtctctaagtgttcaagtgaaagaacagtgacacacaacaatattgaaattaggctgattaataaccctacagtgatctctaagtgttcaggtgaaaggaagagtcacatgtctctcactttaaatcaaaagctagaattgattttacttaatgaggaaggcatatcaaaagctgagataggctgaaaagctaggcctcttgtgccagttaaccaagttgcgaatgcagaagaaaagttcttgaaggtaattaaaaatgctacttcagtgaacacacgaatgataagaaagcaaaacagccttattgctgagatggagaaagttatagtagtctggatagatcaaaccagccacagcatgcccctaagccaaagcctaatccagagtgaggccctaactcgcctcatttctgtgaagacagagaggtgaggaagctgcggaagaaaagttggttcatgaggtttaaggaaataagctgtctctgtaacataaaagtgcaaagtgaagcagcaagtactagtggagaagctgcagcaagtcatccagaagatctagctaatgccaggcatggtggctcgtaattgatcatggtgtctataatcccaccactctgggaggccagggcaggaggattgcttgagcttaggagtttgataccagcctgggcaacatggtgaaaccccgtctttgcaaaaaatacaaaaaattagccaggcacagtggcacctgcctgtagtcccagccactcgggaggctgaggtgggagaattgcttacacctggaaggcggaggttgcagtgagcgagatcatgacactgcactccagcctaggtaacagagacagaccttgtctcaaaacaaaaaagcaataaaagatctagctaagataattaaagaaaatggctataataaacagatttttcagtgtagatgaaacagccttctattggaagaagatgtcatctagaactttgatagctagagagaagtcagtgcctggctgactcttgttaggggccaatgcagctgacaactttacgttgaagccagtgcccatttaccattctgaaaatcctagggcccttaagaatgatgctaagaaactgcaaagtttttgtcctgagtaaccagatggatggtggtaggcagtaagactggtttaccatctttgagatggggaaactgtggggactggcagaggagtagattttgtgtcagaagggatttgggacatataaaattggtggtggctataggacattcaaatttaaagccaggatagccaaaactcctatattttttagatttattacttgttctcttttgtcattgttgcaactttttcctgtcacatcgaaacttgggaaatcagaatctttgtattttaaagttgtgatgtaaaactctcctggcagatgaatggtaaatgtggggacattaaaatacagtgttatgaatttgctggcttcagcaagagtgcttatcccattttccacctttcctaccaacatgtatcacagatttcagaaaaattctgaacttcatccgtcctgtactaacttggcctcgacataaaggattaatgaatatgaatgtcctcccttggcaagagtttaaaattctgagaggctctactatatttactaaagattttctagggcttctcgaggccctcaaatgtgctaggtatacaataaatatttactcatttttaattttgcttttatttagtatctttgtgctgtgactttcatgaacattattttttttcctagaaagtttagtacctttgatgtattaagattactgttatttacactgtttcctttttacttgtaatcttgttttgtttctttgcattggtgggtggtagaagaaaaagacactgttatgaggtcacattcagtatagacaaggaaagaaaataaaagtaggtgcaggaaattaagttttataagttttaattatctttttctttacttcctaaaagccagctaacccagttttattaattacaacttttgcaaatgtaagcttttctagctttggtttcttttatgtcagttatctattgctgcattaataaattacccccaagtcagaagtgaaaaacaacaactgtttattatctcacacagtttctgaggctagtagtccagaagtggcttagctgggtagtcctggctgagggtctctcgtgaggcagcagtcagactgtcagccaggtctgcagtcatctgaaggtttccccagggttggaggatcttctcagatggctctctcacaggtgttgtcaagagacctcatttcctcactggctgtggcgggagatctgtttctttctgtagagatatggtttggctgtattcccacccaaatcttatcttgaattcccatgtgttgtgggagggacctggtgggaggtaattgaatcatgggggcaggtctttctctgctgttcttgtgatagtgaataagtcttatgagatctgatggttttataaaggggaggttccctgcccgcaccttcttctcgtttgtctgccgccatgtgagacatgcctttcaccttccaccatgattgtgagtcctccctagccacgtagaactgtaagtctattaaacctctttcttttgtaaattgcccagtcgtgggtatgcctttatcaggagtgtgaaacagactaatactcttaccacttgagcctctctgcagggctacctgaatggcctcctgccacagtcatgtgcttccctggggcgagtgagtgagagagaggcaagagaaggagttgggggtgttccattattgactaggattttcttccaaattcctgtcaaaagtcttccaagcttagatgttggcagttattcctcaaatgaggaatgtttgtgtcacaggtatatcaaatatatatctcactgctctgtttctgtgtctttctcttccaaaatcattttcatttcaatactaaataataatgcagtcatttgaagacgttttcaatggtgttgtctttgtccattgcatgcttccataatacagtaccacagactgggtaatttttaaagaacagacatttatttctcacagttttggagcctgggaagtccgtgatcaaagaaccagcttctgatgaaggttttcttgctgtgtcctcacatggcaaaagagagagaacctacctgcaaaccccgttattacagcggcattaattcattcgtgagggtagagcctcccgctaggccctacctcccaacattgttacattggggattcagtttccagcacatgaatttgggggcacatattcagacaatagcagacattgcaacttaacacgtctgttactaacagtgcacgtaacttgactgaagtggcagccatatgagcatttatgaccaaacatttccatgagctaacactgagaactaccctgtggctgtgcctgacaggcatctgttataaggtgcatcctgatttcagaagtgttagaatatgggggaaaaaagcttctagaaattgaagaaatatggtaaataattttctcccccacccaatcatggggaagtacaatagatcaaagtcttctgcaagtaagtttctttcctctgattttacaaaagctgcaactcacaaagtgtaaattgattgagaaggagatgtgaatgagtgatttatgacaaagataaatatgcaagttatttctaaaatgtttcaatttttggtttcagatgtataaacaaggaaaatccctcttgtgactttaattttttttttttttttttttttttttaggaataaagattactgtaaacccagagtcaaaggcagtcttggctggacagtttgtgaaactgtgttgccgggcaactggacatccttttgttcaatatcagtggttcaaaatgaataaagaggtaattttttaaatatatcttttaattcttccaaggagagagaatgatagagaattaattaacattatcgtcctaaatgtagttttaacagtttggtaaaagagtctgatagacattgctaggttattactgaagtagtcaatagtcattattttggtaagacagttccagaattgtctcatgaaaacattgtaaacaataatgaaattagttctccactctaaaaattgtggaaaatagggattacttagggcagcagtgttagcgagtataaaacatcaccagtacattcttgtgtatacaaactcttcacaacagattatgttccaaccaaaatctttaaaagattttcaaggctatatggaaagttaatgtgctattctttttaagaattccacatcactgttttatctgtatcagaagatttaggaccttgtggtagattctgaagtaaaattcagatgggcagaatgggccatttattccttttgtgaaatgattggatccctgcagcacccaacaaataatttaaattcacattttagaattctcttttcttcagagttccttgagccatcttgcactggggatttctcagtgggctggctgcctgcattgtgtcccacttctgtgggcttttatcttcgatccccccatccctctctatcctcctcccacttccacagtaccttgaaagtccatattcttttcactctgttagtcccagtaattcagctttcttccaaacttgatgtcacgtctccctttgcaaatctgaaactaaataaaagctgttctgagaatgacttttcctttaattggattgcctcatactgtaggtgaattctgtggttttatacgattttgtttccgtctgttacacagaggtaagacagagcaactgtggaatgtagtaaaaagattgcatgtagctttggcactagataggtctgtgttggaactctgactgccattattagccatgtgaattcctatcatcagaggttgtgagaattaagtagacaggatgttttacgtgcctaggctcttgaaagattgcacctaaaggtatttttttatcatattttctcaattgcaaagttactttcattttattaaatgccctttgaggagaaatagtggaaaaaccctactacattaagtatatcatttgtaagctatgtcctgattggaaaaaggtagaaatgtaggggatggaaaatgcatcttagagttgaagagttgtaatggattttaaaactcttaagttttgtaaaaccacatgatcataggagtattgtaggagatgtttacttaacaagtgcttgttgagcacctgttttgtgccgggccatgttctaggtgtgatgatacagcactgaccagaaggtctctgccctcaaagagcttacacgccagtggggacagagcaagtactgttaattcctgtgagttaagagctatgaggaaaatcaacagggtggcaacataatatgagaagctactaaggttttaagcaagggaagtaacatggtaggattcgtggggttttttgttgttgttgttgttgttttgttttgtttttttgttttttttttgagatggagtctcgctctgtcgccaggctggagtgcagtggcgcgatcttggctcactgcaacctccacctccccggttcaaacgattaccctgcctcagccttctgagtagctgggattacaggcgcgcatcaccacgcccagctcattttttgtgttttaggagagacggggtttcaccatgttggccagggtggtttcaatctcctgatctcgtgatccgcctgcctcagcctcccaaagtgctgggattacaggcgtgagctgtcgcacccgactaggattcatgtttttaaaacataaacttgcggcttgaaggaagcagagaacagcaaggtgagcagttgtcttaatacctgtgcttgactggaagtagcagtagcgtggagaagagaaggtggatcacagtgcataattcagtgtatattttagagagagtcaactaagctgacagattagatgtagagcatggggagaaggaagagaaatcaaggatgaccccttaggctttccacctgagcatctgagatgtgttatatactgaggtgttgaagattggaaaattaattgacagaagacagattaacggagaaaaagcttatttgtgtgcatgcaagagctttcagaaggagtagcttgctaactggttaagttatgtagctaatttagtagggaaaggcaggggccctgtgagcataatggatgggtttcttcaggaaagacaaaggggagaagaacaagggaagatagcaaagtttgtggtaatgttgttcatgcaggcaccagtggtatctcctcttcattgtgaccgtaaagtccccaaagagagatttatggtacttttactcttggtctgttgcctgggggtaaaagctgccccacgagggaatttatggcagcctcatttcccagaactttctgttttgggtcagataaaggaagactgagaagacttctttctgtatctgttgagtcccagatgtcttcagtttaatataatcttcataccaactcaggggttctgagtgggtctccacagatcttcagcccaagtagcctttgttaagaggatacatcttccattttaacaggagggaacagagcagttataaataagtacagacatggataggtttgtgatttgttggcagaaaaaggaggtaatttctgtctgaagtcagtgcctaagagaactaggattacaggaagtttgaggaaagagtatacatcaatagtctagaaggaaaacacacttaggacgatatagtaggattgtcaggcagttgtaagtgcagcctgtcatcccagttgtcacatcctgagcaaaatactcttgctttggtgtaggtactgaaaggggagagagtagagttcagtaacttggggtttggagagggaggaggtgagcttgttaaagtacaggttgaatatcccttgtctgaaatgcttgagaccagaagtatttcagattttggattttttttaggtgctgaaatatttgcattgtatacttaaaagttcagcatcccaaatctgaaatgttccagtgagcatgatggaggtgctcaaagagttttgaatttgggagtatttcagattttaaatcatcagattaacctgttctttgcaagggagttattgtaatgaggcacttgagtaagccccttggcaatgtgccaaagttgggtgtagctgatcaattgctgggagcagaaaaagcattaataaaagaaaccttactattggaggtggggactgtggatggccatcccgtcttactgtctcattgatatgctttccatagctcttctctgtctagaccttgaaggagattggatattgtttggttaaggagtttatcctcttacagaattttgcagatcagaaggtccggggtctcaaggtgaaataacttgcccacgtcttcccagctaatgtggtcagagctgaaagcaatagccaagcccaattctctgtgttttctctatgccgctgtggtgtttgtatgttgtatggctgctaaactcataaatgttgcagttgtagattctttcaatactcagtgattgatctcttaaatgccagagcaaatagttttctgttagtgagcctttggaagatgtttgggggccagcttaactctctggtttatggatttgtaaaagactggatttttaatacttcagtcctaaataactcaaagcgttactgtttttaactcagaaatgttttagaacttgggggaaaaatgttgcactttcaaagcttcatactgaaatcatagattttgtacagcatattttataaggtgtgtttttgatgagtcatccacttctcttattgattctttcacagattccaaatggaaatacatcagagcttatttttaatgcagtgcatgtaaaagatgcaggcttttatgtctgtcgagttaataacaatttcacctttgaattcagccagtggtcacagctggatgtttgcgacatcccagagagcttccagagtaagtaacgaaagaagctgaatgttgggatggggattccccatattttattttattttaaatgtttacttttaaacaatttcaaagtatcaaaaaacatagcaaaatttcacataggtacttcatccattataatgtcaaccattgttaagatttgatccatgtgttttgtctttcttttttttttaatttagtttttggttttgttgttttttaagacaaagtctttttgttgcccaggctggagtgcagtggtgccatctgatctcagctcactgcaacttccgcctcccaggttcaagtgattcctcttgccttatcctcctgagtagctgggattacaggcacatgctatcacacctgggtaatttttgtatttttagtagaagtggggtttcaccatgttggccaggctggtcttgaactcccgacctcaggtgacccacccgcctcagcctcctgaagtgctgggattacaggtgtgagccagcatgcccggcctgctttaattgtccttctgtgtgtgtgcgcgcacgttcacacatgcacacacacatatatgtgtgtgtgcagatactttaggatgacatagacaggcctcagtctggtcgctgccactgacctcttcaagtttgccttccttcatgttccattactctgccctcacacacggcacctatattcaacttcgtttctccctgctgcttccatggtctcgaaatgtcttgcatattcacactccacatctttgcgtcacttcttccttccatcttgaataccttttctgtctgtcatacttttatgactctttcaagcctcagctccctctgctgccttggcattctgattttacctctattatagaactcgttgcattgattttgaaattatttgtttgctagctgtctgagcagtgtagggataaggagttcccttttctctttctagttcttagaacaaagcctggcaggtagtagtcgcttaccagttatgcaattcattgaccaccctcatgaggcacagccttgggcttcgatgttacagctattttaaactaagcatgagagagagcccctgaccccaaactacttacacaactatcaggaaagattatctgctacaacagaaagcaggaagactttcttgctaccacctctttctcccaaaagttaatcttttgaacgtatttctatattttggttgtttgtgttgtcaggcttgtctccctatctaactgaactcctgaagggaaagtctcggtcttaataatctttcgtaaaaacaaacactcaataaccaatagcactcagtagatgtttgttgacagaatgaagaaccagggtgaattctgtttaacaaagtagagacggaaatatttccatcaaaaacatttaatattcttacatttaaagcacaaattcaaagctacctaaaaatctctgaaggattcttgatatctagaacacttccttatttaagaaacagattgtggatctggcatggtagctcacacctgtaatcccagtactttgggaagctggggtgctggggcgggtgaatcacttgaggccaggggttcaagaccatgctgggcaacatggcaaaaccctatctctacaaaaaaaatgcaaaaaaaaaaaaaaaaaatggggcctgatggtgcacacctgtagtcgcagcaactcaggaggctgaggtgtgaggatcactcaagcccgggaggcggaggttgcagtgagctgggatcacaccagtgcactccagcctaggtgacatagcaagaccctatctcaaaaaataagaaaaagaaacattgtgaaactaacatcatggaaaaatgctatttcctgaagttactcttactcatgaatactaaatatgatcattataaaaagtagatcagtagataagcacatagcatttgagacctgatagtcttgagttctataattaggatatgaatcaagaagaggtcagtttgttatgaatttgaatgttgtggtcttcagttttgtaggagaaaaaactctcatatagtagtcttgctgctcacttttcaattcttttccataatgcgtatttttctcccaaactattgtattgctcctaaaaaatgatcttgtggaaaaaaactctagcgttgatgtcagcactaaaggccatgtagtgagtgtatcattcactgcaaggaaacattcatcagactgctttgctactcactctgctccatctttttagtgcaataactagcattgatcaagacaaaaaaccagtctcctctaaagagtagttgtcagatattattttgtttatttggtgcacagtcaagaaccatgttctttgttgtatttgctggacaaaaagaaggatagggaggaaaacactttttgttaaaagagttaaaatgctgctgtctcattcttttctctcactttagtcttccgtaaactcaaatgacgttaaggttgttgagaaataaaatatcggtcaggcgcaatggctcacaccagtactcccagcactttgggaggccgaggcaggcagatcacgaggtcgggagtttgagaccagcctgaccaacatggtgaaaccctgtctctactaaaaatacaaaaattagctgggtgtggtggcccgtgactgtaatcccagctactcaggaggctgaggcagtagaatcgcttgaacccagggggcggaggttgcagtgagccaagattgcaccatggcactccagcctgggtgacagagtgagactccatctcaaaaaaaaagaaaatatcaccattttctttaaataaaaaatacctcatgcacctctgcattagcccattctcacactgctatagaggtactatctgagactgggtaatttataaacagaagagttttaattgactcacagttctgcatggctggggaggcctcaggaaacttacaatcatggtggaaggtgaaaggaaagcaaggcatgtcttacatggtggcaggagggagagagagcaaacaggggaaatgccagacatgtaaataaccagatctgtgagaactcactgtcacgagaacagcatgggggaaactgcccccatgatccaatcgcttcccaccaggtccctccctcaacatgtggggattacagttcgagatgaaatttgggtggggacacagccaactcatatcaacctttctcaattttatttaacttttttatcccattttttattaaggggtaatttatatacagtacaatgtacagatacgtgtacagtccagtgagttttaacatatatataacatgggtatatgtacccatttaacatatatatagtcattgaccagtctagatattttatattcagcttcttccactcagcataatgtttttaaaatttactcatgttgttcagtgtatcattaggcagtcccatctttttgctgagtaacattccattgtatggattgactagtttgtttattcattctcctgttgatagacatttagtttgtgtccagttttggaatattatgaataaagctacgatgaatattctcatacaagaccttttctggacatatgttttatttcttctggatagttacatagaagtggaattgctgaatcctagagtagatatatgtttaatttttcttaactgccaaagtttccaaaatagtttaccattttgcattaccaccaacagcgtataagatttcaggttactcgccccatatcttggccaacattggttgttagctcttattgatgaattaagcttttggtcattatgaaatgctcctttatctctggtaatcctctttgtcttgaagtttactttgtgtgatactaatatagccatggaagctttcttttttgttttgttttgagaaggggtctcactctgtcaccgaggttggagtgcagtggcacgatcatggctcactgcaacctctgcctcccaggctcaaatcatcctcctacctcagcctcctgagtaactgggaccacacacatgcaccactgcacctggctaattttttgtatttttggtagagatgggatttcatcatgttgcccaggctggtctcaagcgatccgcccacctcggcctcccaaagtgctgggattactggcatgagccaccgcgcctggccagaaccatggcatttctttcataagcttttttgtatagtatatgtttttcattcttttagtttggaatgtctttgtttaaagtttcattttagatgacagaatacaggtaagtgttgctttttgctctagtctagaaaaaagtctctttcaaggtgtttagtccatttacatataatgtgattatgtttaagtctgacatcttgatgttcgttttcagttagtctcatctgttctcttttgatcctcctttcctgacctcttttggactgggattacaggtgtgagccaccgcgcccggccaaaaaagcattttttaatattccattttatctcctttattgactttagctgtgtcttagtgttattttttagtggctgttttagagattacagtatgcctctaacttattgtagtaaaccttctacatattctaccttaaaatataagaaccttatatagtatactttcattgtgccccccattgtatatttgttgtcatatattttacttcgacatttacttttgagcaatcttgtaaaagtacgtgtgtgtgtgtgtgtgtgtgtgtgtgtgtgtgtatttatttttattattatactttaagttttagggtacatgtgcacattgcgcaggttagttacatatgtatacatgtgccatgctggtgcactgcacccactatctcgtcatctagcattaggtatatctcccaatgctatccctcccccctccccccaccccacaacagtccccagagtgtgatattccccttcctgtgtccatgtgatctcattgttcaattcccacctatgagtgagaatatgcggtgtttggttttttgttcttgcgatagtttactgagaatgatgatttccaatttcatccatgtccctacaaaggacatgaactcatcattttttatggctgcatagtattccatggtgtatatgtgccacattttcttaatccagtctatcattgttggacatttgggttggttccaagtctttgttatcatgaataatgccgcagtaaacatacgtgtgcatgtgtcttcatagcagcatgatttatagtcctttgggtatatacccagtaatgggatggctgggtcaaatggtatttccagttctagatcactgaggaatcgccacactgacttccacaatggttgaactagtttacagtcccaccaacagtgtaaaagtgttcctatttctccacatcctctccagcacctgttgtttcctgactttttgagatggagtctctctctgtcgcccaggctggagtgcagtggcacgatctcggctcactgcaagctctgcctcctgagttcacgccattctcctgcctcaggctcccgagtaggtgggactacaggcgcccgccaccacgcctggctaattttttgtattttttagtagagacggggtgagtcactcttatcacccacgctggagtgcagtggcgtgatctcggctcactgaaacctctgccgcccagattcaactgattctcctgcctcagcctcctgagtagctgggataacaggctcttaccactgtgcccgggtaatttttgtatttttagtagagatggcttttcaccatcttggccaggctggtcttgaactcctgacctaatgatccacctgcctcggcctcccaaacttctgggattacaggcgtgagccaccgcgcccagcccacgtgtgtataatttttaaagattttgtttaaaatattcactgacatagttacctgttgtggcactcttgagtctttccttctgacccaggttgctatcaagtaaaatttcccttctggctgaagaattcctcttaatacttcttatggttacagtctgctgtttttctgtaataatttgtaaaaattatttgtgtaataatttgtagacaaattatctcagcatttgaattctgttaatctgttgtcttcatttttgaaggatattttcgtcgtgtatagaattttagaggtgtgttggtttgttttcaccactttaaagatgccattccattgtcttttggcctccattgtttatcatggaaatttatttattccttttataattgctcccttgaatttttcctgcttggaattctctgattcttggacctgtaagttatctttcatcgattttgaatcatttttagccataatctccaaatatttttcttctactttctttctgggactcttaattatatgtatgttagactatttgatattgtcccacagatcttgtaagctctttttttttctttccttcactttatctcttttgtttccagttagatttcttctaacctgttttcaagattactgattttttggtgtgaccagtttgctggtaagcccatcgaatgcactgatgagtggaaatcttgatattttaaatttctgttatttccatttggctcttttttttttcttcaatttctcactgctgaaattgtaagttggccaccatcttctgtgcaagttgattaactgcctttttctccagatcctttaagatgtttatcttcgaattaatgtgagtctctatctgataattccagaatgtaggtcagctctgcttttctttttctttttttttttttaacaagtaaacatggtttattttagaaatgtgaggctatttcaacattagaaaatttttttttaattatactctaagttttgggatacgtgtacagaacgtgcaggtttgttacataggtatacacatgccatggtggtttgctgcacccgttaacctgtcatctacattaggtatttctcctaatgctgtccctaccctaactccccagcccctgacagggttacattttctttcttcttcgtaagtctcataattatttattcaatgctgaacattgagtataaaagaaaaatagcattaacatatgagattaacatattacacattaacatatagagattgaaattaatatttttatgctcaggaactagacacacccctcgtaatggctactagaataggggtatgagtccatccagtttgtagttgttaggtctgtgctttagatgtattcagtttactactgacggaattgagggtagaatgaggatttccctttggcaggactgaaattgacatatcgagaagactagaaatctctgttttacagctctagtgccaaactgcaagagatctctctccactttacatccagagtctcagcttattggaccactgaagcatttttgttcaccaaccccacccttgtctcttctatgtctcagggggtctgagacccccctgcctagctgccttgcccccagccagccttggaaagcaaaggcactgcattcactgagggcctcgtgggcctccaagggtttccctcaggcctctgttgtgccgtcagccttcaacaggccctgtggacctgcacttcacaggtgatcttttagctctcctctcctccttcgccttctgcaagagcacttgagaagggccgaagacagggagttggtgagtgaggcagaatcttttgcagctggggttccttgaggatctaattggtcatgcccactaggggtgaccagccatctggttttcccaggactttcctagtcttagcacttttaagtgctgcattctgggaaacctttctgtcctaggcaaactgagaccactggttaccctaatgccagctcacagtctgcctttaaaattttgtaaaacattcagctggcttacccttccttgtcaactcagttctaaaggcattaggtggcaccaaacatggtagacatttgtgtggggtgggaggcagtgggaagggactgggatgacccagagcaggatatcaaagccccggtaaggtgtccatgtgggagtggagcagtctccagaaataatcctgatgaattaagagagcaatgcatatctttctagactatttttgtgcatgtaataatatatctataagtggaatcatattcattcaatgaatattactgatcacctgtaatgtgttagacactgagtttcataatggagacttgttgcataaaattgacaagctctttgccttcaggaaacttaaagagtattaaatgagtgttaagtaaatgatgtctaatatctgcctggggtagaaatgttagtgataactcaccaatatttattcagtgcgggttacaaaacttatttcagtatgtcaaagaacggaacttagagctttccatgttaaatgccaatatcgttcaagatgttaataagttgtttgcctcgatcaaaaagattctgcagccaaacacatttagaagacacttgaactatattcctctccttaattgacaattcatactaacacttttaaagctttgagaagtcctgcaatcgagaaatgtgtttaacccagaattttctaagtttatttgtccacagcattcttttggccacagaatatctcgtaatatttctatgagtgctatagtttttttaaacagtttgggaaatgttattaaaaattgtaacaaatgaagggggaacttgacacatctctttaattatagggaaattttatttttatttttaacctagagattttattttttcttttaatttaaggaagtgttgatggcgtctctgaatccaagttgcaaatctgtgttgaaccaacttcccaaaagctgatgccaggcagcacattggttttacagtgtgttgctgttggaagccctattcctcactaccagtggttcaaaaatgaattaccattaacacatgagaccaaaaagctatacatggtaggaagttgattttggggtcttttgggggagttaacatgtaaaacaaatggtacaattgaaatataaggtgaacattaaaactcatatcctttcagatgttttaatgttttcagtatttttatttaaagtcccttatgatttcatattaactagctcttatatttgctaaagtgctagaattcaactcaggcttatatgtaaaatgtcaaatagtattgcatgaaactcagcactgttggaatcattacaacatttacttgctggtatttaacctgatgaatggagctaatgtaacaaatgtctaaagccttctaagatgttatgttttggagcgtatttttaaaacacaaaatgattttttctccaagccattaaaatagaagaggaagcatttacatgttctaatattgatataggtgccttatgtggatttggaacaccaaggaacctactggtgtcatgtatataatgatcgagacagtcaagatagcaagaaggtagaaatcatcataggtaagaagtatttccccagtgttctgacaagtggactataatataagctatataaactgcaacgtttaattaagcaaaggaaattatactttttaccccatactatttaatgatgtgttaagcattagaagttatattgtttatattgaaatttgaaagaatgcatactaaaatcataatctaggttcacagaaagcaaaaagaatcaggaaaaaaagccattttgtttaaattattttagttacagtttattttcaacacttatgataaaatatgtattctttaaagctttagctacaaaaaacttgattcagtgggaaaagatttttggccaggtgcagtggctcacacctgtaatcccatcacttttggaggccaaaggttggtggttcagttgagcccaggagtttgagaccagcccgggcaacatagtgagattccatctctaatacaaataaataaataaattagctaggcatggtggcatgcacttggtcccagctacttgggaggctaaggtgggaggattgcttcaggctgggaggttgaattaaaaataataataataaaagaaaaagatttttaataaaacatttttaaaaacaaacattatacacatataaaggaaagaaaggttattaacaatcccattcttaactgcgtaatttgggaatttgttatatttcagcttaatatatttatagttatattgttcatagttggaggtattgatgcatgtgttggtttgccaacattatctctatgatattgatctctatttgcttgacggctgcccttcttaagatcatgaattacaatatattcaaatttgttttttctgaaacaaggaagaacagatgaggcagtggagtgcactgaaggtagtgtaagtctttggtttgaaaccaaatctcctgcatgctagttactcttgggattggtggagtgcttttagcctactgagtgcagtgatggaaaaaatactagctgtaagaaatgattttgattgaagaatattgtattttaatctttgaagttttataaatggacagacatgattaaattgacacagtattacaataactaatcttcagttgactttcttttaatattacatataagaacaaagttcctgcattgtatcttttgagtagtgaacatttgcaattaattcttaatgttaatttttatctacataaaatttgtaagaaagataggtggctacgtgatcatggatatttgttttagattattttgtctgtcctttagccatgattagatgctctcaaatgaaatttagtttttataaaagtttcaggagaggagatttattgtttaacatatgttctatgaaatattaaatattctgtattaatataaaattgatcaggattttttgaagctacaggactctagataatctaccatgtcacctttaccataatatgtaaagggaactgaaaatctatttcaacataaacttctaatttgttttaattagccaaagcattgtacttaaattgtaatgagtaaatattaaaatttggatcatctttccttagtgtgatgtcacattgttttgcaaaattagatttgtggatggcaaagtatttttttcaatttctgcctctattacataagcttaggctctacttgggtaaagtaaggaaataatgttaaattttatattttctgattttcctgtccttcatgtctctatagtatcactctgaaatactataattactgttttcatcctaatatgtagttgcaaacaagaattctctcttgtaagagagttctaatcccatgatctgttaaccctgtttgagggaagccatgtgaagaaatcctaatcgaactcctcttcctctcctaatcctttttgcctaattgcatggtttttaagtcttcctaatgttggaaacctcttaagaataaatataagctagccccgctgtttggctccaaggtgatgcatgtgaattatcaccttgctgtgctgcttctgtacctgcagtattctctataatttttgcagtagcaagcacactattaaataataattttcaaataactctatttagaacatatagagatgaaaatccagttacgaagtttctccagaagtctcagatgaaaaaattagatccaaatttttttcaatgaaagtccacaaaattgagaattgcatatgaacagtgtcctttattatatatatatttttacctatttagcatggtgtcctctatttcattttgtgtattttattcaagagacttgatcagactattcagccataaaaaaggaatgaaatgatgtcacttgcagccacatggatggaacagtcattatgttaagtgaaataagccaggcacagaaagacaaatatcatatgttcttacttatctatgggagctaaaaaagttgatctcatggaggtagagagtagattgagactggcaagaggcttgggggtggatgaagagaggttggttgataagtacagacctgcagttagaaggaatcagttctagtgtttgatagcacagtagggtgacaataggtaacagctatttaccatgtctctcaaaatagctagaagtgaaatgttccccacacaaagaaataagtgtctgagatgatggatatcctaaataccctgatttgatcattatatatcatatgcatgtgtcaaaatatcatatgtatcccataaatatgtacgattattatgtatgaatgaaaaaaagatacttgatcaggatgaggggtgcgggttgaataggtggatttttttagggcagtggaactattctgtatgattaatgatgaatacatgtatacaaattttaatcatttaggaggtcagaggagggggattccaagatggaatacagactataagaaaagaacctaactgtattgcaaatgtatggtacagcctcactgaagaggggtgaaagagtacagtgctactgacctaaataactaagtaactgggaatgagttgagcctaatactgaaggcaaaaaaaattgcacataacacatgtgctgactcagaccttcttcaattgattttatgtaacatataagaataaagtttctacattaaaaaagtatgaatagtatataacatttgtaatttattgttaatgttaatttttatcttcataaaacttgaaaaaatagatagctataatgtcattacttattttacctatccattggccatgataagatgtcccatggggtacaggttaattctgaaaccactatttctcccaaaaacaccttacaccttgagaaactatgaatctaaccatgagaaaaacatcaaatctcagttgagtgacattctgcaaaatacctgacagttactcctcaaaaccgtcagtgtcatcacagacaaggaacacctgagcaggtgtcagaaccaagaagatacaagcctgaggagacacaagcagttgtaatgtgagatcctgaatggagtccctgagcaaaaaagaccattaatggttcattagttgtgacaaatatactattctagcataagacgtgacaaatacactaggctaacataagatgttaataatagagaaattaggtatggggtatataggaactctctctgcactaccttcacagtagttctgtaaaccttaaaatgttctaaaattaaaagttgacttaaaaagatcatttgagattactgtttttaattagccagaatatctaaaactatgaataaattatgaaagagcctagtttttgtcacttaatgaaaacagtgatggcttagaagtcctaaatgataagcacagcaatattcactattctttgctattcagtatttgcatggcttcttcatttaatttgaaaagttgtaaactgataaaacactataacatgattcactggctcaaaactacttggattagtcttactatttgtgctaaattggtgtttagattacttaatctattttctcttactttgttttagatgaattaaataatcttggtcatcctggtgagtaatacaaacataaaactttagttttagatttttaagttgttgaatgcagcaaagttaccgtaggtactcttttgctacagtaatactagtaacttttttctctttattgaaataatataatttaaggttgaaattaactacatgaagtacaattttatacaagtgatacattaaaaatattttaggttataaaactgtaagggtagaaaagaagtgtttgaggtaacataaaacctcaaggtattatcattgtgtattactccttatatcataacaaggaagttaatgggggaagtacgtgacctttaatctgaaagcaggaagcagtgtttgacagagtgacaggggtaacatttctgaactgatcagacccctgggacctttttcttggtgcctcagtcatacagcatatctgaactagttgggtgggtgcctatatctggagtaagaagtgtgtttgtggggatcattggcatcgtacaggtcggttggtcagtgaccatttcttaatgagtgacagttgtcaagagtatgtagaactctgtaggctaattttaattagaacagatttctaataagttaagccttcacctgagataaaaggcatatcaacagtgagaactacatgaagacacaggatatcaacctcgtgtaggctttctgaaagacaatgatggaacctgtggatagatctgaaaataaaacctttcaggaatagtttaagaaggtggttatgtcatttaatatttgtagaaaaccctattacttctccacttatttctcattattttagcatcattactagtttgcttagtgtcatactcatattgcattagcaaacatctattattgtgaatgccattgggctgtgctgactgtatataagcaaactagacacagcagaaagtccccattacctgtgcgtcattctccttgctgtagtgtcctcaaattcacataaagcctcaatgagacctgcctcaagtaggtcttgaactgtcaaaaaccatcctagtaattgtttctcttactgggggagaatagggggtctggatagaatcccctttcctaaattagtctgttaattcttgcttttctttaatgaacattatgaaaagttatttcagaaaaacttttgtaaatagccaccactaagattctaaaattttcctggccctttgagtttttcctcatttcccacaattcagggagtaccaaaaatttaggtttaaaagaagaatgttgtatagggaaagcttttaataggcttcagtggcatgtatttgaccagtagtacaaagttatctcccgacagtagtggacacacaactgatgaactacatctttccctacatggtgcttcaggtgcggggcgggattttattttatgtatactagagggtgaaagcatagaatccagaaggagactccctaagttagtatccagatttgctacttactagcttcataactttgggcaagtgactttaatctctctctgccttaatttccttatctatataatggggttaataatagtaggcacctcatagggtagagtgaggtttcattagatctgttatatataaagcatatagaacggtgccagctgaggcatcaggaaatggtaactactgctacttcctattgtgaacaccaccatcgtttttttccattcaagagtgtttttattaaaaatctgaagagtagaaactatattctgtaagtgatgctgctgatgttatatacttttcatgtatctttaactctggaaatataccatggatcttacatgttttgcttttttatctttgtatagataataaagagcaaacaactgaccagcctttgggtgagtagaactttaaaatgcattatcaaagtataattattgtgtataactccagaaggaatttaagacattttaatttggttttttaaagaaatgtgaataacattgggaccaaatgttttatttttttgtatctgtaaaagaaggtttagaagaggaggcttaaaaatgattacaaattcagtttctagggtcaagtcaacttctgtggagtgatttgtgtgtttctcacgatatgcaaacagacatgcgtacaaaaagaaacatgtacatgctgcatagttagcatagaggaggaagtggttagtgctgtctcttggtgagggatagaaatcacaaaggctgcagtagctttagcgtttgctcccctgtcttctccaatggaaagagaaaagaatttaggataaaatgtaaacgaacagttgcatttgaagaatgcctgggacaagaaaatgtaagggagaaaactttagcagataaaagtttagcagattaacatttaaagatggtaaaaatagctaacagcttgatgctggcagaagccagataaaatatgtctaaaatttgtccattggattcagctactgaagatgtgattggtggctttgagtggaatgttgaaagtgcctaatatgtgtcagttactgagttatgctgggaatttaaacatggatacaatgtataaaatagtggaaaaagaaagattcagaagtgaacaaatgaagacagtacatattaatttgttggaaagaaagagtggtttgaaattaactagatagggcatatattcaaagtgttttggtaggaggggaaaatgtgaggatatttacatttggaaaggaagtatctgttgagactgtgtagattagagtgatccatcaaagagaggacaatttatagagcaagttcctagaagagatgatagggatttgggccaaggtgaaaacaagagaaattggctttaatcagaatgttgaaacctcttttgagattaaaaagaaggagagattggtgaacagatagatttattgggaagctgaggacatttttagtttatgttttttgtttctaagtaattaggcgtagtaatatgcttaaaagattgaggaaaaggctgggcatggtggctcacacctgtagtcccagcactttgtgaggccgaggcaggcaggatcacctggggtcagaagattgagatcagcctaaccaacatggagaaaccccgtctctactaaaaatacaaaaattagctgggcattgtggtgcatgcctgtaatcccagctacgtaggaggctgaggcagaagaatctcttgaacccgagaggtggaggttgtggtgagctgagatcgtgccattgcacttcagctgggcaacgagagtgaaactctgtctcaaaaaaaaaaaaaaagattgagggaaaaagagtaaagtaaggctgaatatagatcttattctatggcagaggcttagaggctaaagaaaatggaagcaaggtcttacaagtctgatctacaagtgaatgtgtattgagagtccaactaagacttttaaagagtaagaatttataatggttcagatcagttgtgtgctttttctgtagcagatctcagctttaaaatagagaagataggctgggtgtggtggtacacgcctgtaatcccagctactcgggaagctgaggcacgagaatcacttgaacccaggaggcggaggttgcagtgagtggagattgtgccactgcactccagcctgggcgacagagtaagactcttgtctcaaaaaaaaaaaaaaaaaaaaagaaacctgctatgtttcattcatagtggtaagttttcatgtattccagctccatgatcttttctttagatcctccagacagacctcactgattaagaaatacctattaaaatagtgttctgaacaaaggcatagccatcatattctgtagagaggagcatacatatgtcttaggtacacaaaatgacaagatccaaatgtaactgggttagttgctgaagatggtttaatcacaaatatgcatttaatagtaatgctaataaactaagtgttttcacctagtgaaatgtttaatttaaccctgagatgtaggtatttttcctcatttttagtagatgaaaatttaaaactgtaagtgtttaataaaacttgctcaggattatacaatgtagtagttgagacaggattgaaacccatctatctctcattccatagcctccgttagctccattatgccaggtattctttctcaaacatgtcccaattgaaagaataacaagataaatggaatatcaggtcaacttctatcattgaagttcactaaacatttatctaatgtttcatctgtgctttatgacaggcatcccccacccccaggctgtggaccagaactggtctgtggcctgttaggaactgagacacacagcaggaggcgagtgagcgagcattaccacctgagctctgcctcctgtcagatcagcagcggcatttgattctcataggagtgtgaaccctattgtgcactccttaggagaatctaactaatgcctgatgatctgagatggaacaatttcatctcaaaaccacccctcccctgacaccgtccatggaaaaattgtcttccacaaaactggtccctggtgccagaaaggttggggaccgctgcttaatgaaacaagagaacaagccttggtttgtgaattcaaggctttggatactaataggaggcagacattaaatgaataatatagtacatgctacatgcctagtagaaatatgtaaagaatctagaaattgttcatagaagatggtgatcagattagtcgaggagagttagagagggctttacctaagaggcaaagccaaggtgaggattttcaaggacgaattgggagctctcaaggggataaaatgaaaatatatgggatgagagttcattcagaaatgaaggagagggaaaaaagggtgaagacatggtaagaatggaggcatgaaatagatggtgtgggtgaggaacaaagttcagtattgctagaaggtagaaaactagggaaggagtggctggaggctatactggtaatgtagttatttattgctgaataacactgcaaaatttactagcttaagaacagcatcagttttattatctctcattgttctgtgggttggactgggtttagcaggtggttctgctggtctttcttggggtctctcatgcaactgcagtcagatgaggctgggactgccacattcaagatggctttgcttacatacctggcaccttagtgggggttggtgaaagactgtgaagactgaaaaaatctccctccctctctctctctctttctcttcctcttactctgtctctctgtctctccctctccttgtctgtctctctctgtcctcccctcctcttcccgcccccaacttctttctcttcgtttccctctccctctttcctttggttccttctccctccctgagtggtctctccatgtagctgttttctttatgtcgggctggatctccaaagtggaaactgtcagagcttttaagggcttagaccctgaactggcagaggggtcacacatattatgttgctcaaagaaagtcgtgatacagcccagattcacaggtgggggtgactgtactacacaagggcaaggatactgtggtttgctgggggctacctgctaccacatctggaaagataggcatggactagaatgcaaatggccttgaatgccaaactacatcaccagtctaacccccagccactccttccctagtcctctaccttccagcaatactgagctgcctgttcctcacccacaccatcaaactgggactttattttgtaggacatggagagtcattaaaagatttaatacatgtgatttttaaataaatacttaatagcatttactatatgccagctccttttctaggtgcttctgaatattaactctatttagaaaagtaacataataatcagaattattagacatgggattaatgatataacaccagtttttgaagaatatattacattaaactttggaagacgtttaggatcatgagttaaaatgtctttctgaagtggcttcattattcttttgctgaatccactggcatttttgtttcacttttccaataaattgtttgtgttcaagaagttgtgggtagctcttacagtaaatatttttctacagaaaaactctttcatttatgttatcacttgaaaaccattataaattgctttatatttgccgtcttgaagttttctttattcctcactcttacctcctcaaattcaagttttattgttcgtttctctgtcgtgtcctttttcctctccctttctactacttctcgatcttccatccaccccagttcacctgtcacccaggaactgttttacaagtagattggacaggtaagatttacttacccaccatctttttcaccagtaaagtcaaggaaatgctgtaagacatcttaggaactagctattaaaaattatcattggaggaaaattttagaagtgttatagacaattatcgatacatatgttttaagacctgtagttctcacactgttgaacccgtgcattctgtaaactgtaccaagtattctttcccaaatagagaacaaaaccagtgaataatgatttgatatcagcaaaaacatcccatgatgcttagtttgacagttaattttatttccccaaagacccagtgatttttttattatatacttataattgttttctaccaataaaaatctatgatgtgtataattaaatgatggtattccatggaaaaatggaattatttacaagcattttactaccccagtaactttttaacctcttgctgtaaacctatgatttggactataatgatgtaaagcagagacaatgcattctcacatttcccctcaccttagaagaagactgatttgagtctgtcactctgttgaggttggatccttattctaatagcattgatggactcaaaaaaatgtgctgtggatcagccagctaagagtcttgctgtagcaggtactttagtgtaagaatactagtttattttaaaagaaattttaaaaaggccaggcgtggtggctcacacctgtaatcccagcactttggaaggccgaggtgggcagatcacctgaggtcaggagttcgagaccaccccgacctaagtggagaaaccccatctctactaaaaatacaaaattagctgggcgtggtggcgcatgcctgtaatcccagctactcgggaggctgaggtgggagaatcgcttgaacccgggaggcagaaggttgcagtgagctgagatcatgccattgcactccagcctgggcaacaagagcgaaactccgtctcaaaaaaaaggaaatacaagtgatgttaagttttatgctgcctcctattgaaatccatgctgagtattctccgctttttcattgaattaataatgcggcttaagtatcatttcactgttatgtatattcataacactgggcagttggctagaaatctctgaacatgtacatatagaatagagatgacatgatataaaattactgaggcttttcacaaagtagagttttttttatcctttgagagagtcacagtcttttaaattgatgctagttttaacactaggtttaagtgttccatggaaagaaaagcaatttcaccagagagatttttggtgaaataatcatctcaattatttgaaacatctgaaattacatattgtagacgtcgagtcagcaatgtgattattcatgcctgtttcaacttcataagagtagtattcataataacttacaaataaactacttagcagcactttgtggcaggggttggttaccaagtcctggcctgcgtcagagggggtggcctgcagttctacccaggcggctcttcagccagttggctggggctgcaggtgctcttgtcaccctgtctctctgctccctggcatttctgtcactgctgctactattacgggtgctgcacacgccccactgtcagccctcaagaagaaagccgtcagaggctattattgtcacgggatggtcttgaggttttggtgtgttctttatttttttttttttatttttttcttccctttgataccagtgggtcttgagtttttaaccattgaccccattccaggctatcaaagaaaggtaccgtgttgaagacctcataagcactaagctaggtctggctttccacactgttttagatgggctgcacacctggttaagctagctgctactttttaaggcatagatacagatctttttttctcttatgaacaaaaaaactgtttctatcagaatacattatctttgagcaaagtctcagtgcactaagttcaaaaaatgaacttttaaggtactcatacacaaaatcttcacatacccctgaaatagcctcatctgagtcaaatgggggagtatttttaaaagatgctaagaggagacggtagtacatccacatggctactgcagaaaccaagaatacagtacccgtgaagttctctctctctttgatatttcccctcattcactctgatgggattcttcctgtcccttttttagttatcttgtttttagcctcttccattctcagcaaaacagaacctaatttgatgggaacccaatttcaaatattccttgtttaaattttctccaaaagtctagttgaatattatatcccttttgttataatttaataaaagtaaactttaatattaattactgttatgtttcatatacagctaataaatatcctttgcctggctctcaaaagtgtgaatatgcttaatttcagtttgatgattttagcatctgtgttcctcagagaatattgatctgcttacataaatagttctaaaatgaaattaaataatgaaatcttatttgaaatgaaataatgcaatcttaaagcatactttttattataataccatctccataggttttgttttaatctttatatcttctttaaacaccccctttctttttttttcaaagcgaaggacaaggttgcccttttgataggaaatatgaattaccgggagcaccccaagctcaaagctcctttggtggatgtgtacgaattgactaacttactgagacagctggacttcaaagtggtttcactgttggatcttactgaatatgagatgcgtaatgctgtggatgagtttttactccttttagacaagggagtatatggtaagatatttataatgtttgtttttacaattatccattattcttttcattatacaagttaggttaagaattgaaaatcagataaagataaggtaaacatgttgttgaatggaagagttttatttttcttattaagatgatacatttgatcttcattccatctgaataactaattagcttcatgtctttacttttatgtttcctgttttgtcaaaacatatttttcttactagaattcttacctgtcttttgtgatttttttttaattgatagagccacagtataataaaacttgataaccacacagcaaaatttacattcatatgcgtaaaatattacagtatgtggggttttctttgaggggggtagcataaaaggttctagtagaatgtatattttgtatgtttccttttcctaactattgcatggtcttttctagtcttttagtgagaactagattttaacaaggaaatgttggtggatggggcatataatagtaatttgtaaattaaagttctatacagatatgcttagaaatgtacctctacaaaaattcttacagtaaatatttaatgttttttccccattctttcacctaaatatattaacactgcatatatggtaaagaatttcaaaggagacagaatgtgctgtcactagctaatcatttatttggtgatttatttctttcaatatgggaaggccagctgttgagctcatctgaaccgtgttttgcaggattgtgcttccatgacattgtgcaataacatcagattgccagggaagtgacatttccaggcctgttgttaggcatgcaatgataaacaaaaagtaccggtttggctcctgtatctttccagttattttattttaataatttctgaatttactcttgttatttataattagattgatatgataaggcaagtttggtcagaatttttaatggtgctcaaagtagaatttttaatggaacaaaagctttttttttccccccaagatttaccacactgttgtgtaagggatggggaaaagtctcaaaatcttacttaaatgagtttccctctctaaatagtgaggatttagagaaagacaaatgaagttaacaaggtaaacacctcaaatgtgagatttcagctattatgctgatgtgttaataaaactttatttataactcttatggactgatgactaatgggtgaatccatccatttttttcttatgaaaatatgaaagaatatacaatgcaaatatgccaccttggtaattggcttatacaggttgagcattcctaatctgaaaatccaaagtctaaaacttcgtgagtgccaacatgatgccacaagtggaaaattttacaccttacgtcatgaggggtcgcagttaaaactttgtatcatgcacaaaattatttaaaatattgtataaaattaccttcaggctatgtgtataatatgtatatgaaacataaatgaggctgggcatggtggctcatgcctgtaatctcagcactttgggaggccgaggtgggtggatcacttgagcccaggagtttgagaccagcctgggcaacatggcgaaaccccatctctactaaaaatacaaaaattgggccggacgcagtggcttacgtctgtaatcccagcactttgggaggccaaggcaggcagatcacctgaggtcaggagttcgagaccctcctgtccaacatggtgaaatcccatctctactaaaaatgtatggtggcagtcatctgtaatcccagctactcaagaggctgaggcaggagaatggtttaaacccgggaggtgaaggttgcagtaagccgagatcacaccactgcacttcagcctgggtgacagagcaagactccgtctcaaaaaaaaaaaaaatagaataaaataaaataaaaacacgaaaattagctgggcgtggtggtgcatgcctgtaatcccagctactcaagaggctgagacacaagaatcgcttgaacccaggaggcagaggttgcagtgaaccaagatcacaccactgtactgcagcctaggcgacagaatgagacttggaatcttggtctcaaaaaagaaaagaaaaacataaatgagtttcatgtttagacttgggtggcatccccaagataacctcattatgtatacgtaaatattccaaaatctggaaaaaaaaaatctgaaacacttctggtcccaagtctttcggataaaggatactcaacctgtattttcaatctggcatcaggggtgttgtttgtttttatattatacaattgatctcagcttttaaggtgcctacgtgacataaaaaggaaaaggcttccaaaacttcactagaagtgatgaggtgtaaggaaaaaatattgatcagtttaggtttctgtattggtgaagtatttaaagattgagggaatcatatgaagaattactaccttggttgtttattctcatttcttattgatattttcaccttggcttttaagccctttgtttgacttttaaaaccaaatcctgtggccagggcatggcggctcacacctgtaatcccagcactttgggaggccaaggcgggcagatcacctaaggtcaggagttcgagaccagcctggccaacatggtgaaaccccgtctctactaaaagtacaaaaattagcccagcgtgatggtgggcacctgtaatcccagctacttgggaagctgaggcaggagaatcacttgaacttgggagggggaggttgcagtgagccaagatcatgccactgcactccagcctgggcaacaaagcgagactccatctcaaaataacaaaaacagatcctttagttgcccctgtgaagtagagaaccagaaatattaaaaattgtgacaagactgcagtttaggctgaagctttgccccaatataaaaacgtcatcttggagtacaaaataaagaggcatgttaaagcaaaatgtcagcttaagaaagctagaaaacttttaaatcctactgattcgtgtcttaacagggtggctgcattatattttgaagtattgtgaatattccaaacatcagacacatctacactaaatgtaagtgtggtagaggcttgagggtttagggcatatcataaagaaacctttagtttttcttttggactatgcctttaccgctagttgatattaccaggggactcagtgcttgagggctgtgggggaagatggaaggcagagtcacaggaatttcagcatgaacagctagatacggagaacagaggaactcgagttcatgcccttttatattatattgcacgcaggtttgtagaagaaataaaagttgcaacagaacagacaataattcagttttaaacatatgtaaacataaaaaacagaaaccaaaaccagaaataactgtccttaaaaatacaaaaatacatgtccttaaagataaataaggagaaagatttctagttatgttgtatagatggccaggataaaaagtaaccctttggcctgagatctatccctgcatagcctttctgtgttcatcgcttgctgcagcttagttgtgctttcgtgtagaagaacggtaaaggagtcttgtcggaatatggcaaaagtgttattcggcctgcagcggagcagctgttcagttcacatagctcagtggttaagcagtgggccttagcatagctagcctgggttcaaagctttggctttctgctgacttagctgtgtgactgtggttctttaacttttctaagccaaaaggaatctacaaaatggatagaactaaattaatgaggtttacaggataagataaaataattatccctgtgcctggcacactaaaaatgctcaaaatattgtacctattattgttgtcgtttcctgtcaatttattaaagacattcaagcactttttcatctttagattggggatttggactaggtagcattctatttcaggcctcaatgagagaaacccagctttaatcagtttctgtgtattaagggtctacctaaggttttttgggttttttttttggttttgggtttttgtttgttttgttttttgatacggatggagtcttgctctgtcgcccaggctggagtgcggtggcgcaatctcggctcacggcaacctctgcctcctgggttcaagcagttctcctgcctgagcccccagagtagctgggattacaggcacatgccaccaacgcctggctaattttttgtatttttagtagagacaggcttcactgtgttagccaggatggtctcgctctatctcctgaccttgtgatccacccaccttggcctcccaaaaggccaggcgtgagccactgcacccagcctgccaaaggttttttgtgtttttttttttgttttttttttttttgaggaaaaaaagtcagggggtttaaagctgtagtgtagtaaaacagtgaaaagccagtgcactgacattttacgttgtctgagagtcgagttacctaaaaagccagcagtagattatagagacagtatcatatagcacagtagcgaggctggcctgcatctgtattttggttctgtcacttactaggcatttcagtttgggtgagcttttaaacctcttcatgtctcagttttcccatctgtaaaagagggatgttaatattacctactttgttgtgaggattgtgtgaggcaatgtaactagtgacctttcttggaaccgtgcctggcacatagtaagtgccgtgtaagcctgctggggtggcgggtgttgtgctcatcagccactcactgtgctaagtggagtgcatattcagttgagtggaaaagtttttcatttaaatgattattttctctgtagacaaaaataaatatctgtgactatattcttgaatcatcctcccaagaaataaaactccctaaagatctaatttgcagaattgtatttctaagtacagtaagttctttgacatttgtttaaaaaatacctattttcttctctatccttgagtaatgggatggttaactaaataaataagcagtactagagatggaatttaaaaacaacaacaacaacgatttgggccacacacggtggctcacacctataatcctaacagtgggaagctaaggtgggagggttgcttgagcccaggagtttgagaccagccttggacaatatagtgagacctcatctctacaaaaaatttaaaaattagccaggcatggtggcacatgcctgtggtcccagctacttgggaggctaaggtgggaggatagcttgagcctgtgaggtcgaagctgcagtgagctgtgatcacactgctgcactccagtatgggcaacagagcaagaccctgtctcaaataaataaataaataaattttttaaaaaaatgatttggactagttcattttacacaaaagtacttaattcccctcaatataatttggttgcagactttgatacagaatagttacacttttcgtaagacattttgggaaagagaaaaaatattttggtgttaagtgccttaattccattcagcagttgcagggctgggcatgtggcattaatgtaacagaacaacattcagcttttccctggatgaatggaagctaagccttccctcagagttgtatcttcaccccaatcaagtcttgctggagccagacgtattacctgacatgagggaggcagcacccaggcctgctgtcagtcgtctctgagtaataccagttgttgaaatggtaccatttctactaaaagtcagacccttgaaaagagacctccagatctgaccctgtcttgattggtttgcattgttaatttaatgcaattcagtaagtatttactgagttatttttgttacatctatagtccagatgaaggagtatgctatgtgctgagagaaataatagtgaataaagatcatgatctgtcctcctaagaaaattacagtcctgggccgggcacggtggctcaacgcctgtaatcccagcactttgggaggccgaggcaggcagatcacctgaggtctggagtttgagaccagcctgaccaacatggagaaaccctgtctctactaaaaatacaaaattggctgggcatggtggcgtatgcctgtaatcccagctacccgggaggctgaggcaggagaatcacttgaacccgggaggcggaggttgcagtgagctgagatcacaccattgcactccagcctgggcaacaagagtgaaactccgtctcaaaaaaaaaaaaaaaagaaaaaaaaaattatagtcctttaatacaaggagaaaaaaacactatggagtcaaaacatcaactctgtgattttaagcaaatcatttaatctttgtaatttaattttctcatctataaaataagggcagaaatcacttaaagttgttatatggattaaaattagattgtgtatatgaaagtcctttgaaaaccaagaaaatgttatacaggttgaatatctctaatctgaaaatcccaaatccaaaacactcctggtcccaaacatttcagataagagctactcagagtgtgtaaatgtaaaagattagtgtcattatgatttcttatcagaaaaactaagtagacataggactatagaatgtcaggaaaagccagtatgtgattgtcagaaagtgctgctacagcatttcaaagtagggagaatttgaagtgtgttagaaagccacaaaccagttaccaggtagtagttaccaggtgagtaacttgctaaggattctgaactttggaaataacccttgaggactggttatggtttgggtagatagaacggagatagagtaacttgagcaaagttgtggacgttaaaaataagtttatcttgctcttgaagcagtaaagagactgatggaaaataaagttatattttgaatacttgatggaggtgtataagttgtaccctttttaaagtgtataatttggtgatttcagtatcttcacaaagtgggcatcagtcaccactacctaacttcagaacatttccatcaccccaaaaagaaaccccatatccattaacagtcactcccattcctccttaccccagcccctggcaaccaccaatctattttctgtttctgtggatttgcctattctggacatttcatataaatggaatcacccaatatgtggccttttatgtctgccttctttcacttcacatgttttcaaagttcattcatattgtagcatgtactagaacttcattattttagggctagataatattctattatatgattatattttgtttatccatttatcatctcatggacatttttggacatgattaataatactgctgtgagcatttgtgtacacattcttgtgtggacgtagtttccatttctcttcggtatgtacctggaagtgaaattcctgggtcatatggtaatctatatttaactttttgaggaactgcaaaactctttccaaagttcttacaccattttacatttgtgccaccagaaatgaatgagggttccaatttctctgcatccttgccaacacttgttcttgtctgtcttttttattgtagccatcctggtgagtttaaaatgacttggaactagtggctaatgatgttgagcatcttttcatgtgcatatttgccactcatatatcctctttggagaagcatcagatcctttgcctatttttaaatcaagtcattagtcttttttttttgagatggagtcttgccctgttgcccaggctggagtgctagtggcacgatctcagcttactgcaacctctgcctcccaggttcaagcgattctcctgccttagcctcccaagtagctgggattacaggctcccaccaccacacttagctggatttttgtatttttagtagaaacggggtttcaccatgttggccaggctggtcttgaactcctgacctcaggtgatccacccaccttggcctcccaaagtgctgggattacaggcttgagcctccgcgcctggccgtcattagtctttttattgatgagtggaagagttctttattctggatacaagctgtccttatcagataaatgatttgcaaatattttctcccattgtgtgggttgtcttttcactttacctgatcttcgtggtttattgaattaaatccattcttttggtcattatttttaaaaccctatctgtgcactcctttttaaaattccctgtgtgtgcagtcttattttcattcacaacagtaatttagttttttgctaggctagtctcttttctgttagctttcattccaggtccaatccgtgtttatttctgttctcctgcccataatctacctcgctctctctctgcctttgcaaatttctagccattccctctcttaagaccatcccctgttgtttcacttcatactgatattcctctctactttactcatttcatacgtacatggtggttgtcccactaacatgatttatggcatttaattatgtgatgactttcattgttgcttgataacataaacgtgtgaatcgtgtgaattcatgtatggagatacatgaatctcctgatctcctgcttagaggtcaggaactttgtccttcttttttgtttctctcagtgcctacatgataacttccagtgcacacatgagctgtaatataaacccacacttgaaaatgggtatatccattttctcattttagctgaaacgtatttgaaagaaccatttttctcattttaatcgaaattcagaaaaagcagacgacctggattttgtcctgtaggaccacatgaagcaaattgtctttaattctcaaagccgcattctctgctaggagtcggggccataattacaatggattagctacttttggttccctgtctaaatggcttttactatttgctttaaaataccctgtaaagaaatcattaaatccagaatattgagagagcaaaatcagtgggctccagatattgcaagcagaggggaggatatcttcaaaagtgttttgtccagtacttttatgaagaagttcagactgatatttttgttgttttttacagccaaaacaaatttcaagaaaacattgagttgtttgggttagtttttatagtatcacttctcagtaaggaaatatgattcatctgttgagtcctaaaactatcccaaattttagattattgagtcaaaagactctagatggaagattgatatttatatctcatagcaaaaagaaaaaatagcaatctgcgaagtcagatttcccatctctgattataaaactatatattttaataacccttaactgtttatggtaatacctgcagtttcttgacttcatattgcagttgctattcatctgaattgtgtttgttcatccgttaaatacttactaagctcctgctctctatgccaggaacacacaaataaataaatgtaagactatctctgccctaacagaactcctagcttcatggaggagacaaatgagtcaggagagaaatcctagctgcattcttttttatatatcataacataaaattgtattttatattatactattggttacaaatatattttataaattaggatatacttcagacagcattttgatattgtcttgaaatgcaaattttaagtgcagactgttggtaatttatttatttatttatttattttgagacagagttttgctctgtcgcccagggtggagtacagtggcatgatctcagcttacagcaatctccacctccaaggttcaagtgattctcctgcctcagtctcccaagtagctgggattacaggtgcccaccaccacgcccagccaatttttgtatttttaggagagatggggtttcaccacgttggccaggctggtttcgaacccctgacctcaagtgatctgcctgcctcggcctcccaaagtgctgggattataggtgtgagccgtcatgcctggcctgttgccaataattttaaatgcaaaataacattgtctatatttataattgggtatttcttacatatgctcacatcaacctgaagaaaattaaagtcaaggtttttctacaaaaagttatgcagtctgtatgttcagagtgcatttagaattgacatctatctctctcttatttttcctcttttcagggttattatattatgcaggacatggttatgaaaattttgggaacagcttcatggtccccgttgatgctccaaatccatataggtctgaaaattgtctgtgtgtacaaaatatactgaaattgatgcaagaaaaagaaactggacttaatgtgttcttattggatatgtgtaggaaaaggtaagttttctaatctttattaaagaattgttggagttaaatatcgaccatgacaaactagagaaacctgtgaaatgctaaaagccatttgcgtttgtgaattttagtttatacattgaaactggaagaacaaaactagaggaaaatacatttactccatgtatatctaattattttaactcttcatatttgctatagaacacaaatgaagaactaaagggcatgggcatttactcacactacaggggattcaactctccagaatgcctttagatgactttaataatcactatagttattccctcaggaattaacaaaaccaacacccatggagttgggatctctgctcactagtcagtcctggtcttccagacatggaatgagtagccgaagcagatgtttggaggtttggatcccatttgtctgccattgcctttctaaggagtagaaccaatgactgttcctctagatttactatttttttgcttgctcagcatttaccaatcaaaatccaatgccagagttcaaatgcaactctagttttaaagctaacaaggagttagtgggttattttgggtagatatgtagctacctagatgaaaaattttgaatctataattttaaattatgtattctaaaaaactgttgtattttctcattatttatacccttttaagaatgctctttaacttttcatatttctatctgccctcctccgcctcccttaaatagaaatgactacgatgataccattccaatcttggatgcactaaaagtcaccgccaatattgtgtttggatatgccacgtaagaacatttgatgtttacgttgaagtttcctttattgtttgatgtctttttgtttttgctttttaggagcaggggtcttaactctgtcacccaggctggagtgcagaggcgccatcatagctcactgctcctgggctcaagcgatcctcctgcctcagccttctgagtcgctgggattacaggcatgtgccactgtgcctggcccctgagggttttttgattatagattagaggcctagaaaatacctatagacatgtaggcataaatttacctccttgatattctgcgtagaaaattttaaatgatcgactttagcattccatatcatggtatcttaattattaagcccaaattgggcatgtaattcctgcttaaagattaactctttaattatcaatgtcatgtgagaggcagaagagaaaatgaagcttattggtgtatacagaagtcccatgtggcaagtgtttgcttttctaacattttctttttaaaaaattatttttattggatattgacaagttataattgtatgtatttatgggatacaaagatatgctatgatgtacgtattcaatgtggaatgattgaatcaagataattcacatatcacctcaaatacttatcttttttcctaactgaaacattgtaccctgtgactaacagtccccacgctgtccccacccccccccagcctctggtaaccaccattctgctgggtgcttctctgagttcatttttattagcatccacatataagtgagaacatacagtatttgcctttctgtgcctggcttaacttctttttctatttttaaggtgtcaaggagcagaagcttttgaaatccagcattctggattggcaaatggaatctttatgaaatttttaaaagacagattattagaagataagaaaatcactgtgttactggatgaagttgcagaaggtaaaataaaaaataaagagaaaagtactcagaaaaaggagagcaggggagacacacctattcagggttccctctctggtgattgttttattcttattatgtgggtttggaattagtacctactttataaaacaatttttatattaatataacgttcagcaacacttctgctatttaatgtcatctttccttcccttttgacctagctctccaccatctgtgcagcattactcagactacaaggctaagcctcggcacagtcattaataaagttgaattctcagagctctactttgcttctatgcccagtgccttggtactggcaaatctccctatttgagggtgggtgggtggcatggaggggtggtggggaattgtccagtgagcagtctctcccaggatgggagagagaaaactttacagaaatttttagacactgctgggaaaagctgagttcatttttttccctgatgaacttagtagtttttaaatcctgatttaaggatgtgatcctagggggtctaatgccacatcttccatttctatctgttctccctgcctgctggtataatgctgtgcatatgtcagatgctgaacaagtacctattatttcagtagattgcactgtgttttttgaaaaaacattttataagccatagcaaaaagaaggtaacttggccaggtatggtggctcaagcctgtaatcccagcactttgggaagctgaggcaggaggatcacttaaggccaagagttcaagaccagcctaggcaacatagcgagaccctgtcttcaaaataaaaaataaaaataaaaaagaagaaattattttacaaactagcaccactagaaaatggagtttcatggatgttccagtgatggcagtttgggtataaggtgtttgaccaactgtcagccatatttattttcatgtttttatctgtgtagctattttagatcacttgacttagccacttttccatttaacataaccagccagggctttggacttcctgccaccctcccgcttcatccagagaagttccacttttatttgttttctacattaggcttcttctgaagcttacatttgaaggaaaggctctgctgctttaaaaaaaaaaaaagaaagaaagaaaacctttggattatgtcagttatattcaaactgagatccagtaaggtgctccagaaactctacagtgttttatttcaatttcgtttttaagtccattttaactattttaaaacttaataaaaagcaccatgctcactcacatatgatatttaccaaattgtcatagcaatgaatggcatcccgatatgtgctgtgaggatatttgaacttcttataaacatcttagacagttttgcttttcgctgatctttttcagtcctaccatgtctgcttaaccagaattgcccaggcaggaagaccctgtagtgtacatggagcacactcagctcagtgccgtgcacattgtgcccttcgtgggtaacggcccactcattgtacaaaataagtaaaggcctaatagtatcatgataaataatacagttaaatctagcccttattttgagttttggatgctttgtgtctgacccctgtcttagtagtaaagagcaaaagtagttgtatgaaatttttcacaagtcatccaattttgaaacaaaactttgctgtttctccctttggatcttccagattacttaattgaaactcattccatggctgggcatggtggctcacacctgtaatcccagcactttgggaggctgaggtaggaggattgcttgagcccaggaattcaagaccagtctgggcaacacagcaagaccccatctcaatttaaaaaaaaaattatttggggccaggtacagtggctcatgcctgtaatcccagcatttggggaggctgaggcaggagaatcacttgaacacagaagtttgagaccaacctaggcaacattgtcagaccccccatctctataaaaatttaaaaaattagccaggcattatggtgtgcacctgcagtgccagctactcgcgagacttaggtgggaggattgctcgagcctggcagtttgagactgtagtaagtatgaccacaccactgctctccagcatgtgtgacagagcaagccccatctcaaaaaaaaaaaaaaagaaaattccagagggagaaaagtattcacagattataagccaagcagttgaaggggaaaataaacatgttaccaatttctttttttaattttttggtttctttgtgtgagactacagagtctctgtcgcgcaggctagagtgcagtggcatgatcttggcttactgcaacgtccacctcccaggttcaagtgatcctcttgccgcagcctcccaagtagctgggactaaaggcacacaccaccacgtccggctaatttttgtatttttggtagagatagggtttcgccatgttggccaggcctgtctcgaactcctggcctcaagtgatccaccggcctcagcctcccaaagttctgggattacagacgtgagccaccacgcccggcccaccttaccaatttcaactgtgtgcaaggaaaacaaaatatgaggtaaattggttgttataatgctacagccatcaatctgtaacgtgacttttatttttgtactattcaggacagcattattattagaagtgttgaacatactactgaaggttttcattgtgagtagatgttcgatatgaatataggaccttgaagtaacctacatctaattataggacccctcttctcccttcccccactccatgataactaccattctaaacttattcctttttcgttttacatagttttattgagtttatatatacccaaaaaagtatgcgtagttttgtttttaacttcataaaaaggtattatgctctatgtagtcttttgggactagatttttttggttaatattatgttgctaagattgatccctattgttgcatgactgtagtttttaactgctacgtaatattctgttatgcaaacatactacagtttttttcaactactctcctgtgttggtgagcatttgagttagttgtaggtttttgctatgttaacagtgctatcattaacagtcttgtgtatgtctcctggaatatgtatgcatgaatttctttgcagtataattctacaacttggaattgctgggtcatagggtgtgacagtattccattttgagagagaatgccagacagttttgtaaagtggttgccgagtctacacttaaccctactccccacggccagcaagggataatgtgaatctgtactctctccatcacttgatagtcagacttttttatttttgccaaatgttaaatagtatctcatgtgatattgaacattgttcatatttttaatagctatatgtatatcttatgtgaaacatctttttatgtcatttgtgcattcttctgtgtgtgtgtgtgtgtgtgtgttttggcttattgatttagaggaatgttgtatgtgttcttgatataatactagcgaggaccgctaagacacaattgaataggtagttgtgggcatccttgtcttgtttctgactttaaaggaaatactgctaatgtcttcacatttagaataatattgtaagtttttttattaacactttatcaggttaaggaagttctcttaatttttttgaaaatttttattatgaataaatgaacaagattaaatggtttttctgcagctatgaagaagaaaataggatgtttcttttctttcaatttcttaatatggtgagttaaatttatagatagtctaacattaatccaacttgagataaatcactttcattgggatgtatatttttaatacactactagatttaatttgccatcattctgtttagaattttcatatctatattcatatgggaaatgggcctgtaattttactttcttatagtatttggtttaattttatgagaaaataaaattagtatttagtggtatcagtgttatcagtatcagtggcatacagagtatcagtgttatctgatagaatgtagcgtaggccttgtggaatgagatggaggacaaccaagatggttgattttatgtcaacttttgccaggcctcagtgccaagatatttagtccagcattattcaagatgtttctaggtgatggatccaacattattctggataagattaaagtttaaattgatggactttcagtaaagtagattgctctccataatgtgaatgggcctcattcagttagctgaaggccttaatggagcaaagactgacctcccacaagcatggagtttgctagcagcccgcctctggggctcaaactacaactctcctctgcatccccagcctgcctgcctgcaggtttcagacttgcaccgccacaattcataaaccaataccttaagtcagtcccttcttctcactgtccctctatgtacacacatacacacacacacacacacacacgtgtacgtgtacacatgcgcccatcttgttggtactgcttctctggagaactctaatacagaagaagtacaccctgttgtttactgggaacttttgtataaattatgatctgttccctaatgtttatggtagaacttgcctataaaccaacctgggattggtatttttttggtagaagatttttaaccactggttcagtatcttgaatatttcttgtaccatataggcttttcatttcttgagtcaattttgataagttatattttcctaggaatttgggcagttttcaaattcgttgtcatttagttgctcatatttctaatagtattctttaatctctgccttatccatagttatatatccgttttcatcagtattacttgtacttactttccttttttatttattgccagcttttgccaattgtgctatttcattttgaagaaccaatctttgactctgttgatttcttctactttttcattgttttctacatcattaacttctgctgtttatttatgtcttgccttgcatttattatttctttttctaacatcatcgtagttattcacttttagcctattttttccaatttaagtttctaaggctttacatttctcttaaaacatcactttcatcacacatcctataagtttagggattttttttagttgactttttttttctttgacctttaagttatataatattatctttaattttcaaatatggcaggaattttcatttcactttttgctttttatttctaccttaattgctttgtgatcgaataatagtctgtctaattgctatgctttgaaatttgtggaggttttcattatggccaagtaaaagatgaaattttgtaaattttgcatgtgtacttgagaaaaatggatatttttgtagtaactggttgcagaactctatgtatgcccattaggtttggcgtattaatttttattgttttgttcagttctatatttctgctgattgtctctttgatcaataattgagatgttgaaatctctcaatttaccaaattttcttgtagttctagcactttttacttcatatatagtgactattttcgtgttttaaatgtttatattttcttattgaacctttatcattatgtagtgatgcctccatttcaaatgcttcttctctttttgtatcatactaacagagccacaccaacttcctttttgttgacctaatatgctattttttacacttttactttcctactcttaacccctaggctagcctgcttctctacacttttactttcaaacatttcatgtcattctgctttgctgtagcttttggaggcaccatataacagattgtttaaaatccaatctgataatcttggtcttttaatgagaaaatttagttaatttacatttgttattttttgtacctgttttaaccatctaattttttgatttggctcattttcttatcttttttaaaaaaattgtatttatatcttttcttctctaacaaataataattttaatgtactcctacaatacttggtatctccttttaactcccaacatgttgatttaacttagacttagttctggatcactatataattttgtctctttttttaaaaaaaagaaccttactattgttaatttataacatagtagacagaagtaggataaactataacttaaataatatacttctaaatttaaattgatgtgtatccatatacattagtctatctaaaacatgttgaatgaaaatggtacattacaaagacatacatagaacatttttgttgaattcaaaaacctaaaacattggcatatactatttatgaacacttacacacatgagtaaaaattaaaacatgcctgatatgtctggcacataataggtgctcaggaaatatttgttgagtgaataaatgatactgagaatataacctgataatgtaggatagttcttagcctaaatatttaaaacataagaattggtggtcttaaaaataatatttattttcatatcttttagatatgggtaagtgtcaccttaccaaaggcaaacaggctctagagattcgaagtagtttatctgagaagagagcacttactgatccaatacagggaacagaatattctgctgaatctcttgtgcggaatctacagtgggccaaggctcatggtacggtaaagcccattttttgttagatctacaatatacttaacgttaaatcataaagtttcttctgaataaataactttcctcccagttttacagtgaaaatattttggcctactaggcaaatctcaaaccaaacaaatatttcaattatggatattacactggcttatttgatttagaaatatcaaattatttagcccattattgtcactattggtaaaatttaaatgaccatttaaaaatttttctatttttaaaataggttaagtttccatttgtctaatacacaatcctttagattctcctatattgtgacctgtcgaaaatcatggattgggttctgatccagtctctaccactctatgaacatgttatctataacatgtaaataagaaatggtacctgcttcaggctgggtgtggtcgctcacgcctgtaatcctagcactttgggaggccaaggcaggtggatcacctgaggtcaggagttagacaccagcctggacaacatggcaaaacctcgtctctactaaaaatacaaaaagttagcggggtgtggtggcacgtgcctgtaatcccaactactagggtggctgaggcaagagaatctcttgaacctgagaggtggaggttgcagtgcagtgagcagagattgtcccactgcactccagtctgggcgacagagcgagactctgtctcgaaaagaaaaagaaatagtacctgcctcataggttattgggattgaatgagtgcataggtagaaatgagcatggcactcgacaagtcctctgtacttttgattattcgtataactgagcatcctctcttggacacttgatcagtaagttgagtgatcagcagagaagatgacgtgaaaatcaatctgtagcttaattaccttttggtaattgtgtatggtttaatgaaaaaataagtttaaattaccaattgaaataattttggattttctgagtccaagtatctagtctgtgagtctcttatagataattgaaaaataattgtatttaatgaacttctataaaatatctttattttcataaataataatttttgttcttggccaggtgtggtggctcacacctgtaatcccagcactttgggaggccaaggtgggtagatcacctgaggtcaggggttcaagaccagcctggccaacatggtgaaactccatctctactaaaaatacaaaaaattagctggtcatggtggcaggtgcctgtaatcccagctactctggaggctgagccaggagaatcacttgaacctgggagtcggagtttgcagtaagctgaggtcacgccattgcactccagcctgggcaacaagagcaaaactcagtctcaaaaaaagaatttattctctaatacatatttttagtaaattaacatattaaagcacattaaaatgtaaaatgctataaatatctcaccattccagataactggataagtaattgaatgtcttttctctaaaaaagatctaaacaacaaatagcaaaattacggtggtaaagatcaacaataaacgaaacttcataaaacaaaatgaaaaggtcatatagaaaatatttgtaacaaataagagaaaaaaaattaagaccctcctcagtaaacaagcaaatgatacaaattcaacaatccacactgctggaagtatagagaaaaattttttaaatggctaatgtaagtaattaaggaataattaaaactgatggtatctttctgctttttaataccatcaagtagacaaatgttttaaaaattaatactctgttttggacatgttatgctgaaactttatattccatgcaaattgaaaataatttgtcccatatgtaaaggaacaatcacatagctttatctatcttaaagcattacgtatatataaatattaactatgatagaaaaacaataaaacccagaggtattataaatattcaagagttaacagaatggttaaaggtaacaaactataatgtggctgttcagtgacattgtgctttattaaaaattctggtcatataaattgaggcaacagtgaaaatttatctacaattgtatgcatatttttgattgccacaataaaaattatatatacagttggataagaactataaacaaatggtaaatgaaagactttgtttggccagcagaatagtgagcattattttttaaattgtatgtgtttaaacaatgtaaatcatgtttttaagcaaaagaaatgctaactatattctcctccataaatatttgcctcttatcatcagaaaacctaccaaagttgttcttattgttctttttcagaacttccagaaagtatgtgtcttaagtttgactgtggtgttcagattcaattaggatttgcagctgagttttccaatgtcatgatcatctatacaagtatagtttacaaaccaccggagataataatgtgtgatgcctacgttactgattttccacttgtgagtctcttcttttatttaaaatacagtgatatattctcacttattaaagactaaattttttaaaacttaaagttgatggtaaatataaaggaaatatatatatttatatatgtgtatatatttatagtttagtaacactgatcataatatttactaattgccaaaataccttaagtttatgagatttagaaatgtctaaagttcactcaggaaggatgcctctaatttcttatatcctaaacacgagagccaatgtgaaggaataaaatgtgctataaatatgtcaagaataatttccttttaaacagttataacttatattggaaacagtagtttttaagtcttgttaaggtatggtcatatgctggaataatagaaatctagttctgctcttttcaaacatttaggtttgatagttattttacgttggtctaaagaagccagtaaatagtacccctctttcctacatgagtgtgacaaactgagaagcaagcaaggagtaagacaagcagaaacccaaaatatcactttgattactgatagaggctttgtggaggatattgcttcatgtcagagtaaatggtctagcaccaaaccccagaattgagtggccaccccacacctccagtctcagcagtacggagcccagataggcttcctgaggtactgagcaagctgggggcctgtgggcttctcactggagcagcagaacccttactcttggccattgggttggctctaaaagaagaaaaaggaaaaggctgtttatttatccttcttaaatattctaatcatataaatttccctgcaccttcccaaaagtgatgattaagaggagagaatccaggagtcaaacactaatggggctctctctgcttaagaggaaacttgagtagctcaagaagcatttctaggaatcatttgaaaggaagctctttcagagctcactttactttttagatggcttagtacagaattgagaattcctattataaccatagattgttgttttcattgtttagtcctggataattttgggattaccaaaattcacgagaggccagaattcacgagaggatagtatcagttaagatgtcttatgtactagattatattgtggctttcattgatttcattattaacagtccctaatttttttttttacaggatctagatattgatccaaaagatgcaaataaaggcacacctgaagaaactggcagctacttggtatcaaaggatcttcccaagcattgcctctataccagactcagttcactgcaaaaattaaaggttactaccttttctgtttatagctactaatggaaaactttatgaaactggaaacttattttggcatagaccatagatatgctgccttattattaaagtagagataaccagtctacagaaggtcctatcagtgaccctttttatattctgtttccgatggtgaccagaggactttatgtgtgcttaccctccagaatgctaaaaaattagtaacattagagtatattcttttttctttttttagagacagagtcttaactctgtcacccaggctggagtgcagtggcatgaacatgacctactataacctcaaactcctcagtgcatatgatcctgccacctcagcttcccaagtatctgagtctacaggcacatgccactacacccagctaattttttaaaactttttgtggagaagggatctcactatattgcccaggccaatctcaaactcctggcctcaagaatcctcccttcttggtctcccaaagcactcggagtacaggtgtgagcttccactcccagctccatattctacttttaaatatgttcagattttcaagtaatcatttcctagttctatgactagacatatagcaaattagaattttttttccatttttttatttctagttgacttacaaatgagaagctagttctgcacattgagtgttctaatgaaagcttttaatttgttcacaactacatgaccatagaatgtatcagctaaaactcagggaatggaatgggcatgattgagaattacacacataaacctgttgtcatcctgttcggagctcatctacttaaaatcctttcttctcttaaaaagttagcccattatctgattcagttatattttccacctacgattatggattactataatattttaaaaacagcttaagctttttttataaaactggtataaaaccaggtttttttttttgttttgagatggtgtctctctctgtcgcctaggttggaatgcagtggcgcgatctcagctcactgcaacctccacctcccagactcaagtgattcttgtgcctcagcctcccgagtagccaggactacaggcgcacaccaccatgcccagttaattttttgtatttttagtagagacaggtttcaccacgttggccagactggtcttgaactcctaacttcaagtgatccatctgcgtcatcctcccaaagtgctgggattataggcgtgagccaccacgccgggcccagatcattttttaattaaaagttaataccccatctctaataatagggaagggtaagtttcctaagctgcactgcttggaaaatgttttccctgttcatctagagtgtaagaaagatctctttgactttgactactaacagtagtaagaactagaaattctaaatgggttgtaagtattgcatgaaggaaaaggaagataatgatagctggcgtttctcagtttcagggagatataaaggatgccttgaggatttggaacctgggaaaggagagtgagtggatttttgggggtgggggtgtgtatgtgtgaatattttcagattgatatatattcactgttgatgccaataataaaccagatttttttccttttcaggaacatctagtcttcacagtatgtttatcatatcagtactcaggattggaagatactgtagaggacaagcaggaagtgaatgttgggaaacctctcattgctaaattagacatgcatcgaggtttgggaaggaagacttgctttcaaacttgtcttatgtctaatggtccttaccagagttctgcagccacctcaggaggagcagggcattatcactcattgcaagacccattccatggtgtttaccattcacatcctggtaatccaagtaatgttacaccagcagatagctgtcattgcagccggactccagatgcatttatttcaagtttcgctcaccatgcttcatgtcattttagtagaagtaatgtgccagtagagacaactgatgaaataccatttagtttctctgacaggctcagaatttctgaaaaatgacctccttgtttttgaaagttagcataattttagatgcctgtgaaatagtactgcacttacataaagtgagacattgtgaaaaggcaaatttgtatatgtagagaaagaatagtagtaactgtttcatagcaaacttcaggactttgagatgttgaaattacattatttaattacagacttcctctttctaagattttgtgaattggttgaatagttctatacaaatgaagtatggaggtgtgtatgtttatatgtatataacaaaatattttcattgtgaccactctgaagtaagagcaatgggaatggcat

SEQ ID NO: 15673 - DNA, 66728 bp, Homo sapiens
tgcctagacctggagcagtgttctcttaaggtactggagcctgaaggaagccccagcctgtgtctgctgaagttaatgggtgaaaaaggttgcacagtcacagaattgagtgatttcctgcaggctatggaacacactgaagttcttcagcttctcagccccccaggtaggttttgttcttaggattattctccaggagttcatggagccaaacttagaagaaattatctcttttgaccaggtgaactgtgttaagtatttttggaaaatgtaaatgtgtagtgccttgtttgctttcccaggttgaagcaaatgcaatgcatgaatattggttggattgtggttgaagaaaccagctacatgagacatttttgagatagttggaaaaatttgaatgtaactacatatttgatatattaagtaattatcatatgataatgatactataggagaatgtcctttttttaaaaggagatgcattttaaagtatttagggagaagattcctatgacatacattggaatagtgcagccaaaaaaatgaacatatatttattcctatgtatttatatagatgaagtaaagcaagtatgacaaatgtttaagtttttttttgccgcagtgaggcttttgaatgttgattaactcaaccttgtactcttatgagtttttcctgaattaccgatattggatgaggctttgtacttcccacatcaggcgaggcttaggaaacagtccctcttctccattcagctgctctcctctcagctgcagatagagttggtctacagcagtggtggagggcaggagggacatgccattgaagttgcctggttgtggcagcactgcagacctccttctttacctggggatccagtgggccattatttgtcccacaggaagcaaagaggctggttgagcttggaaaggcaggttgagcttggaaagacaaaggacctgatgcactctattttacgtggttttgatgtataccatttcaatatataaccagcttggttatgatatatttttaagttaacatgaggaacttaaaaccataaatgagatgttattttttattgttagttgtgggatagggaattaggaacacatggtatagtggtatgctgtcagttacatgtaccagaaaccccaacccaaataggcataataaagagaatacatttctccttctaattgaaaagcttagagcaggtttggcttcaagagaatcaaggaacaatcctgttctcaacgcattggttggtttttgtctttgctcttcctttcttggcattggcttccttccatgactgactctccacatagcgcaagacgtctgctggctttttctgggctccttcattcttgccccagcaaaacccagagggttcatctagttaactagcttcggtcaaatgcctagctcttaacctgtcactgtgccaaggagatggaatgtgctgactcgcctggcttgaagccaggagtggagttgggttgagtctgctttcctggaaccacatggatcaccaaacaaaattgaaactattagaaggaaaaaggaagtagcagatactggggaggtaaccaaaaagtttactacaaatggaaagggccctggattataaataaggagacttggactcccaatcatcccctgctttacaaggccctctgtagatggtaaaataggcctctgataaatgccctatgaatttgatacacactgtattggatgcttgctttctatttcccagcgcctcttcctaccaacagggctggggtgggaataactagctgctaatgccaccctcccaaatgcaactgttgtttggcaccaaacagtaaactttcttttttaaacctggcccattactgatagaaacagtagagttcctaaagtggtatttattaatttttatattgctggtgcttgaagtagcacccaagagttgtgacatttgaaatctactagtctaggtttcatactgttaaagtccaagttctcatacctagtaaagtctcatacctagtaaagtctacttttgcttactttactaagttctcatactttattgaataccagggcctctgaaagcttaggaaacctttctgggaagtaaatataacatgtatttcattctctttttcaataattatgcttaattactctaaccgttatttgccaagtctataatatgaacataagtattctctacctcacagagttataggagctgcatgagataatgttgtgttgaatttcatctatacaatgacaggggcctcatatctcttttgatttgtgttgtgatcactggcctgagagctagggtttcggaatttttaagtttcccatatgtgaaaccgggcttgactgaaattgagtcatatatttacttaggtgtaacaatttgcctgaattttaaaaataacacaatattttatatttttatttttgacaggccagcaactaataaagtgccaccctaataaacattagtaatcttcctttgaaaaatccatttttgctctttgtgtttttctccaaataggattagcacttttctatcagtgttccccagtgaagattatcctgatgatatttggcttacagactttctcaagattatctcatagggcttttttgcatttgaggagagaataggaaaggaaagcagtttatttttttctttttgtttttaattttctcttcagtacatttgtgagctgtagggaaatattatttgttttattttgttttttaaattttttgtgataaagggtcttgctctgtctcccaggctggaatgcagtgatatgatctcggctcactgcaacttctgcctccggagcctcaagcaatcctcccgcctcagcctcctgagtagctgggactacaagcacgcaccaccatacccagctaatttttgtatttttggtagatacggggttttgccatgttgcccaggctggtcttgaactcctgggctctaagcagtccacctgccctggcctcccaaagtgctgggattacaggcgggagccaccgccctgtttctgtgttaccacttgtgcactgtttctgtgaagttttatgtcatgttagccgtataatatccttaggaattggttgttgcttgaatgttagttattgatttaacagcaaacattttgagatctaataaagctcagtaattttaggaagaagtaattaatttgttagcttactatctgcatctaatatgcataatctaagatttactcttttttttttttttttttttttttgagatggagttttgctcttcttgcccaggctggagtgcaatgtcatgattttggctcaccgcaacctctgcctcccaggttcaagcgattctcctgcctcagcctcccgagtatctgggattacaggcatgtgccaccacgcccagctaattttgtatttttagtagagatggggtttctccatgttgatcaggctggttttgaacttccgacctcaggtcatccacccacctcggcctcccaaagtgctgggattacaggcgtgagccactgcgcccagccaacttactctatttatagatagtagaataaagaaatataagaattacagagaagaattttaatattttaataaagatattgagaataaaaactattttaattatattaagaagataagctctgatagaatcaacttaattggtggtttgcctcgtgtattcaataaagtttactgtattgcaatgcccttgctgtgctaggcattatgctaggtactgtgagtttagagatgaataaaacaatcgtttccacctgctgataggtcatagtttagtaggggagacaaacatataaaagatcatatccaagacagttgtaaaaaatatatatatatagtaagtttatctgatctccagttttctctctttgctatattcttgagtcttagtgaaaatacaaaatagaaatattctaatgttttctctcttttttgcattggtactatttcataggaggacattacttcttattccacaggaagtctgatgattttcctctgtccttacagagagaagcctggtttgggttatgctgtgaactggcctttgaggtctaaatgcagggagatggggaaactttagatttattttgattaaacgagaaactatagtcttacgttgccatattctgttccaagtgacggtggaacaacagtcagaggtagctctgaaaggtaactgtaactgtcatgtggagtttctctgtcttttgagaaactgaccaagtttcttttctggatttgttttggtgcccagaaatagctagagcagtatccatgcatctctaactagagcagtttctgtgatgaggacccagcttcagcagtcactcagcatgtagtctgagtgtaaactcactctggaattataattttatatattttgtgaaggagcctcagaggatcgaggtttttactctctgttgctttctttcttgtcgagcatttccactgcacatgggttggccaacttgcccctcagtgtggtcttacttgaattatatgatagagaaatcgcttctagtttttatttgtggatggtgttcatcccattttccagcgctagtaaattgtttccctacttttattcctttgctcatctcagtgggaattgtagaagggggttaaatggatgtgttgaaagggttttgaaccaaaggtctgtaatgatttttttttttagatcttatttaagtttcaaagactgattccaaagcaaccaatattgacatctgtatagatagacttagatgtgtagttcaaggtgcttttgtttcttttgttgttgttgttgtttgtttgctttttgagtctcactctgtcacccaggctggagtgcagtggcgcgatcttggctcactgcaacctcatctcccaggttcaagcgattcttctgcctcagtctcctgagtagctgggattacaggcacgcgccaccacacccagctaatttttatatttttagtagcgacgaggtttcaccatgttggccaggctggtctgaaactcctgacctcaggtaatccgtccgcctcggcctcccaaagtactgggattgcaggcatgagccaccacacacagcctatttgtttcttttgttttaagtgaaaacattgtgagtgtagaattataggcttcatcagtcctagttacatacatcacgaaatggttgcctggagaagtgatgcccttaacctggaatgggcagagcagaggctgaacgatgggagctgtttagagagaactagcattgttgatgtggatctcattaagatgaatcccaagttgcttttcagctccagtgctgcaatattgccattttatttcactcttcatatgaaaggtgcctcactgagggtacctatgagatgtctgtggcagggtcatgtgccatcttttcagtggcaccttttccatttgcctctactccttttttatttcatacctttttttctcagatccgttgtaacatacgcattgttatgttttggctatttttattactttatctctaaaataagtgcaaaggttgtttaatgttattctttagtttctaaaatacctttacttcacattttatcttcacaattctgtgaagcgacagaacagtgctattgtgaacatttaaattttaaccaacaaacatttacatggaaaatgagatttccaaaagtgatcatttggccaaagtcacaattattgacaaaggtaggattaaaaaccaggtctgctgaccctgacctgaactcaataccatttccataatgctaggaaatttctgaattaagaaacttagttctgtattattacctcagttgcctctttgacccatggacttcaatttttttcttcttgccaacttaaaaagtgctcaaagactggatcttatttgtaagggacttttcttatttcatgaatatgaggaaattggcaattattcctaaaagaaaaatatcaagaagtgaaaagagaaaaagatggtatggatgtgcatgaggataaggaataagtagagggagagaaagggctggtgagcaaggcctgaaggaatgtctttctggatgtggagtgtggaggggagtctcaggcaatgtaacagaataagggatgtgatgtgggaaactagatttagctataatctatacagatttcaattgacatgtaagagaaacatatgtggacatactttgtgtaatgccgtaggagggacacacatggacctactttggttatatactgggggaaattgttagaggaagaggaatgatatttatttgggcacactgtagggcatgtgggtactcttctgtgatagcatagaagattgcagagtaactttgaggacaagttttagatggaagttgataaaaatctttttttgtttcatggcctctgaaagtagatggacttcagtgtatggaatagatctgtttttggaaaaagtatttattgataaactacatcaacatttaaatgcgtcgtgagagagaataacttcaagggaagctatgtgtccttttgtcaaaaattatcctaatttatctttcttataatttcagcagggttttaaatttttgttttattgcttaatagcatgtacttgtttatcggcatatgtgtgtgtagttgaaagcacgatccttggttccatcgtacctagtcacattctcccaggcttacaggaaatcaagtaacttctctgacttctttgtagatgttatctgaaaaatatgcttgtttaccaggaagctgtgtgttcaccgtttaaaatagaactttcatttgtatgccttcgtacagcctacgtagcactataccatattctttttttacctttgttcagcaccttctcactagtgggtgctgcattggggtggctaagggttgaccatgggtccctgtcgcacaaggctttgtgggaggaaggaaatttgtgtggttaaaacatgggaggtattgcaactcattttcttgactattcaccaggggtggtttccaaatcacattttgcctttcaattctcagtctttgaagcaataaattgtatatatatgttacacacacacacacacacacacacacacgcttattaataaagttgttggtgcaggacaggcttataaactgttaatttagatgtacattaaaagctactttgtcttggccaggcacagtggctcacacgtgtaatcccaacactttgggaggctaatgtaggaggatctcttgaggccagcagttccaggcaacatatgaggccaacctgggcaacataatgaggccctgtttctacaaaaaaaaaaaaaaaaaaaaaaaaaaatactaattttaaaaatcacttagtcttgtgtcccatacaaaggaaggataacttttagaacctggccatatgatccctttccagtagtcacctgcttctttgtaagatactctagaggaaaaaccctttccatccttcttgtctcttatctccttgtataatggcagagaatatttgccatggtatattcatgagccgtgtcctggtgtgggattgctctttgtgtgatacactttctcagtaaggtaggctcactgtggcagaaagcgggattaccgtgggagatatattgagaatcaccaagaggccggtcatggtggctcactcctataatcccagtgctttgggaagctgaggtgaggtggattgcttgagcccaggagctcaagaccagcctgggcaacatggcaaaaccctgcctctacaaaaaatgcaaaaattagccgggtatggtgatgcacacccgtagacccagctattgggggtgctgaggtgggaggatggcttcagcccaggaggttgacactgcagtgagccctgatcatgccactgcactccagcctgggtgacagagtgagaccctgtctcaaaaaaacaaaaagacagaatcactgagaaagcaaaacataaggtttaaaacctttaaaaggcaagaaaacctaggtttgcatcctggttctgccattttacaatgtaaaaaaaaaaaaaaagtctcagagagtttaatttaccccaggtaatttgggtgaccttctgcaaattacgtacctttttttcattgtaacatagatgtaattagtatctaccttgtgtggttatttcaaaggttagtgataaaaatgcctggtgcatgtaaagcagtcagtaacttgctgctgtagtaatttctgttattattatatatattcaacaaacacgtgttgaacacccactaacacccactgcagtgccatatgtgggcacaattctaggtgctgaatgaactggtgactaagaccatcaaggtccttggccttgccctcatggagcttctattttaatacctaagacggacagtaagaaacagggattttagagagtgaaggacactgaactgggtgaatgtaatagataactggggggtgggagggtacctaatttagagacatttcccagagaagctggtgatattttagtaagaaacctggatgatgaggaaagagcctgccatgaaacagtagaatagtggaagccagtggggtggcggttgcgggggatggcaaagcggagcttgtggggagaacccagcagaggactggtaagtggaaaggcagaaaagagcttggcttatagaaggaaggaggcccagtatggctggagcttggtgagcctggagaagagcggaggggccaaaggagcagttcgtggaggactttgtagccatggtaaggaatctggattttttattctaagtacaggcacactttgttttattatgcttcactttattgcactttgcagatacttcactttctgcaagttgaaagcttgcggcacccatgtgtctagcaagtctgtcagtgccatttttccaatagcatgtgcctacttcatatctctgtgtcacaccttggtaactcttacaatatttcgaactttttcattatatctgtcgtggtgatctgtgatcggtgatctttggtgttactactgtgattgttggtgcctggtaagatggtggcatccaggtggcggtcttaagaccagatcagtatggtgttggtggtcttaagaccagatcagtatggtgttggcagatcagtatggtgccgctaggcaggcactgactagctccaggcagctcaaccttgggagcttcggggccccgagaggtggagcctgtgagtggggcatgcactccatgtggaagccagagcctcctcccctggatggagtgtacgagatccctggaccggagcccatcccctctgtgagagagatgtacttcacgcccgggctgccaccgctgatcttcctgccctgggaccctgggtagaaacacccaaaattctgttcaccccgttcacgaccctgggaccctggctcgaagcacccaaagttctgctgctcaagctccattcacgagcagccaccatacaaagaccaggcctgctatgtctttcaccagcgttgccgccttctcaggggtgtcaagcaggccctctggcttaccgaggccaagttaataaaatgccttcctgagaaagtacttggccttgttgatgatacaaggaaccacatagagaaccaagatgagcgtcttctgaatttgatctctcatgcctgtctctggcactgtactgagtacggccccaggagagaggcctgctgtctggtcattgtggacagtctgataaagttgtgtaagtctcagattctcaggcatccttctctggccaggcagatttgtgcccaaaactccacgttatccaccacctggaattgtgtctgttcttcagggtcatggttctagtggagccggctgagtgccaaggatcctctgcccccgccatctcctccagagaagaggttgaagctactaaaaatcatgttctcgaggccttctgtcccctctccccactactgatcttcaggaatgcaatgtttctgatgtgaaagatgacacaggattctgggagggctatccttacccctatctccatatcctgcacttcctggagaaagccgatttgcaaccacatagccttcaaccagatcagctgtgggccaagatgatcctgtttgcttttggcattgccctggctcaggcccagctcctctgtggcaatgacaccaagatctcggagcagcccgtggttgtgcagagtacatgcacagacggacgtgcattccatttcctggtgttacagtagaacaccacagacctggcctcttaacaagtgtggcaagagtttggtctgggtggaatcatgccagctactctctcagcatttttggtgtctcccagtgataaaaaagaaggtgggaccgggcccagtggctcgcacctgtaatcccaacactgggagtctgaggtgggtggatcacgaggtcaggagatcgagaccatcctggctaacgtggtgaaaccccgtctttactaaaaatacaaaaaattagctgggcgtagtggcgggcgcctgtagtcccagctactctactcaggaggctgaggcaggagaatggcatgaacccgggaggcggagcttgccgtgagccgagattgcgccactgcactccagcctgggtgacagagcgagactccgtctcaaaaaaaaaaaacaacaaaaaattagccaggcatggtggcacgtgcctgtaatcccagctactcaggagatggaggcaggagaattgcttgaacctgggagatagaggttgcagtgagccaagatcgcgccactgcactccagtctgggcgacggagcgagactccgtctcaaaaaaaaaaaaaaaaaaaaaaaaagagggtggttgtggaatgcgttgggctgactggtttccagtgggagacatccaggaagtttttagctctgtatttacatggtgctacgtgagccaaggaccattctgaggcccgaaacccacctttgccttctcccactgaagagggcctggggtccccctggagcctcagtgctcatctagcctggtggtctcactgacaataaagagcccttgcattgcaaaggaaaaaaaaactattataattgttttggggtgccacaaattatgccactataagaagttgagcttaattgataaatgtcatgtgtattccaactgctccaccgactggccattcctctctctctctctctctctctctctctcactctctccctccctccctccctccctccctgtccctcttcctctcccacctccccactccctctttgggcctccctattccctgagacacaacaatattgaaattaagctgattaataaccctacaatcgtctctaagtgttcaagtgaaagaacagtgacacacaacaatattgaaattaggctgattaataaccctacagtgatctctaagtgttcaggtgaaaggaagagtcacatgtctctcactttaaatcaaaagctagaattgattttacttaatgaggaaggcatatcaaaagctgagataggctgaaaagctaggcctcttgtgccagttaaccaagttgcgaatgcagaagaaaagttcttgaaggtaattaaaaatgctacttcagtgaacacacgaatgataagaaagcaaaacagccttattgctgagatggagaaagttatagtagtctggatagatcaaaccagccacagcatgcccctaagccaaagcctaatccagagtgaggccctaactcgcctcatttctgtgaagacagagaggtgaggaagctgcggaagaaaagttggttcatgaggtttaaggaaataagctgtctctgtaacataaaagtgcaaagtgaagcagcaagtactagtggagaagctgcagcaagtcatccagaagatctagctaatgccaggcatggtggctcgtaattgatcatggtgtctataatcccaccactctgggaggccagggcaggaggattgcttgagcttaggagtttgataccagcctgggcaacatggtgaaaccccgtctttgcaaaaaatacaaaaaattagccaggcacagtggcacctgcctgtagtcccagccactcgggaggctgaggtgggagaattgcttacacctggaaggcggaggttgcagtgagcgagatcatgacactgcactccagcctaggtaacagagacagaccttgtctcaaaacaaaaaagcaataaaagatctagctaagataattaaagaaaatggctataataaacagatttttcagtgtagatgaaacagccttctattggaagaagatgtcatctagaactttgatagctagagagaagtcagtgcctggctgactcttgttaggggccaatgcagctgacaactttacgttgaagccagtgcccatttaccattctgaaaatcctagggcccttaagaatgatgctaagaaactgcaaagtttttgtcctgagtaaccagatggatggtggtaggcagtaagactggtttaccatctttgagatggggaaactgtggggactggcagaggagtagattttgtgtcagaagggatttgggacatataaaattggtggtggctataggacattcaaatttaaagccaggatagccaaaactcctatattttttagatttattacttgttctcttttgtcattgttgcaactttttcctgtcacatcgaaacttgggaaatcagaatctttgtattttaaagttgtgatgtaaaactctcctggcagatgaatggtaaatgtggggacattaaaatacagtgttatgaatttgctggcttcagcaagagtgcttatcccattttccacctttcctaccaacatgtatcacagatttcagaaaaattctgaacttcatccgtcctgtactaacttggcctcgacataaaggattaatgaatatgaatgtcctcccttggcaagagtttaaaattctgagaggctctactatatttactaaagattttctagggcttctcgaggccctcaaatgtgctaggtatacaataaatatttactcatttttaattttgcttttatttagtatctttgtgctgtgactttcatgaacattattttttttcctagaaagtttagtacctttgatgtattaagattactgttatttacactgtttcctttttacttgtaatcttgttttgtttctttgcattggtgggtggtagaagaaaaagacactgttatgaggtcacattcagtatagacaaggaaagaaaataaaagtaggtgcaggaaattaagttttataagttttaattatctttttctttacttcctaaaagccagctaacccagttttattaattacaacttttgcaaatgtaagcttttctagctttggtttcttttatgtcagttatctattgctgcattaataaattacccccaagtcagaagtgaaaaacaacaactgtttattatctcacacagtttctgaggctagtagtccagaagtggcttagctgggtagtcctggctgagggtctctcgtgaggcagcagtcagactgtcagccaggtctgcagtcatctgaaggtttccccagggttggaggatcttctcagatggctctctcacaggtgttgtcaagagacctcatttcctcactggctgtggcgggagatctgtttctttctgtagagatatggtttggctgtattcccacccaaatcttatcttgaattcccatgtgttgtgggagggacctggtgggaggtaattgaatcatgggggcaggtctttctctgctgttcttgtgatagtgaataagtcttatgagatctgatggttttataaaggggaggttccctgcccgcaccttcttctcgtttgtctgccgccatgtgagacatgcctttcaccttccaccatgattgtgagtcctccctagccacgtagaactgtaagtctattaaacctctttcttttgtaaattgcccagtcgtgggtatgcctttatcaggagtgtgaaacagactaatactcttaccacttgagcctctctgcagggctacctgaatggcctcctgccacagtcatgtgcttccctggggcgagtgagtgagagagaggcaagagaaggagttgggggtgttccattattgactaggattttcttccaaattcctgtcaaaagtcttccaagcttagatgttggcagttattcctcaaatgaggaatgtttgtgtcacaggtatatcaaatatatatctcactgctctgtttctgtgtctttctcttccaaaatcattttcatttcaatactaaataataatgcagtcatttgaagacgttttcaatggtgttgtctttgtccattgcatgcttccataatacagtaccacagactgggtaatttttaaagaacagacatttatttctcacagttttggagcctgggaagtccgtgatcaaagaaccagcttctgatgaaggttttcttgctgtgtcctcacatggcaaaagagagagaacctacctgcaaaccccgttattacagcggcattaattcattcgtgagggtagagcctcccgctaggccctacctcccaacattgttacattggggattcagtttccagcacatgaatttgggggcacatattcagacaatagcagacattgcaacttaacacgtctgttactaacagtgcacgtaacttgactgaagtggcagccatatgagcatttatgaccaaacatttccatgagctaacactgagaactaccctgtggctgtgcctgacaggcatctgttataaggtgcatcctgatttcagaagtgttagaatatgggggaaaaaagcttctagaaattgaagaaatatggtaaataattttctcccccacccaatcatggggaagtacaatagatcaaagtcttctgcaagtaagtttctttcctctgattttacaaaagctgcaactcacaaagtgtaaattgattgagaaggagatgtgaatgagtgatttatgacaaagataaatatgcaagttatttctaaaatgtttcaatttttggtttcagatgtataaacaaggaaaatccctcttgtgactttaattttttttttttttttttttttttttaggaataaagattactgtaaacccagagtcaaaggcagtcttggctggacagtttgtgaaactgtgttgccgggcaactggacatccttttgttcaatatcagtggttcaaaatgaataaagaggtaattttttaaatatatcttttaattcttccaaggagagagaatgatagagaattaattaacattatcgtcctaaatgtagttttaacagtttggtaaaagagtctgatagacattgctaggttattactgaagtagtcaatagtcattattttggtaagacagttccagaattgtctcatgaaaacattgtaaacaataatgaaattagttctccactctaaaaattgtggaaaatagggattacttagggcagcagtgttagcgagtataaaacatcaccagtacattcttgtgtatacaaactcttcacaacagattatgttccaaccaaaatctttaaaagattttcaaggctatatggaaagttaatgtgctattctttttaagaattccacatcactgttttatctgtatcagaagatttaggaccttgtggtagattctgaagtaaaattcagatgggcagaatgggccatttattccttttgtgaaatgattggatccctgcagcacccaacaaataatttaaattcacattttagaattctcttttcttcagagttccttgagccatcttgcactggggatttctcagtgggctggctgcctgcattgtgtcccacttctgtgggcttttatcttcgatccccccatccctctctatcctcctcccacttccacagtaccttgaaagtccatattcttttcactctgttagtcccagtaattcagctttcttccaaacttgatgtcacgtctccctttgcaaatctgaaactaaataaaagctgttctgagaatgacttttcctttaattggattgcctcatactgtaggtgaattctgtggttttatacgattttgtttccgtctgttacacagaggtaagacagagcaactgtggaatgtagtaaaaagattgcatgtagctttggcactagataggtctgtgttggaactctgactgccattattagccatgtgaattcctatcatcagaggttgtgagaattaagtagacaggatgttttacgtgcctaggctcttgaaagattgcacctaaaggtatttttttatcatattttctcaattgcaaagttactttcattttattaaatgccctttgaggagaaatagtggaaaaaccctactacattaagtatatcatttgtaagctatgtcctgattggaaaaaggtagaaatgtaggggatggaaaatgcatcttagagttgaagagttgtaatggattttaaaactcttaagttttgtaaaaccacatgatcataggagtattgtaggagatgtttacttaacaagtgcttgttgagcacctgttttgtgccgggccatgttctaggtgtgatgatacagcactgaccagaaggtctctgccctcaaagagcttacacgccagtggggacagagcaagtactgttaattcctgtgagttaagagctatgaggaaaatcaacagggtggcaacataatatgagaagctactaaggttttaagcaagggaagtaacatggtaggattcgtggggttttttgttgttgttgttgttgttttgttttgtttttttgttttttttttgagatggagtctcgctctgtcgccaggctggagtgcagtggcgcgatcttggctcactgcaacctccacctccccggttcaaacgattaccctgcctcagccttctgagtagctgggattacaggcgcgcatcaccacgcccagctcattttttgtgttttaggagagacggggtttcaccatgttggccagggtggtttcaatctcctgatctcgtgatccgcctgcctcagcctcccaaagtgctgggattacaggcgtgagctgtcgcacccgactaggattcatgtttttaaaacataaacttgcggcttgaaggaagcagagaacagcaaggtgagcagttgtcttaatacctgtgcttgactggaagtagcagtagcgtggagaagagaaggtggatcacagtgcataattcagtgtatattttagagagagtcaactaagctgacagattagatgtagagcatggggagaaggaagagaaatcaaggatgaccccttaggctttccacctgagcatctgagatgtgttatatactgaggtgttgaagattggaaaattaattgacagaagacagattaacggagaaaaagcttatttgtgtgcatgcaagagctttcagaaggagtagcttgctaactggttaagttatgtagctaatttagtagggaaaggcaggggccctgtgagcataatggatgggtttcttcaggaaagacaaaggggagaagaacaagggaagatagcaaagtttgtggtaatgttgttcatgcaggcaccagtggtatctcctcttcattgtgaccgtaaagtccccaaagagagatttatggtacttttactcttggtctgttgcctgggggtaaaagctgccccacgagggaatttatggcagcctcatttcccagaactttctgttttgggtcagataaaggaagactgagaagacttctttctgtatctgttgagtcccagatgtcttcagtttaatataatcttcataccaactcaggggttctgagtgggtctccacagatcttcagcccaagtagcctttgttaagaggatacatcttccattttaacaggagggaacagagcagttataaataagtacagacatggataggtttgtgatttgttggcagaaaaaggaggtaatttctgtctgaagtcagtgcctaagagaactaggattacaggaagtttgaggaaagagtatacatcaatagtctagaaggaaaacacacttaggacgatatagtaggattgtcaggcagttgtaagtgcagcctgtcatcccagttgtcacatcctgagcaaaatactcttgctttggtgtaggtactgaaaggggagagagtagagttcagtaacttggggtttggagagggaggaggtgagcttgttaaagtacaggttgaatatcccttgtctgaaatgcttgagaccagaagtatttcagattttggattttttttaggtgctgaaatatttgcattgtatacttaaaagttcagcatcccaaatctgaaatgttccagtgagcatgatggaggtgctcaaagagttttgaatttgggagtatttcagattttaaatcatcagattaacctgttctttgcaagggagttattgtaatgaggcacttgagtaagccccttggcaatgtgccaaagttgggtgtagctgatcaattgctgggagcagaaaaagcattaataaaagaaaccttactattggaggtggggactgtggatggccatcccgtcttactgtctcattgatatgctttccatagctcttctctgtctagaccttgaaggagattggatattgtttggttaaggagtttatcctcttacagaattttgcagatcagaaggtccggggtctcaaggtgaaataacttgcccacgtcttcccagctaatgtggtcagagctgaaagcaatagccaagcccaattctctgtgttttctctatgccgctgtggtgtttgtatgttgtatggctgctaaactcataaatgttgcagttgtagattctttcaatactcagtgattgatctcttaaatgccagagcaaatagttttctgttagtgagcctttggaagatgtttgggggccagcttaactctctggtttatggatttgtaaaagactggatttttaatacttcagtcctaaataactcaaagcgttactgtttttaactcagaaatgttttagaacttgggggaaaaatgttgcactttcaaagcttcatactgaaatcatagattttgtacagcatattttataaggtgtgtttttgatgagtcatccacttctcttattgattctttcacagattccaaatggaaatacatcagagcttatttttaatgcagtgcatgtaaaagatgcaggcttttatgtctgtcgagttaataacaatttcacctttgaattcagccagtggtcacagctggatgtttgcgacatcccagagagcttccagagtaagtaacgaaagaagctgaatgttgggatggggattccccatattttattttattttaaatgtttacttttaaacaatttcaaagtatcaaaaaacatagcaaaatttcacataggtacttcatccattataatgtcaaccattgttaagatttgatccatgtgttttgtctttcttttttttttaatttagtttttggttttgttgttttttaagacaaagtctttttgttgcccaggctggagtgcagtggtgccatctgatctcagctcactgcaacttccgcctcccaggttcaagtgattcctcttgccttatcctcctgagtagctgggattacaggcacatgctatcacacctgggtaatttttgtatttttagtagaagtggggtttcaccatgttggccaggctggtcttgaactcccgacctcaggtgacccacccgcctcagcctcctgaagtgctgggattacaggtgtgagccagcatgcccggcctgctttaattgtccttctgtgtgtgtgcgcgcacgttcacacatgcacacacacatatatgtgtgtgtgcagatactttaggatgacatagacaggcctcagtctggtcgctgccactgacctcttcaagtttgccttccttcatgttccattactctgccctcacacacggcacctatattcaacttcgtttctccctgctgcttccatggtctcgaaatgtcttgcatattcacactccacatctttgcgtcacttcttccttccatcttgaataccttttctgtctgtcatacttttatgactctttcaagcctcagctccctctgctgccttggcattctgattttacctctattatagaactcgttgcattgattttgaaattatttgtttgctagctgtctgagcagtgtagggataaggagttcccttttctctttctagttcttagaacaaagcctggcaggtagtagtcgcttaccagttatgcaattcattgaccaccctcatgaggcacagccttgggcttcgatgttacagctattttaaactaagcatgagagagagcccctgaccccaaactacttacacaactatcaggaaagattatctgctacaacagaaagcaggaagactttcttgctaccacctctttctcccaaaagttaatcttttgaacgtatttctatattttggttgtttgtgttgtcaggcttgtctccctatctaactgaactcctgaagggaaagtctcggtcttaataatctttcgtaaaaacaaacactcaataaccaatagcactcagtagatgtttgttgacagaatgaagaaccagggtgaattctgtttaacaaagtagagacggaaatatttccatcaaaaacatttaatattcttacatttaaagcacaaattcaaagctacctaaaaatctctgaaggattcttgatatctagaacacttccttatttaagaaacagattgtggatctggcatggtagctcacacctgtaatcccagtactttgggaagctggggtgctggggcgggtgaatcacttgaggccaggggttcaagaccatgctgggcaacatggcaaaaccctatctctacaaaaaaaatgcaaaaaaaaaaaaaaaaaatggggcctgatggtgcacacctgtagtcgcagcaactcaggaggctgaggtgtgaggatcactcaagcccgggaggcggaggttgcagtgagctgggatcacaccagtgcactccagcctaggtgacatagcaagaccctatctcaaaaaataagaaaaagaaacattgtgaaactaacatcatggaaaaatgctatttcctgaagttactcttactcatgaatactaaatatgatcattataaaaagtagatcagtagataagcacatagcatttgagacctgatagtcttgagttctataattaggatatgaatcaagaagaggtcagtttgttatgaatttgaatgttgtggtcttcagttttgtaggagaaaaaactctcatatagtagtcttgctgctcacttttcaattcttttccataatgcgtatttttctcccaaactattgtattgctcctaaaaaatgatcttgtggaaaaaaactctagcgttgatgtcagcactaaaggccatgtagtgagtgtatcattcactgcaaggaaacattcatcagactgctttgctactcactctgctccatctttttagtgcaataactagcattgatcaagacaaaaaaccagtctcctctaaagagtagttgtcagatattattttgtttatttggtgcacagtcaagaaccatgttctttgttgtatttgctggacaaaaagaaggatagggaggaaaacactttttgttaaaagagttaaaatgctgctgtctcattcttttctctcactttagtcttccgtaaactcaaatgacgttaaggttgttgagaaataaaatatcggtcaggcgcaatggctcacaccagtactcccagcactttgggaggccgaggcaggcagatcacgaggtcgggagtttgagaccagcctgaccaacatggtgaaaccctgtctctactaaaaatacaaaaattagctgggtgtggtggcccgtgactgtaatcccagctactcaggaggctgaggcagtagaatcgcttgaacccagggggcggaggttgcagtgagccaagattgcaccatggcactccagcctgggtgacagagtgagactccatctcaaaaaaaaagaaaatatcaccattttctttaaataaaaaatacctcatgcacctctgcattagcccattctcacactgctatagaggtactatctgagactgggtaatttataaacagaagagttttaattgactcacagttctgcatggctggggaggcctcaggaaacttacaatcatggtggaaggtgaaaggaaagcaaggcatgtcttacatggtggcaggagggagagagagcaaacaggggaaatgccagacatgtaaataaccagatctgtgagaactcactgtcacgagaacagcatgggggaaactgcccccatgatccaatcgcttcccaccaggtccctccctcaacatgtggggattacagttcgagatgaaatttgggtggggacacagccaactcatatcaacctttctcaattttatttaacttttttatcccattttttattaaggggtaatttatatacagtacaatgtacagatacgtgtacagtccagtgagttttaacatatatataacatgggtatatgtacccatttaacatatatatagtcattgaccagtctagatattttatattcagcttcttccactcagcataatgtttttaaaatttactcatgttgttcagtgtatcattaggcagtcccatctttttgctgagtaacattccattgtatggattgactagtttgtttattcattctcctgttgatagacatttagtttgtgtccagttttggaatattatgaataaagctacgatgaatattctcatacaagaccttttctggacatatgttttatttcttctggatagttacatagaagtggaattgctgaatcctagagtagatatatgtttaatttttcttaactgccaaagtttccaaaatagtttaccattttgcattaccaccaacagcgtataagatttcaggttactcgccccatatcttggccaacattggttgttagctcttattgatgaattaagcttttggtcattatgaaatgctcctttatctctggtaatcctctttgtcttgaagtttactttgtgtgatactaatatagccatggaagctttcttttttgttttgttttgagaaggggtctcactctgtcaccgaggttggagtgcagtggcacgatcatggctcactgcaacctctgcctcccaggctcaaatcatcctcctacctcagcctcctgagtaactgggaccacacacatgcaccactgcacctggctaattttttgtatttttggtagagatgggatttcatcatgttgcccaggctggtctcaagcgatccgcccacctcggcctcccaaagtgctgggattactggcatgagccaccgcgcctggccagaaccatggcatttctttcataagcttttttgtatagtatatgtttttcattcttttagtttggaatgtctttgtttaaagtttcattttagatgacagaatacaggtaagtgttgctttttgctctagtctagaaaaaagtctctttcaaggtgtttagtccatttacatataatgtgattatgtttaagtctgacatcttgatgttcgttttcagttagtctcatctgttctcttttgatcctcctttcctgacctcttttggactgggattacaggtgtgagccaccgcgcccggccaaaaaagcattttttaatattccattttatctcctttattgactttagctgtgtcttagtgttattttttagtggctgttttagagattacagtatgcctctaacttattgtagtaaaccttctacatattctaccttaaaatataagaaccttatatagtatactttcattgtgccccccattgtatatttgttgtcatatattttacttcgacatttacttttgagcaatcttgtaaaagtacgtgtgtgtgtgtgtgtgtgtgtgtgtgtgtgtgtatttatttttattattatactttaagttttagggtacatgtgcacattgcgcaggttagttacatatgtatacatgtgccatgctggtgcactgcacccactatctcgtcatctagcattaggtatatctcccaatgctatccctcccccctccccccaccccacaacagtccccagagtgtgatattccccttcctgtgtccatgtgatctcattgttcaattcccacctatgagtgagaatatgcggtgtttggttttttgttcttgcgatagtttactgagaatgatgatttccaatttcatccatgtccctacaaaggacatgaactcatcattttttatggctgcatagtattccatggtgtatatgtgccacattttcttaatccagtctatcattgttggacatttgggttggttccaagtctttgttatcatgaataatgccgcagtaaacatacgtgtgcatgtgtcttcatagcagcatgatttatagtcctttgggtatatacccagtaatgggatggctgggtcaaatggtatttccagttctagatcactgaggaatcgccacactgacttccacaatggttgaactagtttacagtcccaccaacagtgtaaaagtgttcctatttctccacatcctctccagcacctgttgtttcctgactttttgagatggagtctctctctgtcgcccaggctggagtgcagtggcacgatctcggctcactgcaagctctgcctcctgagttcacgccattctcctgcctcaggctcccgagtaggtgggactacaggcgcccgccaccacgcctggctaattttttgtattttttagtagagacggggtgagtcactcttatcacccacgctggagtgcagtggcgtgatctcggctcactgaaacctctgccgcccagattcaactgattctcctgcctcagcctcctgagtagctgggataacaggctcttaccactgtgcccgggtaatttttgtatttttagtagagatggcttttcaccatcttggccaggctggtcttgaactcctgacctaatgatccacctgcctcggcctcccaaacttctgggattacaggcgtgagccaccgcgcccagcccacgtgtgtataatttttaaagattttgtttaaaatattcactgacatagttacctgttgtggcactcttgagtctttccttctgacccaggttgctatcaagtaaaatttcccttctggctgaagaattcctcttaatacttcttatggttacagtctgctgtttttctgtaataatttgtaaaaattatttgtgtaataatttgtagacaaattatctcagcatttgaattctgttaatctgttgtcttcatttttgaaggatattttcgtcgtgtatagaattttagaggtgtgttggtttgttttcaccactttaaagatgccattccattgtcttttggcctccattgtttatcatggaaatttatttattccttttataattgctcccttgaatttttcctgcttggaattctctgattcttggacctgtaagttatctttcatcgattttgaatcatttttagccataatctccaaatatttttcttctactttctttctgggactcttaattatatgtatgttagactatttgatattgtcccacagatcttgtaagctctttttttttctttccttcactttatctcttttgtttccagttagatttcttctaacctgttttcaagattactgattttttggtgtgaccagtttgctggtaagcccatcgaatgcactgatgagtggaaatcttgatattttaaatttctgttatttccatttggctcttttttttttcttcaatttctcactgctgaaattgtaagttggccaccatcttctgtgcaagttgattaactgcctttttctccagatcctttaagatgtttatcttcgaattaatgtgagtctctatctgataattccagaatgtaggtcagctctgcttttctttttctttttttttttttaacaagtaaacatggtttattttagaaatgtgaggctatttcaacattagaaaatttttttttaattatactctaagttttgggatacgtgtacagaacgtgcaggtttgttacataggtatacacatgccatggtggtttgctgcacccgttaacctgtcatctacattaggtatttctcctaatgctgtccctaccctaactccccagcccctgacagggttacattttctttcttcttcgtaagtctcataattatttattcaatgctgaacattgagtataaaagaaaaatagcattaacatatgagattaacatattacacattaacatatagagattgaaattaatatttttatgctcaggaactagacacacccctcgtaatggctactagaataggggtatgagtccatccagtttgtagttgttaggtctgtgctttagatgtattcagtttactactgacggaattgagggtagaatgaggatttccctttggcaggactgaaattgacatatcgagaagactagaaatctctgttttacagctctagtgccaaactgcaagagatctctctccactttacatccagagtctcagcttattggaccactgaagcatttttgttcaccaaccccacccttgtctcttctatgtctcagggggtctgagacccccctgcctagctgccttgcccccagccagccttggaaagcaaaggcactgcattcactgagggcctcgtgggcctccaagggtttccctcaggcctctgttgtgccgtcagccttcaacaggccctgtggacctgcacttcacaggtgatcttttagctctcctctcctccttcgccttctgcaagagcacttgagaagggccgaagacagggagttggtgagtgaggcagaatcttttgcagctggggttccttgaggatctaattggtcatgcccactaggggtgaccagccatctggttttcccaggactttcctagtcttagcacttttaagtgctgcattctgggaaacctttctgtcctaggcaaactgagaccactggttaccctaatgccagctcacagtctgcctttaaaattttgtaaaacattcagctggcttacccttccttgtcaactcagttctaaaggcattaggtggcaccaaacatggtagacatttgtgtggggtgggaggcagtgggaagggactgggatgacccagagcaggatatcaaagccccggtaaggtgtccatgtgggagtggagcagtctccagaaataatcctgatgaattaagagagcaatgcatatctttctagactatttttgtgcatgtaataatatatctataagtggaatcatattcattcaatgaatattactgatcacctgtaatgtgttagacactgagtttcataatggagacttgttgcataaaattgacaagctctttgccttcaggaaacttaaagagtattaaatgagtgttaagtaaatgatgtctaatatctgcctggggtagaaatgttagtgataactcaccaatatttattcagtgcgggttacaaaacttatttcagtatgtcaaagaacggaacttagagctttccatgttaaatgccaatatcgttcaagatgttaataagttgtttgcctcgatcaaaaagattctgcagccaaacacatttagaagacacttgaactatattcctctccttaattgacaattcatactaacacttttaaagctttgagaagtcctgcaatcgagaaatgtgtttaacccagaattttctaagtttatttgtccacagcattcttttggccacagaatatctcgtaatatttctatgagtgctatagtttttttaaacagtttgggaaatgttattaaaaattgtaacaaatgaagggggaacttgacacatctctttaattatagggaaattttatttttatttttaacctagagattttattttttcttttaatttaaggaagtgttgatggcgtctctgaatccaagttgcaaatctgtgttgaaccaacttcccaaaagctgatgccaggcagcacattggttttacagtgtgttgctgttggaagccctattcctcactaccagtggttcaaaaatgaattaccattaacacatgagaccaaaaagctatacatggtaggaagttgattttggggtcttttgggggagttaacatgtaaaacaaatggtacaattgaaatataaggtgaacattaaaactcatatcctttcagatgttttaatgttttcagtatttttatttaaagtcccttatgatttcatattaactagctcttatatttgctaaagtgctagaattcaactcaggcttatatgtaaaatgtcaaatagtattgcatgaaactcagcactgttggaatcattacaacatttacttgctggtatttaacctgatgaatggagctaatgtaacaaatgtctaaagccttctaagatgttatgttttggagcgtatttttaaaacacaaaatgattttttctccaagccattaaaatagaagaggaagcatttacatgttctaatattgatataggtgccttatgtggatttggaacaccaaggaacctactggtgtcatgtatataatgatcgagacagtcaagatagcaagaaggtagaaatcatcataggtaagaagtatttccccagtgttctgacaagtggactataatataagctatataaactgcaacgtttaattaagcaaaggaaattatactttttaccccatactatttaatgatgtgttaagcattagaagttatattgtttatattgaaatttgaaagaatgcatactaaaatcataatctaggttcacagaaagcaaaaagaatcaggaaaaaaagccattttgtttaaattattttagttacagtttattttcaacacttatgataaaatatgtattctttaaagctttagctacaaaaaacttgattcagtgggaaaagatttttggccaggtgcagtggctcacacctgtaatcccatcacttttggaggccaaaggttggtggttcagttgagcccaggagtttgagaccagcccgggcaacatagtgagattccatctctaatacaaataaataaataaattagctaggcatggtggcatgcacttggtcccagctacttgggaggctaaggtgggaggattgcttcaggctgggaggttgaattaaaaataataataataaaagaaaaagatttttaataaaacatttttaaaaacaaacattatacacatataaaggaaagaaaggttattaacaatcccattcttaactgcgtaatttgggaatttgttatatttcagcttaatatatttatagttatattgttcatagttggaggtattgatgcatgtgttggtttgccaacattatctctatgatattgatctctatttgcttgacggctgcccttcttaagatcatgaattacaatatattcaaatttgttttttctgaaacaaggaagaacagatgaggcagtggagtgcactgaaggtagtgtaagtctttggtttgaaaccaaatctcctgcatgctagttactcttgggattggtggagtgcttttagcctactgagtgcagtgatggaaaaaatactagctgtaagaaatgattttgattgaagaatattgtattttaatctttgaagttttataaatggacagacatgattaaattgacacagtattacaataactaatcttcagttgactttcttttaatattacatataagaacaaagttcctgcattgtatcttttgagtagtgaacatttgcaattaattcttaatgttaatttttatctacataaaatttgtaagaaagataggtggctacgtgatcatggatatttgttttagattattttgtctgtcctttagccatgattagatgctctcaaatgaaatttagtttttataaaagtttcaggagaggagatttattgtttaacatatgttctatgaaatattaaatattctgtattaatataaaattgatcaggattttttgaagctacaggactctagataatctaccatgtcacctttaccataatatgtaaagggaactgaaaatctatttcaacataaacttctaatttgttttaattagccaaagcattgtacttaaattgtaatgagtaaatattaaaatttggatcatctttccttagtgtgatgtcacattgttttgcaaaattagatttgtggatggcaaagtatttttttcaatttctgcctctattacataagcttaggctctacttgggtaaagtaaggaaataatgttaaattttatattttctgattttcctgtccttcatgtctctatagtatcactctgaaatactataattactgttttcatcctaatatgtagttgcaaacaagaattctctcttgtaagagagttctaatcccatgatctgttaaccctgtttgagggaagccatgtgaagaaatcctaatcgaactcctcttcctctcctaatcctttttgcctaattgcatggtttttaagtcttcctaatgttggaaacctcttaagaataaatataagctagccccgctgtttggctccaaggtgatgcatgtgaattatcaccttgctgtgctgcttctgtacctgcagtattctctataatttttgcagtagcaagcacactattaaataataattttcaaataactctatttagaacatatagagatgaaaatccagttacgaagtttctccagaagtctcagatgaaaaaattagatccaaatttttttcaatgaaagtccacaaaattgagaattgcatatgaacagtgtcctttattatatatatatttttacctatttagcatggtgtcctctatttcattttgtgtattttattcaagagacttgatcagactattcagccataaaaaaggaatgaaatgatgtcacttgcagccacatggatggaacagtcattatgttaagtgaaataagccaggcacagaaagacaaatatcatatgttcttacttatctatgggagctaaaaaagttgatctcatggaggtagagagtagattgagactggcaagaggcttgggggtggatgaagagaggttggttgataagtacagacctgcagttagaaggaatcagttctagtgtttgatagcacagtagggtgacaataggtaacagctatttaccatgtctctcaaaatagctagaagtgaaatgttccccacacaaagaaataagtgtctgagatgatggatatcctaaataccctgatttgatcattatatatcatatgcatgtgtcaaaatatcatatgtatcccataaatatgtacgattattatgtatgaatgaaaaaaagatacttgatcaggatgaggggtgcgggttgaataggtggatttttttagggcagtggaactattctgtatgattaatgatgaatacatgtatacaaattttaatcatttaggaggtcagaggagggggattccaagatggaatacagactataagaaaagaacctaactgtattgcaaatgtatggtacagcctcactgaagaggggtgaaagagtacagtgctactgacctaaataactaagtaactgggaatgagttgagcctaatactgaaggcaaaaaaaattgcacataacacatgtgctgactcagaccttcttcaattgattttatgtaacatataagaataaagtttctacattaaaaaagtatgaatagtatataacatttgtaatttattgttaatgttaatttttatcttcataaaacttgaaaaaatagatagctataatgtcattacttattttacctatccattggccatgataagatgtcccatggggtacaggttaattctgaaaccactatttctcccaaaaacaccttacaccttgagaaactatgaatctaaccatgagaaaaacatcaaatctcagttgagtgacattctgcaaaatacctgacagttactcctcaaaaccgtcagtgtcatcacagacaaggaacacctgagcaggtgtcagaaccaagaagatacaagcctgaggagacacaagcagttgtaatgtgagatcctgaatggagtccctgagcaaaaaagaccattaatggttcattagttgtgacaaatatactattctagcataagacgtgacaaatacactaggctaacataagatgttaataatagagaaattaggtatggggtatataggaactctctctgcactaccttcacagtagttctgtaaaccttaaaatgttctaaaattaaaagttgacttaaaaagatcatttgagattactgtttttaattagccagaatatctaaaactatgaataaattatgaaagagcctagtttttgtcacttaatgaaaacagtgatggcttagaagtcctaaatgataagcacagcaatattcactattctttgctattcagtatttgcatggcttcttcatttaatttgaaaagttgtaaactgataaaacactataacatgattcactggctcaaaactacttggattagtcttactatttgtgctaaattggtgtttagattacttaatctattttctcttactttgttttagatgaattaaataatcttggtcatcctggtgagtaatacaaacataaaactttagttttagatttttaagttgttgaatgcagcaaagttaccgtaggtactcttttgctacagtaatactagtaacttttttctctttattgaaataatataatttaaggttgaaattaactacatgaagtacaattttatacaagtgatacattaaaaatattttaggttataaaactgtaagggtagaaaagaagtgtttgaggtaacataaaacctcaaggtattatcattgtgtattactccttatatcataacaaggaagttaatgggggaagtacgtgacctttaatctgaaagcaggaagcagtgtttgacagagtgacaggggtaacatttctgaactgatcagacccctgggacctttttcttggtgcctcagtcatacagcatatctgaactagttgggtgggtgcctatatctggagtaagaagtgtgtttgtggggatcattggcatcgtacaggtcggttggtcagtgaccatttcttaatgagtgacagttgtcaagagtatgtagaactctgtaggctaattttaattagaacagatttctaataagttaagccttcacctgagataaaaggcatatcaacagtgagaactacatgaagacacaggatatcaacctcgtgtaggctttctgaaagacaatgatggaacctgtggatagatctgaaaataaaacctttcaggaatagtttaagaaggtggttatgtcatttaatatttgtagaaaaccctattacttctccacttatttctcattattttagcatcattactagtttgcttagtgtcatactcatattgcattagcaaacatctattattgtgaatgccattgggctgtgctgactgtatataagcaaactagacacagcagaaagtccccattacctgtgcgtcattctccttgctgtagtgtcctcaaattcacataaagcctcaatgagacctgcctcaagtaggtcttgaactgtcaaaaaccatcctagtaattgtttctcttactgggggagaatagggggtctggatagaatcccctttcctaaattagtctgttaattcttgcttttctttaatgaacattatgaaaagttatttcagaaaaacttttgtaaatagccaccactaagattctaaaattttcctggccctttgagtttttcctcatttcccacaattcagggagtaccaaaaatttaggtttaaaagaagaatgttgtatagggaaagcttttaataggcttcagtggcatgtatttgaccagtagtacaaagttatctcccgacagtagtggacacacaactgatgaactacatctttccctacatggtgcttcaggtgcggggcgggattttattttatgtatactagagggtgaaagcatagaatccagaaggagactccctaagttagtatccagatttgctacttactagcttcataactttgggcaagtgactttaatctctctctgccttaatttccttatctatataatggggttaataatagtaggcacctcatagggtagagtgaggtttcattagatctgttatatataaagcatatagaacggtgccagctgaggcatcaggaaatggtaactactgctacttcctattgtgaacaccaccatcgtttttttccattcaagagtgtttttattaaaaatctgaagagtagaaactatattctgtaagtgatgctgctgatgttatatacttttcatgtatctttaactctggaaatataccatggatcttacatgttttgcttttttatctttgtatagataataaagagcaaacaactgaccagcctttgggtgagtagaactttaaaatgcattatcaaagtataattattgtgtataactccagaaggaatttaagacattttaatttggttttttaaagaaatgtgaataacattgggaccaaatgttttatttttttgtatctgtaaaagaaggtttagaagaggaggcttaaaaatgattacaaattcagtttctagggtcaagtcaacttctgtggagtgatttgtgtgtttctcacgatatgcaaacagacatgcgtacaaaaagaaacatgtacatgctgcatagttagcatagaggaggaagtggttagtgctgtctcttggtgagggatagaaatcacaaaggctgcagtagctttagcgtttgctcccctgtcttctccaatggaaagagaaaagaatttaggataaaatgtaaacgaacagttgcatttgaagaatgcctgggacaagaaaatgtaagggagaaaactttagcagataaaagtttagcagattaacatttaaagatggtaaaaatagctaacagcttgatgctggcagaagccagataaaatatgtctaaaatttgtccattggattcagctactgaagatgtgattggtggctttgagtggaatgttgaaagtgcctaatatgtgtcagttactgagttatgctgggaatttaaacatggatacaatgtataaaatagtggaaaaagaaagattcagaagtgaacaaatgaagacagtacatattaatttgttggaaagaaagagtggtttgaaattaactagatagggcatatattcaaagtgttttggtaggaggggaaaatgtgaggatatttacatttggaaaggaagtatctgttgagactgtgtagattagagtgatccatcaaagagaggacaatttatagagcaagttcctagaagagatgatagggatttgggccaaggtgaaaacaagagaaattggctttaatcagaatgttgaaacctcttttgagattaaaaagaaggagagattggtgaacagatagatttattgggaagctgaggacatttttagtttatgttttttgtttctaagtaattaggcgtagtaatatgcttaaaagattgaggaaaaggctgggcatggtggctcacacctgtagtcccagcactttgtgaggccgaggcaggcaggatcacctggggtcagaagattgagatcagcctaaccaacatggagaaaccccgtctctactaaaaatacaaaaattagctgggcattgtggtgcatgcctgtaatcccagctacgtaggaggctgaggcagaagaatctcttgaacccgagaggtggaggttgtggtgagctgagatcgtgccattgcacttcagctgggcaacgagagtgaaactctgtctcaaaaaaaaaaaaaaagattgagggaaaaagagtaaagtaaggctgaatatagatcttattctatggcagaggcttagaggctaaagaaaatggaagcaaggtcttacaagtctgatctacaagtgaatgtgtattgagagtccaactaagacttttaaagagtaagaatttataatggttcagatcagttgtgtgctttttctgtagcagatctcagctttaaaatagagaagataggctgggtgtggtggtacacgcctgtaatcccagctactcgggaagctgaggcacgagaatcacttgaacccaggaggcggaggttgcagtgagtggagattgtgccactgcactccagcctgggcgacagagtaagactcttgtctcaaaaaaaaaaaaaaaaaaaaagaaacctgctatgtttcattcatagtggtaagttttcatgtattccagctccatgatcttttctttagatcctccagacagacctcactgattaagaaatacctattaaaatagtgttctgaacaaaggcatagccatcatattctgtagagaggagcatacatatgtcttaggtacacaaaatgacaagatccaaatgtaactgggttagttgctgaagatggtttaatcacaaatatgcatttaatagtaatgctaataaactaagtgttttcacctagtgaaatgtttaatttaaccctgagatgtaggtatttttcctcatttttagtagatgaaaatttaaaactgtaagtgtttaataaaacttgctcaggattatacaatgtagtagttgagacaggattgaaacccatctatctctcattccatagcctccgttagctccattatgccaggtattctttctcaaacatgtcccaattgaaagaataacaagataaatggaatatcaggtcaacttctatcattgaagttcactaaacatttatctaatgtttcatctgtgctttatgacaggcatcccccacccccaggctgtggaccagaactggtctgtggcctgttaggaactgagacacacagcaggaggcgagtgagcgagcattaccacctgagctctgcctcctgtcagatcagcagcggcatttgattctcataggagtgtgaaccctattgtgcactccttaggagaatctaactaatgcctgatgatctgagatggaacaatttcatctcaaaaccacccctcccctgacaccgtccatggaaaaattgtcttccacaaaactggtccctggtgccagaaaggttggggaccgctgcttaatgaaacaagagaacaagccttggtttgtgaattcaaggctttggatactaataggaggcagacattaaatgaataatatagtacatgctacatgcctagtagaaatatgtaaagaatctagaaattgttcatagaagatggtgatcagattagtcgaggagagttagagagggctttacctaagaggcaaagccaaggtgaggattttcaaggacgaattgggagctctcaaggggataaaatgaaaatatatgggatgagagttcattcagaaatgaaggagagggaaaaaagggtgaagacatggtaagaatggaggcatgaaatagatggtgtgggtgaggaacaaagttcagtattgctagaaggtagaaaactagggaaggagtggctggaggctatactggtaatgtagttatttattgctgaataacactgcaaaatttactagcttaagaacagcatcagttttattatctctcattgttctgtgggttggactgggtttagcaggtggttctgctggtctttcttggggtctctcatgcaactgcagtcagatgaggctgggactgccacattcaagatggctttgcttacatacctggcaccttagtgggggttggtgaaagactgtgaagactgaaaaaatctccctccctctctctctctctttctcttcctcttactctgtctctctgtctctccctctccttgtctgtctctctctgtcctcccctcctcttcccgcccccaacttctttctcttcgtttccctctccctctttcctttggttccttctccctccctgagtggtctctccatgtagctgttttctttatgtcgggctggatctccaaagtggaaactgtcagagcttttaagggcttagaccctgaactggcagaggggtcacacatattatgttgctcaaagaaagtcgtgatacagcccagattcacaggtgggggtgactgtactacacaagggcaaggatactgtggtttgctgggggctacctgctaccacatctggaaagataggcatggactagaatgcaaatggccttgaatgccaaactacatcaccagtctaacccccagccactccttccctagtcctctaccttccagcaatactgagctgcctgttcctcacccacaccatcaaactgggactttattttgtaggacatggagagtcattaaaagatttaatacatgtgatttttaaataaatacttaatagcatttactatatgccagctccttttctaggtgcttctgaatattaactctatttagaaaagtaacataataatcagaattattagacatgggattaatgatataacaccagtttttgaagaatatattacattaaactttggaagacgtttaggatcatgagttaaaatgtctttctgaagtggcttcattattcttttgctgaatccactggcatttttgtttcacttttccaataaattgtttgtgttcaagaagttgtgggtagctcttacagtaaatatttttctacagaaaaactctttcatttatgttatcacttgaaaaccattataaattgctttatatttgccgtcttgaagttttctttattcctcactcttacctcctcaaattcaagttttattgttcgtttctctgtcgtgtcctttttcctctccctttctactacttctcgatcttccatccaccccagttcacctgtcacccaggaactgttttacaagtagattggacaggtaagatttacttacccaccatctttttcaccagtaaagtcaaggaaatgctgtaagacatcttaggaactagctattaaaaattatcattggaggaaaattttagaagtgttatagacaattatcgatacatatgttttaagacctgtagttctcacactgttgaacccgtgcattctgtaaactgtaccaagtattctttcccaaatagagaacaaaaccagtgaataatgatttgatatcagcaaaaacatcccatgatgcttagtttgacagttaattttatttccccaaagacccagtgatttttttattatatacttataattgttttctaccaataaaaatctatgatgtgtataattaaatgatggtattccatggaaaaatggaattatttacaagcattttactaccccagtaactttttaacctcttgctgtaaacctatgatttggactataatgatgtaaagcagagacaatgcattctcacatttcccctcaccttagaagaagactgatttgagtctgtcactctgttgaggttggatccttattctaatagcattgatggactcaaaaaaatgtgctgtggatcagccagctaagagtcttgctgtagcaggtactttagtgtaagaatactagtttattttaaaagaaattttaaaaaggccaggcgtggtggctcacacctgtaatcccagcactttggaaggccgaggtgggcagatcacctgaggtcaggagttcgagaccaccccgacctaagtggagaaaccccatctctactaaaaatacaaaattagctgggcgtggtggcgcatgcctgtaatcccagctactcgggaggctgaggtgggagaatcgcttgaacccgggaggcagaaggttgcagtgagctgagatcatgccattgcactccagcctgggcaacaagagcgaaactccgtctcaaaaaaaaggaaatacaagtgatgttaagttttatgctgcctcctattgaaatccatgctgagtattctccgctttttcattgaattaataatgcggcttaagtatcatttcactgttatgtatattcataacactgggcagttggctagaaatctctgaacatgtacatatagaatagagatgacatgatataaaattactgaggcttttcacaaagtagagttttttttatcctttgagagagtcacagtcttttaaattgatgctagttttaacactaggtttaagtgttccatggaaagaaaagcaatttcaccagagagatttttggtgaaataatcatctcaattatttgaaacatctgaaattacatattgtagacgtcgagtcagcaatgtgattattcatgcctgtttcaacttcataagagtagtattcataataacttacaaataaactacttagcagcactttgtggcaggggttggttaccaagtcctggcctgcgtcagagggggtggcctgcagttctacccaggcggctcttcagccagttggctggggctgcaggtgctcttgtcaccctgtctctctgctccctggcatttctgtcactgctgctactattacgggtgctgcacacgccccactgtcagccctcaagaagaaagccgtcagaggctattattgtcacgggatggtcttgaggttttggtgtgttctttatttttttttttttatttttttcttccctttgataccagtgggtcttgagtttttaaccattgaccccattccaggctatcaaagaaaggtaccgtgttgaagacctcataagcactaagctaggtctggctttccacactgttttagatgggctgcacacctggttaagctagctgctactttttaaggcatagatacagatctttttttctcttatgaacaaaaaaactgtttctatcagaatacattatctttgagcaaagtctcagtgcactaagttcaaaaaatgaacttttaaggtactcatacacaaaatcttcacatacccctgaaatagcctcatctgagtcaaatgggggagtatttttaaaagatgctaagaggagacggtagtacatccacatggctactgcagaaaccaagaatacagtacccgtgaagttctctctctctttgatatttcccctcattcactctgatgggattcttcctgtcccttttttagttatcttgtttttagcctcttccattctcagcaaaacagaacctaatttgatgggaacccaatttcaaatattccttgtttaaattttctccaaaagtctagttgaatattatatcccttttgttataatttaataaaagtaaactttaatattaattactgttatgtttcatatacagctaataaatatcctttgcctggctctcaaaagtgtgaatatgcttaatttcagtttgatgattttagcatctgtgttcctcagagaatattgatctgcttacataaatagttctaaaatgaaattaaataatgaaatcttatttgaaatgaaataatgcaatcttaaagcatactttttattataataccatctccataggttttgttttaatctttatatcttctttaaacaccccctttctttttttttcaaagcgaaggacaaggttgcccttttgataggaaatatgaattaccgggagcaccccaagctcaaagctcctttggtggatgtgtacgaattgactaacttactgagacagctggacttcaaagtggtttcactgttggatcttactgaatatgagatgcgtaatgctgtggatgagtttttactccttttagacaagggagtatatggtaagatatttataatgtttgtttttacaattatccattattcttttcattatacaagttaggttaagaattgaaaatcagataaagataaggtaaacatgttgttgaatggaagagttttatttttcttattaagatgatacatttgatcttcattccatctgaataactaattagcttcatgtctttacttttatgtttcctgttttgtcaaaacatatttttcttactagaattcttacctgtcttttgtgatttttttttaattgatagagccacagtataataaaacttgataaccacacagcaaaatttacattcatatgcgtaaaatattacagtatgtggggttttctttgaggggggtagcataaaaggttctagtagaatgtatattttgtatgtttccttttcctaactattgcatggtcttttctagtcttttagtgagaactagattttaacaaggaaatgttggtggatggggcatataatagtaatttgtaaattaaagttctatacagatatgcttagaaatgtacctctacaaaaattcttacagtaaatatttaatgttttttccccattctttcacctaaatatattaacactgcatatatggtaaagaatttcaaaggagacagaatgtgctgtcactagctaatcatttatttggtgatttatttctttcaatatgggaaggccagctgttgagctcatctgaaccgtgttttgcaggattgtgcttccatgacattgtgcaataacatcagattgccagggaagtgacatttccaggcctgttgttaggcatgcaatgataaacaaaaagtaccggtttggctcctgtatctttccagttattttattttaataatttctgaatttactcttgttatttataattagattgatatgataaggcaagtttggtcagaatttttaatggtgctcaaagtagaatttttaatggaacaaaagctttttttttccccccaagatttaccacactgttgtgtaagggatggggaaaagtctcaaaatcttacttaaatgagtttccctctctaaatagtgaggatttagagaaagacaaatgaagttaacaaggtaaacacctcaaatgtgagatttcagctattatgctgatgtgttaataaaactttatttataactcttatggactgatgactaatgggtgaatccatccatttttttcttatgaaaatatgaaagaatatacaatgcaaatatgccaccttggtaattggcttatacaggttgagcattcctaatctgaaaatccaaagtctaaaacttcgtgagtgccaacatgatgccacaagtggaaaattttacaccttacgtcatgaggggtcgcagttaaaactttgtatcatgcacaaaattatttaaaatattgtataaaattaccttcaggctatgtgtataatatgtatatgaaacataaatgaggctgggcatggtggctcatgcctgtaatctcagcactttgggaggccgaggtgggtggatcacttgagcccaggagtttgagaccagcctgggcaacatggcgaaaccccatctctactaaaaatacaaaaattgggccggacgcagtggcttacgtctgtaatcccagcactttgggaggccaaggcaggcagatcacctgaggtcaggagttcgagaccctcctgtccaacatggtgaaatcccatctctactaaaaatgtatggtggcagtcatctgtaatcccagctactcaagaggctgaggcaggagaatggtttaaacccgggaggtgaaggttgcagtaagccgagatcacaccactgcacttcagcctgggtgacagagcaagactccgtctcaaaaaaaaaaaaaatagaataaaataaaataaaaacacgaaaattagctgggcgtggtggtgcatgcctgtaatcccagctactcaagaggctgagacacaagaatcgcttgaacccaggaggcagaggttgcagtgaaccaagatcacaccactgtactgcagcctaggcgacagaatgagacttggaatcttggtctcaaaaaagaaaagaaaaacataaatgagtttcatgtttagacttgggtggcatccccaagataacctcattatgtatacgtaaatattccaaaatctggaaaaaaaaaatctgaaacacttctggtcccaagtctttcggataaaggatactcaacctgtattttcaatctggcatcaggggtgttgtttgtttttatattatacaattgatctcagcttttaaggtgcctacgtgacataaaaaggaaaaggcttccaaaacttcactagaagtgatgaggtgtaaggaaaaaatattgatcagtttaggtttctgtattggtgaagtatttaaagattgagggaatcatatgaagaattactaccttggttgtttattctcatttcttattgatattttcaccttggcttttaagccctttgtttgacttttaaaaccaaatcctgtggccagggcatggcggctcacacctgtaatcccagcactttgggaggccaaggcgggcagatcacctaaggtcaggagttcgagaccagcctggccaacatggtgaaaccccgtctctactaaaagtacaaaaattagcccagcgtgatggtgggcacctgtaatcccagctacttgggaagctgaggcaggagaatcacttgaacttgggagggggaggttgcagtgagccaagatcatgccactgcactccagcctgggcaacaaagcgagactccatctcaaaataacaaaaacagatcctttagttgcccctgtgaagtagagaaccagaaatattaaaaattgtgacaagactgcagtttaggctgaagctttgccccaatataaaaacgtcatcttggagtacaaaataaagaggcatgttaaagcaaaatgtcagcttaagaaagctagaaaacttttaaatcctactgattcgtgtcttaacagggtggctgcattatattttgaagtattgtgaatattccaaacatcagacacatctacactaaatgtaagtgtggtagaggcttgagggtttagggcatatcataaagaaacctttagtttttcttttggactatgcctttaccgctagttgatattaccaggggactcagtgcttgagggctgtgggggaagatggaaggcagagtcacaggaatttcagcatgaacagctagatacggagaacagaggaactcgagttcatgcccttttatattatattgcacgcaggtttgtagaagaaataaaagttgcaacagaacagacaataattcagttttaaacatatgtaaacataaaaaacagaaaccaaaaccagaaataactgtccttaaaaatacaaaaatacatgtccttaaagataaataaggagaaagatttctagttatgttgtatagatggccaggataaaaagtaaccctttggcctgagatctatccctgcatagcctttctgtgttcatcgcttgctgcagcttagttgtgctttcgtgtagaagaacggtaaaggagtcttgtcggaatatggcaaaagtgttattcggcctgcagcggagcagctgttcagttcacatagctcagtggttaagcagtgggccttagcatagctagcctgggttcaaagctttggctttctgctgacttagctgtgtgactgtggttctttaacttttctaagccaaaaggaatctacaaaatggatagaactaaattaatgaggtttacaggataagataaaataattatccctgtgcctggcacactaaaaatgctcaaaatattgtacctattattgttgtcgtttcctgtcaatttattaaagacattcaagcactttttcatctttagattggggatttggactaggtagcattctatttcaggcctcaatgagagaaacccagctttaatcagtttctgtgtattaagggtctacctaaggttttttgggttttttttttggttttgggtttttgtttgttttgttttttgatacggatggagtcttgctctgtcgcccaggctggagtgcggtggcgcaatctcggctcacggcaacctctgcctcctgggttcaagcagttctcctgcctgagcccccagagtagctgggattacaggcacatgccaccaacgcctggctaattttttgtatttttagtagagacaggcttcactgtgttagccaggatggtctcgctctatctcctgaccttgtgatccacccaccttggcctcccaaaaggccaggcgtgagccactgcacccagcctgccaaaggttttttgtgtttttttttttgttttttttttttttgaggaaaaaaagtcagggggtttaaagctgtagtgtagtaaaacagtgaaaagccagtgcactgacattttacgttgtctgagagtcgagttacctaaaaagccagcagtagattatagagacagtatcatatagcacagtagcgaggctggcctgcatctgtattttggttctgtcacttactaggcatttcagtttgggtgagcttttaaacctcttcatgtctcagttttcccatctgtaaaagagggatgttaatattacctactttgttgtgaggattgtgtgaggcaatgtaactagtgacctttcttggaaccgtgcctggcacatagtaagtgccgtgtaagcctgctggggtggcgggtgttgtgctcatcagccactcactgtgctaagtggagtgcatattcagttgagtggaaaagtttttcatttaaatgattattttctctgtagacaaaaataaatatctgtgactatattcttgaatcatcctcccaagaaataaaactccctaaagatctaatttgcagaattgtatttctaagtacagtaagttctttgacatttgtttaaaaaatacctattttcttctctatccttgagtaatgggatggttaactaaataaataagcagtactagagatggaatttaaaaacaacaacaacaacgatttgggccacacacggtggctcacacctataatcctaacagtgggaagctaaggtgggagggttgcttgagcccaggagtttgagaccagccttggacaatatagtgagacctcatctctacaaaaaatttaaaaattagccaggcatggtggcacatgcctgtggtcccagctacttgggaggctaaggtgggaggatagcttgagcctgtgaggtcgaagctgcagtgagctgtgatcacactgctgcactccagtatgggcaacagagcaagaccctgtctcaaataaataaataaataaattttttaaaaaaatgatttggactagttcattttacacaaaagtacttaattcccctcaatataatttggttgcagactttgatacagaatagttacacttttcgtaagacattttgggaaagagaaaaaatattttggtgttaagtgccttaattccattcagcagttgcagggctgggcatgtggcattaatgtaacagaacaacattcagcttttccctggatgaatggaagctaagccttccctcagagttgtatcttcaccccaatcaagtcttgctggagccagacgtattacctgacatgagggaggcagcacccaggcctgctgtcagtcgtctctgagtaataccagttgttgaaatggtaccatttctactaaaagtcagacccttgaaaagagacctccagatctgaccctgtcttgattggtttgcattgttaatttaatgcaattcagtaagtatttactgagttatttttgttacatctatagtccagatgaaggagtatgctatgtgctgagagaaataatagtgaataaagatcatgatctgtcctcctaagaaaattacagtcctgggccgggcacggtggctcaacgcctgtaatcccagcactttgggaggccgaggcaggcagatcacctgaggtctggagtttgagaccagcctgaccaacatggagaaaccctgtctctactaaaaatacaaaattggctgggcatggtggcgtatgcctgtaatcccagctacccgggaggctgaggcaggagaatcacttgaacccgggaggcggaggttgcagtgagctgagatcacaccattgcactccagcctgggcaacaagagtgaaactccgtctcaaaaaaaaaaaaaaaagaaaaaaaaaattatagtcctttaatacaaggagaaaaaaacactatggagtcaaaacatcaactctgtgattttaagcaaatcatttaatctttgtaatttaattttctcatctataaaataagggcagaaatcacttaaagttgttatatggattaaaattagattgtgtatatgaaagtcctttgaaaaccaagaaaatgttatacaggttgaatatctctaatctgaaaatcccaaatccaaaacactcctggtcccaaacatttcagataagagctactcagagtgtgtaaatgtaaaagattagtgtcattatgatttcttatcagaaaaactaagtagacataggactatagaatgtcaggaaaagccagtatgtgattgtcagaaagtgctgctacagcatttcaaagtagggagaatttgaagtgtgttagaaagccacaaaccagttaccaggtagtagttaccaggtgagtaacttgctaaggattctgaactttggaaataacccttgaggactggttatggtttgggtagatagaacggagatagagtaacttgagcaaagttgtggacgttaaaaataagtttatcttgctcttgaagcagtaaagagactgatggaaaataaagttatattttgaatacttgatggaggtgtataagttgtaccctttttaaagtgtataatttggtgatttcagtatcttcacaaagtgggcatcagtcaccactacctaacttcagaacatttccatcaccccaaaaagaaaccccatatccattaacagtcactcccattcctccttaccccagcccctggcaaccaccaatctattttctgtttctgtggatttgcctattctggacatttcatataaatggaatcacccaatatgtggccttttatgtctgccttctttcacttcacatgttttcaaagttcattcatattgtagcatgtactagaacttcattattttagggctagataatattctattatatgattatattttgtttatccatttatcatctcatggacatttttggacatgattaataatactgctgtgagcatttgtgtacacattcttgtgtggacgtagtttccatttctcttcggtatgtacctggaagtgaaattcctgggtcatatggtaatctatatttaactttttgaggaactgcaaaactctttccaaagttcttacaccattttacatttgtgccaccagaaatgaatgagggttccaatttctctgcatccttgccaacacttgttcttgtctgtcttttttattgtagccatcctggtgagtttaaaatgacttggaactagtggctaatgatgttgagcatcttttcatgtgcatatttgccactcatatatcctctttggagaagcatcagatcctttgcctatttttaaatcaagtcattagtcttttttttttgagatggagtcttgccctgttgcccaggctggagtgctagtggcacgatctcagcttactgcaacctctgcctcccaggttcaagcgattctcctgccttagcctcccaagtagctgggattacaggctcccaccaccacacttagctggatttttgtatttttagtagaaacggggtttcaccatgttggccaggctggtcttgaactcctgacctcaggtgatccacccaccttggcctcccaaagtgctgggattacaggcttgagcctccgcgcctggccgtcattagtctttttattgatgagtggaagagttctttattctggatacaagctgtccttatcagataaatgatttgcaaatattttctcccattgtgtgggttgtcttttcactttacctgatcttcgtggtttattgaattaaatccattcttttggtcattatttttaaaaccctatctgtgcactcctttttaaaattccctgtgtgtgcagtcttattttcattcacaacagtaatttagttttttgctaggctagtctcttttctgttagctttcattccaggtccaatccgtgtttatttctgttctcctgcccataatctacctcgctctctctctgcctttgcaaatttctagccattccctctcttaagaccatcccctgttgtttcacttcatactgatattcctctctactttactcatttcatacgtacatggtggttgtcccactaacatgatttatggcatttaattatgtgatgactttcattgttgcttgataacataaacgtgtgaatcgtgtgaattcatgtatggagatacatgaatctcctgatctcctgcttagaggtcaggaactttgtccttcttttttgtttctctcagtgcctacatgataacttccagtgcacacatgagctgtaatataaacccacacttgaaaatgggtatatccattttctcattttagctgaaacgtatttgaaagaaccatttttctcattttaatcgaaattcagaaaaagcagacgacctggattttgtcctgtaggaccacatgaagcaaattgtctttaattctcaaagccgcattctctgctaggagtcggggccataattacaatggattagctacttttggttccctgtctaaatggcttttactatttgctttaaaataccctgtaaagaaatcattaaatccagaatattgagagagcaaaatcagtgggctccagatattgcaagcagaggggaggatatcttcaaaagtgttttgtccagtacttttatgaagaagttcagactgatatttttgttgttttttacagccaaaacaaatttcaagaaaacattgagttgtttgggttagtttttatagtatcacttctcagtaaggaaatatgattcatctgttgagtcctaaaactatcccaaattttagattattgagtcaaaagactctagatggaagattgatatttatatctcatagcaaaaagaaaaaatagcaatctgcgaagtcagatttcccatctctgattataaaactatatattttaataacccttaactgtttatggtaatacctgcagtttcttgacttcatattgcagttgctattcatctgaattgtgtttgttcatccgttaaatacttactaagctcctgctctctatgccaggaacacacaaataaataaatgtaagactatctctgccctaacagaactcctagcttcatggaggagacaaatgagtcaggagagaaatcctagctgcattcttttttatatatcataacataaaattgtattttatattatactattggttacaaatatattttataaattaggatatacttcagacagcattttgatattgtcttgaaatgcaaattttaagtgcagactgttggtaatttatttatttatttatttattttgagacagagttttgctctgtcgcccagggtggagtacagtggcatgatctcagcttacagcaatctccacctccaaggttcaagtgattctcctgcctcagtctcccaagtagctgggattacaggtgcccaccaccacgcccagccaatttttgtatttttaggagagatggggtttcaccacgttggccaggctggtttcgaacccctgacctcaagtgatctgcctgcctcggcctcccaaagtgctgggattataggtgtgagccgtcatgcctggcctgttgccaataattttaaatgcaaaataacattgtctatatttataattgggtatttcttacatatgctcacatcaacctgaagaaaattaaagtcaaggtttttctacaaaaagttatgcagtctgtatgttcagagtgcatttagaattgacatctatctctctcttatttttcctcttttcagggttattatattatgcaggacatggttatgaaaattttgggaacagcttcatggtccccgttgatgctccaaatccatataggtctgaaaattgtctgtgtgtacaaaatatactgaaattgatgcaagaaaaagaaactggacttaatgtgttcttattggatatgtgtaggaaaaggtaagttttctaatctttattaaagaattgttggagttaaatatcgaccatgacaaactagagaaacctgtgaaatgctaaaagccatttgcgtttgtgaattttagtttatacattgaaactggaagaacaaaactagaggaaaatacatttactccatgtatatctaattattttaactcttcatatttgctatagaacacaaatgaagaactaaagggcatgggcatttactcacactacaggggattcaactctccagaatgcctttagatgactttaataatcactatagttattccctcaggaattaacaaaaccaacacccatggagttgggatctctgctcactagtcagtcctggtcttccagacatggaatgagtagccgaagcagatgtttggaggtttggatcccatttgtctgccattgcctttctaaggagtagaaccaatgactgttcctctagatttactatttttttgcttgctcagcatttaccaatcaaaatccaatgccagagttcaaatgcaactctagttttaaagctaacaaggagttagtgggttattttgggtagatatgtagctacctagatgaaaaattttgaatctataattttaaattatgtattctaaaaaactgttgtattttctcattatttatacccttttaagaatgctctttaacttttcatatttctatctgccctcctccgcctcccttaaatagaaatgactacgatgataccattccaatcttggatgcactaaaagtcaccgccaatattgtgtttggatatgccacgtaagaacatttgatgtttacgttgaagtttcctttattgtttgatgtctttttgtttttgctttttaggagcaggggtcttaactctgtcacccaggctggagtgcagaggcgccatcatagctcactgctcctgggctcaagcgatcctcctgcctcagccttctgagtcgctgggattacaggcatgtgccactgtgcctggcccctgagggttttttgattatagattagaggcctagaaaatacctatagacatgtaggcataaatttacctccttgatattctgcgtagaaaattttaaatgatcgactttagcattccatatcatggtatcttaattattaagcccaaattgggcatgtaattcctgcttaaagattaactctttaattatcaatgtcatgtgagaggcagaagagaaaatgaagcttattggtgtatacagaagtcccatgtggcaagtgtttgcttttctaacattttctttttaaaaaattatttttattggatattgacaagttataattgtatgtatttatgggatacaaagatatgctatgatgtacgtattcaatgtggaatgattgaatcaagataattcacatatcacctcaaatacttatcttttttcctaactgaaacattgtaccctgtgactaacagtccccacgctgtccccacccccccccagcctctggtaaccaccattctgctgggtgcttctctgagttcatttttattagcatccacatataagtgagaacatacagtatttgcctttctgtgcctggcttaacttctttttctatttttaaggtgtcaaggagcagaagcttttgaaatccagcattctggattggcaaatggaatctttatgaaatttttaaaagacagattattagaagataagaaaatcactgtgttactggatgaagttgcagaaggtaaaataaaaaataaagagaaaagtactcagaaaaaggagagcaggggagacacacctattcagggttccctctctggtgattgttttattcttattatgtgggtttggaattagtacctactttataaaacaatttttatattaatataacgttcagcaacacttctgctatttaatgtcatctttccttcccttttgacctagctctccaccatctgtgcagcattactcagactacaaggctaagcctcggcacagtcattaataaagttgaattctcagagctctactttgcttctatgcccagtgccttggtactggcaaatctccctatttgagggtgggtgggtggcatggaggggtggtggggaattgtccagtgagcagtctctcccaggatgggagagagaaaactttacagaaatttttagacactgctgggaaaagctgagttcatttttttccctgatgaacttagtagtttttaaatcctgatttaaggatgtgatcctagggggtctaatgccacatcttccatttctatctgttctccctgcctgctggtataatgctgtgcatatgtcagatgctgaacaagtacctattatttcagtagattgcactgtgttttttgaaaaaacattttataagccatagcaaaaagaaggtaacttggccaggtatggtggctcaagcctgtaatcccagcactttgggaagctgaggcaggaggatcacttaaggccaagagttcaagaccagcctaggcaacatagcgagaccctgtcttcaaaataaaaaataaaaataaaaaagaagaaattattttacaaactagcaccactagaaaatggagtttcatggatgttccagtgatggcagtttgggtataaggtgtttgaccaactgtcagccatatttattttcatgtttttatctgtgtagctattttagatcacttgacttagccacttttccatttaacataaccagccagggctttggacttcctgccaccctcccgcttcatccagagaagttccacttttatttgttttctacattaggcttcttctgaagcttacatttgaaggaaaggctctgctgctttaaaaaaaaaaaaagaaagaaagaaaacctttggattatgtcagttatattcaaactgagatccagtaaggtgctccagaaactctacagtgttttatttcaatttcgtttttaagtccattttaactattttaaaacttaataaaaagcaccatgctcactcacatatgatatttaccaaattgtcatagcaatgaatggcatcccgatatgtgctgtgaggatatttgaacttcttataaacatcttagacagttttgcttttcgctgatctttttcagtcctaccatgtctgcttaaccagaattgcccaggcaggaagaccctgtagtgtacatggagcacactcagctcagtgccgtgcacattgtgcccttcgtgggtaacggcccactcattgtacaaaataagtaaaggcctaatagtatcatgataaataatacagttaaatctagcccttattttgagttttggatgctttgtgtctgacccctgtcttagtagtaaagagcaaaagtagttgtatgaaatttttcacaagtcatccaattttgaaacaaaactttgctgtttctccctttggatcttccagattacttaattgaaactcattccatggctgggcatggtggctcacacctgtaatcccagcactttgggaggctgaggtaggaggattgcttgagcccaggaattcaagaccagtctgggcaacacagcaagaccccatctcaatttaaaaaaaaaattatttggggccaggtacagtggctcatgcctgtaatcccagcatttggggaggctgaggcaggagaatcacttgaacacagaagtttgagaccaacctaggcaacattgtcagaccccccatctctataaaaatttaaaaaattagccaggcattatggtgtgcacctgcagtgccagctactcgcgagacttaggtgggaggattgctcgagcctggcagtttgagactgtagtaagtatgaccacaccactgctctccagcatgtgtgacagagcaagccccatctcaaaaaaaaaaaaaaagaaaattccagagggagaaaagtattcacagattataagccaagcagttgaaggggaaaataaacatgttaccaatttctttttttaattttttggtttctttgtgtgagactacagagtctctgtcgcgcaggctagagtgcagtggcatgatcttggcttactgcaacgtccacctcccaggttcaagtgatcctcttgccgcagcctcccaagtagctgggactaaaggcacacaccaccacgtccggctaatttttgtatttttggtagagatagggtttcgccatgttggccaggcctgtctcgaactcctggcctcaagtgatccaccggcctcagcctcccaaagttctgggattacagacgtgagccaccacgcccggcccaccttaccaatttcaactgtgtgcaaggaaaacaaaatatgaggtaaattggttgttataatgctacagccatcaatctgtaacgtgacttttatttttgtactattcaggacagcattattattagaagtgttgaacatactactgaaggttttcattgtgagtagatgttcgatatgaatataggaccttgaagtaacctacatctaattataggacccctcttctcccttcccccactccatgataactaccattctaaacttattcctttttcgttttacatagttttattgagtttatatatacccaaaaaagtatgcgtagttttgtttttaacttcataaaaaggtattatgctctatgtagtcttttgggactagatttttttggttaatattatgttgctaagattgatccctattgttgcatgactgtagtttttaactgctacgtaatattctgttatgcaaacatactacagtttttttcaactactctcctgtgttggtgagcatttgagttagttgtaggtttttgctatgttaacagtgctatcattaacagtcttgtgtatgtctcctggaatatgtatgcatgaatttctttgcagtataattctacaacttggaattgctgggtcatagggtgtgacagtattccattttgagagagaatgccagacagttttgtaaagtggttgccgagtctacacttaaccctactccccacggccagcaagggataatgtgaatctgtactctctccatcacttgatagtcagacttttttatttttgccaaatgttaaatagtatctcatgtgatattgaacattgttcatatttttaatagctatatgtatatcttatgtgaaacatctttttatgtcatttgtgcattcttctgtgtgtgtgtgtgtgtgtgtgttttggcttattgatttagaggaatgttgtatgtgttcttgatataatactagcgaggaccgctaagacacaattgaataggtagttgtgggcatccttgtcttgtttctgactttaaaggaaatactgctaatgtcttcacatttagaataatattgtaagtttttttattaacactttatcaggttaaggaagttctcttaatttttttgaaaatttttattatgaataaatgaacaagattaaatggtttttctgcagctatgaagaagaaaataggatgtttcttttctttcaatttcttaatatggtgagttaaatttatagatagtctaacattaatccaacttgagataaatcactttcattgggatgtatatttttaatacactactagatttaatttgccatcattctgtttagaattttcatatctatattcatatgggaaatgggcctgtaattttactttcttatagtatttggtttaattttatgagaaaataaaattagtatttagtggtatcagtgttatcagtatcagtggcatacagagtatcagtgttatctgatagaatgtagcgtaggccttgtggaatgagatggaggacaaccaagatggttgattttatgtcaacttttgccaggcctcagtgccaagatatttagtccagcattattcaagatgtttctaggtgatggatccaacattattctggataagattaaagtttaaattgatggactttcagtaaagtagattgctctccataatgtgaatgggcctcattcagttagctgaaggccttaatggagcaaagactgacctcccacaagcatggagtttgctagcagcccgcctctggggctcaaactacaactctcctctgcatccccagcctgcctgcctgcaggtttcagacttgcaccgccacaattcataaaccaataccttaagtcagtcccttcttctcactgtccctctatgtacacacatacacacacacacacacacacacgtgtacgtgtacacatgcgcccatcttgttggtactgcttctctggagaactctaatacagaagaagtacaccctgttgtttactgggaacttttgtataaattatgatctgttccctaatgtttatggtagaacttgcctataaaccaacctgggattggtatttttttggtagaagatttttaaccactggttcagtatcttgaatatttcttgtaccatataggcttttcatttcttgagtcaattttgataagttatattttcctaggaatttgggcagttttcaaattcgttgtcatttagttgctcatatttctaatagtattctttaatctctgccttatccatagttatatatccgttttcatcagtattacttgtacttactttccttttttatttattgccagcttttgccaattgtgctatttcattttgaagaaccaatctttgactctgttgatttcttctactttttcattgttttctacatcattaacttctgctgtttatttatgtcttgccttgcatttattatttctttttctaacatcatcgtagttattcacttttagcctattttttccaatttaagtttctaaggctttacatttctcttaaaacatcactttcatcacacatcctataagtttagggattttttttagttgactttttttttctttgacctttaagttatataatattatctttaattttcaaatatggcaggaattttcatttcactttttgctttttatttctaccttaattgctttgtgatcgaataatagtctgtctaattgctatgctttgaaatttgtggaggttttcattatggccaagtaaaagatgaaattttgtaaattttgcatgtgtacttgagaaaaatggatatttttgtagtaactggttgcagaactctatgtatgcccattaggtttggcgtattaatttttattgttttgttcagttctatatttctgctgattgtctctttgatcaataattgagatgttgaaatctctcaatttaccaaattttcttgtagttctagcactttttacttcatatatagtgactattttcgtgttttaaatgtttatattttcttattgaacctttatcattatgtagtgatgcctccatttcaaatgcttcttctctttttgtatcatactaacagagccacaccaacttcctttttgttgacctaatatgctattttttacacttttactttcctactcttaacccctaggctagcctgcttctctacacttttactttcaaacatttcatgtcattctgctttgctgtagcttttggaggcaccatataacagattgtttaaaatccaatctgataatcttggtcttttaatgagaaaatttagttaatttacatttgttattttttgtacctgttttaaccatctaattttttgatttggctcattttcttatcttttttaaaaaaattgtatttatatcttttcttctctaacaaataataattttaatgtactcctacaatacttggtatctccttttaactcccaacatgttgatttaacttagacttagttctggatcactatataattttgtctctttttttaaaaaaaagaaccttactattgttaatttataacatagtagacagaagtaggataaactataacttaaataatatacttctaaatttaaattgatgtgtatccatatacattagtctatctaaaacatgttgaatgaaaatggtacattacaaagacatacatagaacatttttgttgaattcaaaaacctaaaacattggcatatactatttatgaacacttacacacatgagtaaaaattaaaacatgcctgatatgtctggcacataataggtgctcaggaaatatttgttgagtgaataaatgatactgagaatataacctgataatgtaggatagttcttagcctaaatatttaaaacataagaattggtggtcttaaaaataatatttattttcatatcttttagatatgggtaagtgtcaccttaccaaaggcaaacaggctctagagattcgaagtagtttatctgagaagagagcacttactgatccaatacagggaacagaatattctgctgaatctcttgtgcggaatctacagtgggccaaggctcatggtacggtaaagcccattttttgttagatctacaatatacttaacgttaaatcataaagtttcttctgaataaataactttcctcccagttttacagtgaaaatattttggcctactaggcaaatctcaaaccaaacaaatatttcaattatggatattacactggcttatttgatttagaaatatcaaattatttagcccattattgtcactattggtaaaatttaaatgaccatttaaaaatttttctatttttaaaataggttaagtttccatttgtctaatacacaatcctttagattctcctatattgtgacctgtcgaaaatcatggattgggttctgatccagtctctaccactctatgaacatgttatctataacatgtaaataagaaatggtacctgcttcaggctgggtgtggtcgctcacgcctgtaatcctagcactttgggaggccaaggcaggtggatcacctgaggtcaggagttagacaccagcctggacaacatggcaaaacctcgtctctactaaaaatacaaaaagttagcggggtgtggtggcacgtgcctgtaatcccaactactagggtggctgaggcaagagaatctcttgaacctgagaggtggaggttgcagtgcagtgagcagagattgtcccactgcactccagtctgggcgacagagcgagactctgtctcgaaaagaaaaagaaatagtacctgcctcataggttattgggattgaatgagtgcataggtagaaatgagcatggcactcgacaagtcctctgtacttttgattattcgtataactgagcatcctctcttggacacttgatcagtaagttgagtgatcagcagagaagatgacgtgaaaatcaatctgtagcttaattaccttttggtaattgtgtatggtttaatgaaaaaataagtttaaattaccaattgaaataattttggattttctgagtccaagtatctagtctgtgagtctcttatagataattgaaaaataattgtatttaatgaacttctataaaatatctttattttcataaataataatttttgttcttggccaggtgtggtggctcacacctgtaatcccagcactttgggaggccaaggtgggtagatcacctgaggtcaggggttcaagaccagcctggccaacatggtgaaactccatctctactaaaaatacaaaaaattagctggtcatggtggcaggtgcctgtaatcccagctactctggaggctgagccaggagaatcacttgaacctgggagtcggagtttgcagtaagctgaggtcacgccattgcactccagcctgggcaacaagagcaaaactcagtctcaaaaaaagaatttattctctaatacatatttttagtaaattaacatattaaagcacattaaaatgtaaaatgctataaatatctcaccattccagataactggataagtaattgaatgtcttttctctaaaaaagatctaaacaacaaatagcaaaattacggtggtaaagatcaacaataaacgaaacttcataaaacaaaatgaaaaggtcatatagaaaatatttgtaacaaataagagaaaaaaaattaagaccctcctcagtaaacaagcaaatgatacaaattcaacaatccacactgctggaagtatagagaaaaattttttaaatggctaatgtaagtaattaaggaataattaaaactgatggtatctttctgctttttaataccatcaagtagacaaatgttttaaaaattaatactctgttttggacatgttatgctgaaactttatattccatgcaaattgaaaataatttgtcccatatgtaaaggaacaatcacatagctttatctatcttaaagcattacgtatatataaatattaactatgatagaaaaacaataaaacccagaggtattataaatattcaagagttaacagaatggttaaaggtaacaaactataatgtggctgttcagtgacattgtgctttattaaaaattctggtcatataaattgaggcaacagtgaaaatttatctacaattgtatgcatatttttgattgccacaataaaaattatatatacagttggataagaactataaacaaatggtaaatgaaagactttgtttggccagcagaatagtgagcattattttttaaattgtatgtgtttaaacaatgtaaatcatgtttttaagcaaaagaaatgctaactatattctcctccataaatatttgcctcttatcatcagaaaacctaccaaagttgttcttattgttctttttcagaacttccagaaagtatgtgtcttaagtttgactgtggtgttcagattcaattaggatttgcagctgagttttccaatgtcatgatcatctatacaagtatagtttacaaaccaccggagataataatgtgtgatgcctacgttactgattttccacttgtgagtctcttcttttatttaaaatacagtgatatattctcacttattaaagactaaattttttaaaacttaaagttgatggtaaatataaaggaaatatatatatttatatatgtgtatatatttatagtttagtaacactgatcataatatttactaattgccaaaataccttaagtttatgagatttagaaatgtctaaagttcactcaggaaggatgcctctaatttcttatatcctaaacacgagagccaatgtgaaggaataaaatgtgctataaatatgtcaagaataatttccttttaaacagttataacttatattggaaacagtagtttttaagtcttgttaaggtatggtcatatgctggaataatagaaatctagttctgctcttttcaaacatttaggtttgatagttattttacgttggtctaaagaagccagtaaatagtacccctctttcctacatgagtgtgacaaactgagaagcaagcaaggagtaagacaagcagaaacccaaaatatcactttgattactgatagaggctttgtggaggatattgcttcatgtcagagtaaatggtctagcaccaaaccccagaattgagtggccaccccacacctccagtctcagcagtacggagcccagataggcttcctgaggtactgagcaagctgggggcctgtgggcttctcactggagcagcagaacccttactcttggccattgggttggctctaaaagaagaaaaaggaaaaggctgtttatttatccttcttaaatattctaatcatataaatttccctgcaccttcccaaaagtgatgattaagaggagagaatccaggagtcaaacactaatggggctctctctgcttaagaggaaacttgagtagctcaagaagcatttctaggaatcatttgaaaggaagctctttcagagctcactttactttttagatggcttagtacagaattgagaattcctattataaccatagattgttgttttcattgtttagtcctggataattttgggattaccaaaattcacgagaggccagaattcacgagaggatagtatcagttaagatgtcttatgtactagattatattgtggctttcattgatttcattattaacagtccctaatttttttttttacaggatctagatattgatccaaaagatgcaaataaaggcacacctgaagaaactggcagctacttggtatcaaaggatcttcccaagcattgcctctataccagactcagttcactgcaaaaattaaaggttactaccttttctgtttatagctactaatggaaaactttatgaaactggaaacttattttggcatagaccatagatatgctgccttattattaaagtagagataaccagtctacagaaggtcctatcagtgaccctttttatattctgtttccgatggtgaccagaggactttatgtgtgcttaccctccagaatgctaaaaaattagtaacattagagtatattcttttttctttttttagagacagagtcttaactctgtcacccaggctggagtgcagtggcatgaacatgacctactataacctcaaactcctcagtgcatatgatcctgccacctcagcttcccaagtatctgagtctacaggcacatgccactacacccagctaattttttaaaactttttgtggagaagggatctcactatattgcccaggccaatctcaaactcctggcctcaagaatcctcccttcttggtctcccaaagcactcggagtacaggtgtgagcttccactcccagctccatattctacttttaaatatgttcagattttcaagtaatcatttcctagttctatgactagacatatagcaaattagaattttttttccatttttttatttctagttgacttacaaatgagaagctagttctgcacattgagtgttctaatgaaagcttttaatttgttcacaactacatgaccatagaatgtatcagctaaaactcagggaatggaatgggcatgattgagaattacacacataaacctgttgtcatcctgttcggagctcatctacttaaaatcctttcttctcttaaaaagttagcccattatctgattcagttatattttccacctacgattatggattactataatattttaaaaacagcttaagctttttttataaaactggtataaaaccaggtttttttttttgttttgagatggtgtctctctctgtcgcctaggttggaatgcagtggcgcgatctcagctcactgcaacctccacctcccagactcaagtgattcttgtgcctcagcctcccgagtagccaggactacaggcgcacaccaccatgcccagttaattttttgtatttttagtagagacaggtttcaccacgttggccagactggtcttgaactcctaacttcaagtgatccatctgcgtcatcctcccaaagtgctgggattataggcgtgagccaccacgccgggcccagatcattttttaattaaaagttaataccccatctctaataatagggaagggtaagtttcctaagctgcactgcttggaaaatgttttccctgttcatctagagtgtaagaaagatctctttgactttgactactaacagtagtaagaactagaaattctaaatgggttgtaagtattgcatgaaggaaaaggaagataatgatagctggcgtttctcagtttcagggagatataaaggatgccttgaggatttggaacctgggaaaggagagtgagtggatttttgggggtgggggtgtgtatgtgtgaatattttcagattgatatatattcactgttgatgccaataataaaccagatttttttccttttcaggaacatctagtcttcacagtatgtttatcatatcagtactcaggattggaagatactgtagaggacaagcaggaagtgaatgttgggaaacctctcattgctaaattagacatgcatcgaggtttgggaaggaagacttgctttcaaacttgtcttatgtctaatggtccttaccagagttctgcagccacctcaggaggagcagggcattatcactcattgcaagacccattccatggtgtttaccattcacatcctggtaatccaagtaatgttacaccagcagatagctgtcattgcagccggactccagatgcatttatttcaagtttcgctcaccatgcttcatgtcattttagtagaagtaatgtgccagtagagacaactgatgaaataccatttagtttctctgacaggctcagaatttctgaaaaatgacctccttgtttttgaaagttagcataattttagatgcctgtgaaatagtactgcac

SEQ ID NO: 15674 - DNA, 38413 bp, Homo sapiens
gggaaattttatttttatttttaacctagagattttattttttcttttaatttaaggaagtgttgatggcgtctctgaatccaagttgcaaatctgtgttgaaccaacttcccaaaagctgatgccaggcagcacattggttttacagtgtgttgctgttggaagccctattcctcactaccagtggttcaaaaatgaattaccattaacacatgagaccaaaaagctatacatggtaggaagttgattttggggtcttttgggggagttaacatgtaaaacaaatggtacaattgaaatataaggtgaacattaaaactcatatcctttcagatgttttaatgttttcagtatttttatttaaagtcccttatgatttcatattaactagctcttatatttgctaaagtgctagaattcaactcaggcttatatgtaaaatgtcaaatagtattgcatgaaactcagcactgttggaatcattacaacatttacttgctggtatttaacctgatgaatggagctaatgtaacaaatgtctaaagccttctaagatgttatgttttggagcgtatttttaaaacacaaaatgattttttctccaagccattaaaatagaagaggaagcatttacatgttctaatattgatataggtgccttatgtggatttggaacaccaaggaacctactggtgtcatgtatataatgatcgagacagtcaagatagcaagaaggtagaaatcatcataggtaagaagtatttccccagtgttctgacaagtggactataatataagctatataaactgcaacgtttaattaagcaaaggaaattatactttttaccccatactatttaatgatgtgttaagcattagaagttatattgtttatattgaaatttgaaagaatgcatactaaaatcataatctaggttcacagaaagcaaaaagaatcaggaaaaaaagccattttgtttaaattattttagttacagtttattttcaacacttatgataaaatatgtattctttaaagctttagctacaaaaaacttgattcagtgggaaaagatttttggccaggtgcagtggctcacacctgtaatcccatcacttttggaggccaaaggttggtggttcagttgagcccaggagtttgagaccagcccgggcaacatagtgagattccatctctaatacaaataaataaataaattagctaggcatggtggcatgcacttggtcccagctacttgggaggctaaggtgggaggattgcttcaggctgggaggttgaattaaaaataataataataaaagaaaaagatttttaataaaacatttttaaaaacaaacattatacacatataaaggaaagaaaggttattaacaatcccattcttaactgcgtaatttgggaatttgttatatttcagcttaatatatttatagttatattgttcatagttggaggtattgatgcatgtgttggtttgccaacattatctctatgatattgatctctatttgcttgacggctgcccttcttaagatcatgaattacaatatattcaaatttgttttttctgaaacaaggaagaacagatgaggcagtggagtgcactgaaggtagtgtaagtctttggtttgaaaccaaatctcctgcatgctagttactcttgggattggtggagtgcttttagcctactgagtgcagtgatggaaaaaatactagctgtaagaaatgattttgattgaagaatattgtattttaatctttgaagttttataaatggacagacatgattaaattgacacagtattacaataactaatcttcagttgactttcttttaatattacatataagaacaaagttcctgcattgtatcttttgagtagtgaacatttgcaattaattcttaatgttaatttttatctacataaaatttgtaagaaagataggtggctacgtgatcatggatatttgttttagattattttgtctgtcctttagccatgattagatgctctcaaatgaaatttagtttttataaaagtttcaggagaggagatttattgtttaacatatgttctatgaaatattaaatattctgtattaatataaaattgatcaggattttttgaagctacaggactctagataatctaccatgtcacctttaccataatatgtaaagggaactgaaaatctatttcaacataaacttctaatttgttttaattagccaaagcattgtacttaaattgtaatgagtaaatattaaaatttggatcatctttccttagtgtgatgtcacattgttttgcaaaattagatttgtggatggcaaagtatttttttcaatttctgcctctattacataagcttaggctctacttgggtaaagtaaggaaataatgttaaattttatattttctgattttcctgtccttcatgtctctatagtatcactctgaaatactataattactgttttcatcctaatatgtagttgcaaacaagaattctctcttgtaagagagttctaatcccatgatctgttaaccctgtttgagggaagccatgtgaagaaatcctaatcgaactcctcttcctctcctaatcctttttgcctaattgcatggtttttaagtcttcctaatgttggaaacctcttaagaataaatataagctagccccgctgtttggctccaaggtgatgcatgtgaattatcaccttgctgtgctgcttctgtacctgcagtattctctataatttttgcagtagcaagcacactattaaataataattttcaaataactctatttagaacatatagagatgaaaatccagttacgaagtttctccagaagtctcagatgaaaaaattagatccaaatttttttcaatgaaagtccacaaaattgagaattgcatatgaacagtgtcctttattatatatatatttttacctatttagcatggtgtcctctatttcattttgtgtattttattcaagagacttgatcagactattcagccataaaaaaggaatgaaatgatgtcacttgcagccacatggatggaacagtcattatgttaagtgaaataagccaggcacagaaagacaaatatcatatgttcttacttatctatgggagctaaaaaagttgatctcatggaggtagagagtagattgagactggcaagaggcttgggggtggatgaagagaggttggttgataagtacagacctgcagttagaaggaatcagttctagtgtttgatagcacagtagggtgacaataggtaacagctatttaccatgtctctcaaaatagctagaagtgaaatgttccccacacaaagaaataagtgtctgagatgatggatatcctaaataccctgatttgatcattatatatcatatgcatgtgtcaaaatatcatatgtatcccataaatatgtacgattattatgtatgaatgaaaaaaagatacttgatcaggatgaggggtgcgggttgaataggtggatttttttagggcagtggaactattctgtatgattaatgatgaatacatgtatacaaattttaatcatttaggaggtcagaggagggggattccaagatggaatacagactataagaaaagaacctaactgtattgcaaatgtatggtacagcctcactgaagaggggtgaaagagtacagtgctactgacctaaataactaagtaactgggaatgagttgagcctaatactgaaggcaaaaaaaattgcacataacacatgtgctgactcagaccttcttcaattgattttatgtaacatataagaataaagtttctacattaaaaaagtatgaatagtatataacatttgtaatttattgttaatgttaatttttatcttcataaaacttgaaaaaatagatagctataatgtcattacttattttacctatccattggccatgataagatgtcccatggggtacaggttaattctgaaaccactatttctcccaaaaacaccttacaccttgagaaactatgaatctaaccatgagaaaaacatcaaatctcagttgagtgacattctgcaaaatacctgacagttactcctcaaaaccgtcagtgtcatcacagacaaggaacacctgagcaggtgtcagaaccaagaagatacaagcctgaggagacacaagcagttgtaatgtgagatcctgaatggagtccctgagcaaaaaagaccattaatggttcattagttgtgacaaatatactattctagcataagacgtgacaaatacactaggctaacataagatgttaataatagagaaattaggtatggggtatataggaactctctctgcactaccttcacagtagttctgtaaaccttaaaatgttctaaaattaaaagttgacttaaaaagatcatttgagattactgtttttaattagccagaatatctaaaactatgaataaattatgaaagagcctagtttttgtcacttaatgaaaacagtgatggcttagaagtcctaaatgataagcacagcaatattcactattctttgctattcagtatttgcatggcttcttcatttaatttgaaaagttgtaaactgataaaacactataacatgattcactggctcaaaactacttggattagtcttactatttgtgctaaattggtgtttagattacttaatctattttctcttactttgttttagatgaattaaataatcttggtcatcctggtgagtaatacaaacataaaactttagttttagatttttaagttgttgaatgcagcaaagttaccgtaggtactcttttgctacagtaatactagtaacttttttctctttattgaaataatataatttaaggttgaaattaactacatgaagtacaattttatacaagtgatacattaaaaatattttaggttataaaactgtaagggtagaaaagaagtgtttgaggtaacataaaacctcaaggtattatcattgtgtattactccttatatcataacaaggaagttaatgggggaagtacgtgacctttaatctgaaagcaggaagcagtgtttgacagagtgacaggggtaacatttctgaactgatcagacccctgggacctttttcttggtgcctcagtcatacagcatatctgaactagttgggtgggtgcctatatctggagtaagaagtgtgtttgtggggatcattggcatcgtacaggtcggttggtcagtgaccatttcttaatgagtgacagttgtcaagagtatgtagaactctgtaggctaattttaattagaacagatttctaataagttaagccttcacctgagataaaaggcatatcaacagtgagaactacatgaagacacaggatatcaacctcgtgtaggctttctgaaagacaatgatggaacctgtggatagatctgaaaataaaacctttcaggaatagtttaagaaggtggttatgtcatttaatatttgtagaaaaccctattacttctccacttatttctcattattttagcatcattactagtttgcttagtgtcatactcatattgcattagcaaacatctattattgtgaatgccattgggctgtgctgactgtatataagcaaactagacacagcagaaagtccccattacctgtgcgtcattctccttgctgtagtgtcctcaaattcacataaagcctcaatgagacctgcctcaagtaggtcttgaactgtcaaaaaccatcctagtaattgtttctcttactgggggagaatagggggtctggatagaatcccctttcctaaattagtctgttaattcttgcttttctttaatgaacattatgaaaagttatttcagaaaaacttttgtaaatagccaccactaagattctaaaattttcctggccctttgagtttttcctcatttcccacaattcagggagtaccaaaaatttaggtttaaaagaagaatgttgtatagggaaagcttttaataggcttcagtggcatgtatttgaccagtagtacaaagttatctcccgacagtagtggacacacaactgatgaactacatctttccctacatggtgcttcaggtgcggggcgggattttattttatgtatactagagggtgaaagcatagaatccagaaggagactccctaagttagtatccagatttgctacttactagcttcataactttgggcaagtgactttaatctctctctgccttaatttccttatctatataatggggttaataatagtaggcacctcatagggtagagtgaggtttcattagatctgttatatataaagcatatagaacggtgccagctgaggcatcaggaaatggtaactactgctacttcctattgtgaacaccaccatcgtttttttccattcaagagtgtttttattaaaaatctgaagagtagaaactatattctgtaagtgatgctgctgatgttatatacttttcatgtatctttaactctggaaatataccatggatcttacatgttttgcttttttatctttgtatagataataaagagcaaacaactgaccagcctttgggtgagtagaactttaaaatgcattatcaaagtataattattgtgtataactccagaaggaatttaagacattttaatttggttttttaaagaaatgtgaataacattgggaccaaatgttttatttttttgtatctgtaaaagaaggtttagaagaggaggcttaaaaatgattacaaattcagtttctagggtcaagtcaacttctgtggagtgatttgtgtgtttctcacgatatgcaaacagacatgcgtacaaaaagaaacatgtacatgctgcatagttagcatagaggaggaagtggttagtgctgtctcttggtgagggatagaaatcacaaaggctgcagtagctttagcgtttgctcccctgtcttctccaatggaaagagaaaagaatttaggataaaatgtaaacgaacagttgcatttgaagaatgcctgggacaagaaaatgtaagggagaaaactttagcagataaaagtttagcagattaacatttaaagatggtaaaaatagctaacagcttgatgctggcagaagccagataaaatatgtctaaaatttgtccattggattcagctactgaagatgtgattggtggctttgagtggaatgttgaaagtgcctaatatgtgtcagttactgagttatgctgggaatttaaacatggatacaatgtataaaatagtggaaaaagaaagattcagaagtgaacaaatgaagacagtacatattaatttgttggaaagaaagagtggtttgaaattaactagatagggcatatattcaaagtgttttggtaggaggggaaaatgtgaggatatttacatttggaaaggaagtatctgttgagactgtgtagattagagtgatccatcaaagagaggacaatttatagagcaagttcctagaagagatgatagggatttgggccaaggtgaaaacaagagaaattggctttaatcagaatgttgaaacctcttttgagattaaaaagaaggagagattggtgaacagatagatttattgggaagctgaggacatttttagtttatgttttttgtttctaagtaattaggcgtagtaatatgcttaaaagattgaggaaaaggctgggcatggtggctcacacctgtagtcccagcactttgtgaggccgaggcaggcaggatcacctggggtcagaagattgagatcagcctaaccaacatggagaaaccccgtctctactaaaaatacaaaaattagctgggcattgtggtgcatgcctgtaatcccagctacgtaggaggctgaggcagaagaatctcttgaacccgagaggtggaggttgtggtgagctgagatcgtgccattgcacttcagctgggcaacgagagtgaaactctgtctcaaaaaaaaaaaaaaagattgagggaaaaagagtaaagtaaggctgaatatagatcttattctatggcagaggcttagaggctaaagaaaatggaagcaaggtcttacaagtctgatctacaagtgaatgtgtattgagagtccaactaagacttttaaagagtaagaatttataatggttcagatcagttgtgtgctttttctgtagcagatctcagctttaaaatagagaagataggctgggtgtggtggtacacgcctgtaatcccagctactcgggaagctgaggcacgagaatcacttgaacccaggaggcggaggttgcagtgagtggagattgtgccactgcactccagcctgggcgacagagtaagactcttgtctcaaaaaaaaaaaaaaaaaaaaagaaacctgctatgtttcattcatagtggtaagttttcatgtattccagctccatgatcttttctttagatcctccagacagacctcactgattaagaaatacctattaaaatagtgttctgaacaaaggcatagccatcatattctgtagagaggagcatacatatgtcttaggtacacaaaatgacaagatccaaatgtaactgggttagttgctgaagatggtttaatcacaaatatgcatttaatagtaatgctaataaactaagtgttttcacctagtgaaatgtttaatttaaccctgagatgtaggtatttttcctcatttttagtagatgaaaatttaaaactgtaagtgtttaataaaacttgctcaggattatacaatgtagtagttgagacaggattgaaacccatctatctctcattccatagcctccgttagctccattatgccaggtattctttctcaaacatgtcccaattgaaagaataacaagataaatggaatatcaggtcaacttctatcattgaagttcactaaacatttatctaatgtttcatctgtgctttatgacaggcatcccccacccccaggctgtggaccagaactggtctgtggcctgttaggaactgagacacacagcaggaggcgagtgagcgagcattaccacctgagctctgcctcctgtcagatcagcagcggcatttgattctcataggagtgtgaaccctattgtgcactccttaggagaatctaactaatgcctgatgatctgagatggaacaatttcatctcaaaaccacccctcccctgacaccgtccatggaaaaattgtcttccacaaaactggtccctggtgccagaaaggttggggaccgctgcttaatgaaacaagagaacaagccttggtttgtgaattcaaggctttggatactaataggaggcagacattaaatgaataatatagtacatgctacatgcctagtagaaatatgtaaagaatctagaaattgttcatagaagatggtgatcagattagtcgaggagagttagagagggctttacctaagaggcaaagccaaggtgaggattttcaaggacgaattgggagctctcaaggggataaaatgaaaatatatgggatgagagttcattcagaaatgaaggagagggaaaaaagggtgaagacatggtaagaatggaggcatgaaatagatggtgtgggtgaggaacaaagttcagtattgctagaaggtagaaaactagggaaggagtggctggaggctatactggtaatgtagttatttattgctgaataacactgcaaaatttactagcttaagaacagcatcagttttattatctctcattgttctgtgggttggactgggtttagcaggtggttctgctggtctttcttggggtctctcatgcaactgcagtcagatgaggctgggactgccacattcaagatggctttgcttacatacctggcaccttagtgggggttggtgaaagactgtgaagactgaaaaaatctccctccctctctctctctctttctcttcctcttactctgtctctctgtctctccctctccttgtctgtctctctctgtcctcccctcctcttcccgcccccaacttctttctcttcgtttccctctccctctttcctttggttccttctccctccctgagtggtctctccatgtagctgttttctttatgtcgggctggatctccaaagtggaaactgtcagagcttttaagggcttagaccctgaactggcagaggggtcacacatattatgttgctcaaagaaagtcgtgatacagcccagattcacaggtgggggtgactgtactacacaagggcaaggatactgtggtttgctgggggctacctgctaccacatctggaaagataggcatggactagaatgcaaatggccttgaatgccaaactacatcaccagtctaacccccagccactccttccctagtcctctaccttccagcaatactgagctgcctgttcctcacccacaccatcaaactgggactttattttgtaggacatggagagtcattaaaagatttaatacatgtgatttttaaataaatacttaatagcatttactatatgccagctccttttctaggtgcttctgaatattaactctatttagaaaagtaacataataatcagaattattagacatgggattaatgatataacaccagtttttgaagaatatattacattaaactttggaagacgtttaggatcatgagttaaaatgtctttctgaagtggcttcattattcttttgctgaatccactggcatttttgtttcacttttccaataaattgtttgtgttcaagaagttgtgggtagctcttacagtaaatatttttctacagaaaaactctttcatttatgttatcacttgaaaaccattataaattgctttatatttgccgtcttgaagttttctttattcctcactcttacctcctcaaattcaagttttattgttcgtttctctgtcgtgtcctttttcctctccctttctactacttctcgatcttccatccaccccagttcacctgtcacccaggaactgttttacaagtagattggacaggtaagatttacttacccaccatctttttcaccagtaaagtcaaggaaatgctgtaagacatcttaggaactagctattaaaaattatcattggaggaaaattttagaagtgttatagacaattatcgatacatatgttttaagacctgtagttctcacactgttgaacccgtgcattctgtaaactgtaccaagtattctttcccaaatagagaacaaaaccagtgaataatgatttgatatcagcaaaaacatcccatgatgcttagtttgacagttaattttatttccccaaagacccagtgatttttttattatatacttataattgttttctaccaataaaaatctatgatgtgtataattaaatgatggtattccatggaaaaatggaattatttacaagcattttactaccccagtaactttttaacctcttgctgtaaacctatgatttggactataatgatgtaaagcagagacaatgcattctcacatttcccctcaccttagaagaagactgatttgagtctgtcactctgttgaggttggatccttattctaatagcattgatggactcaaaaaaatgtgctgtggatcagccagctaagagtcttgctgtagcaggtactttagtgtaagaatactagtttattttaaaagaaattttaaaaaggccaggcgtggtggctcacacctgtaatcccagcactttggaaggccgaggtgggcagatcacctgaggtcaggagttcgagaccaccccgacctaagtggagaaaccccatctctactaaaaatacaaaattagctgggcgtggtggcgcatgcctgtaatcccagctactcgggaggctgaggtgggagaatcgcttgaacccgggaggcagaaggttgcagtgagctgagatcatgccattgcactccagcctgggcaacaagagcgaaactccgtctcaaaaaaaaggaaatacaagtgatgttaagttttatgctgcctcctattgaaatccatgctgagtattctccgctttttcattgaattaataatgcggcttaagtatcatttcactgttatgtatattcataacactgggcagttggctagaaatctctgaacatgtacatatagaatagagatgacatgatataaaattactgaggcttttcacaaagtagagttttttttatcctttgagagagtcacagtcttttaaattgatgctagttttaacactaggtttaagtgttccatggaaagaaaagcaatttcaccagagagatttttggtgaaataatcatctcaattatttgaaacatctgaaattacatattgtagacgtcgagtcagcaatgtgattattcatgcctgtttcaacttcataagagtagtattcataataacttacaaataaactacttagcagcactttgtggcaggggttggttaccaagtcctggcctgcgtcagagggggtggcctgcagttctacccaggcggctcttcagccagttggctggggctgcaggtgctcttgtcaccctgtctctctgctccctggcatttctgtcactgctgctactattacgggtgctgcacacgccccactgtcagccctcaagaagaaagccgtcagaggctattattgtcacgggatggtcttgaggttttggtgtgttctttatttttttttttttatttttttcttccctttgataccagtgggtcttgagtttttaaccattgaccccattccaggctatcaaagaaaggtaccgtgttgaagacctcataagcactaagctaggtctggctttccacactgttttagatgggctgcacacctggttaagctagctgctactttttaaggcatagatacagatctttttttctcttatgaacaaaaaaactgtttctatcagaatacattatctttgagcaaagtctcagtgcactaagttcaaaaaatgaacttttaaggtactcatacacaaaatcttcacatacccctgaaatagcctcatctgagtcaaatgggggagtatttttaaaagatgctaagaggagacggtagtacatccacatggctactgcagaaaccaagaatacagtacccgtgaagttctctctctctttgatatttcccctcattcactctgatgggattcttcctgtcccttttttagttatcttgtttttagcctcttccattctcagcaaaacagaacctaatttgatgggaacccaatttcaaatattccttgtttaaattttctccaaaagtctagttgaatattatatcccttttgttataatttaataaaagtaaactttaatattaattactgttatgtttcatatacagctaataaatatcctttgcctggctctcaaaagtgtgaatatgcttaatttcagtttgatgattttagcatctgtgttcctcagagaatattgatctgcttacataaatagttctaaaatgaaattaaataatgaaatcttatttgaaatgaaataatgcaatcttaaagcatactttttattataataccatctccataggttttgttttaatctttatatcttctttaaacaccccctttctttttttttcaaagcgaaggacaaggttgcccttttgataggaaatatgaattaccgggagcaccccaagctcaaagctcctttggtggatgtgtacgaattgactaacttactgagacagctggacttcaaagtggtttcactgttggatcttactgaatatgagatgcgtaatgctgtggatgagtttttactccttttagacaagggagtatatggtaagatatttataatgtttgtttttacaattatccattattcttttcattatacaagttaggttaagaattgaaaatcagataaagataaggtaaacatgttgttgaatggaagagttttatttttcttattaagatgatacatttgatcttcattccatctgaataactaattagcttcatgtctttacttttatgtttcctgttttgtcaaaacatatttttcttactagaattcttacctgtcttttgtgatttttttttaattgatagagccacagtataataaaacttgataaccacacagcaaaatttacattcatatgcgtaaaatattacagtatgtggggttttctttgaggggggtagcataaaaggttctagtagaatgtatattttgtatgtttccttttcctaactattgcatggtcttttctagtcttttagtgagaactagattttaacaaggaaatgttggtggatggggcatataatagtaatttgtaaattaaagttctatacagatatgcttagaaatgtacctctacaaaaattcttacagtaaatatttaatgttttttccccattctttcacctaaatatattaacactgcatatatggtaaagaatttcaaaggagacagaatgtgctgtcactagctaatcatttatttggtgatttatttctttcaatatgggaaggccagctgttgagctcatctgaaccgtgttttgcaggattgtgcttccatgacattgtgcaataacatcagattgccagggaagtgacatttccaggcctgttgttaggcatgcaatgataaacaaaaagtaccggtttggctcctgtatctttccagttattttattttaataatttctgaatttactcttgttatttataattagattgatatgataaggcaagtttggtcagaatttttaatggtgctcaaagtagaatttttaatggaacaaaagctttttttttccccccaagatttaccacactgttgtgtaagggatggggaaaagtctcaaaatcttacttaaatgagtttccctctctaaatagtgaggatttagagaaagacaaatgaagttaacaaggtaaacacctcaaatgtgagatttcagctattatgctgatgtgttaataaaactttatttataactcttatggactgatgactaatgggtgaatccatccatttttttcttatgaaaatatgaaagaatatacaatgcaaatatgccaccttggtaattggcttatacaggttgagcattcctaatctgaaaatccaaagtctaaaacttcgtgagtgccaacatgatgccacaagtggaaaattttacaccttacgtcatgaggggtcgcagttaaaactttgtatcatgcacaaaattatttaaaatattgtataaaattaccttcaggctatgtgtataatatgtatatgaaacataaatgaggctgggcatggtggctcatgcctgtaatctcagcactttgggaggccgaggtgggtggatcacttgagcccaggagtttgagaccagcctgggcaacatggcgaaaccccatctctactaaaaatacaaaaattgggccggacgcagtggcttacgtctgtaatcccagcactttgggaggccaaggcaggcagatcacctgaggtcaggagttcgagaccctcctgtccaacatggtgaaatcccatctctactaaaaatgtatggtggcagtcatctgtaatcccagctactcaagaggctgaggcaggagaatggtttaaacccgggaggtgaaggttgcagtaagccgagatcacaccactgcacttcagcctgggtgacagagcaagactccgtctcaaaaaaaaaaaaaatagaataaaataaaataaaaacacgaaaattagctgggcgtggtggtgcatgcctgtaatcccagctactcaagaggctgagacacaagaatcgcttgaacccaggaggcagaggttgcagtgaaccaagatcacaccactgtactgcagcctaggcgacagaatgagacttggaatcttggtctcaaaaaagaaaagaaaaacataaatgagtttcatgtttagacttgggtggcatccccaagataacctcattatgtatacgtaaatattccaaaatctggaaaaaaaaaatctgaaacacttctggtcccaagtctttcggataaaggatactcaacctgtattttcaatctggcatcaggggtgttgtttgtttttatattatacaattgatctcagcttttaaggtgcctacgtgacataaaaaggaaaaggcttccaaaacttcactagaagtgatgaggtgtaaggaaaaaatattgatcagtttaggtttctgtattggtgaagtatttaaagattgagggaatcatatgaagaattactaccttggttgtttattctcatttcttattgatattttcaccttggcttttaagccctttgtttgacttttaaaaccaaatcctgtggccagggcatggcggctcacacctgtaatcccagcactttgggaggccaaggcgggcagatcacctaaggtcaggagttcgagaccagcctggccaacatggtgaaaccccgtctctactaaaagtacaaaaattagcccagcgtgatggtgggcacctgtaatcccagctacttgggaagctgaggcaggagaatcacttgaacttgggagggggaggttgcagtgagccaagatcatgccactgcactccagcctgggcaacaaagcgagactccatctcaaaataacaaaaacagatcctttagttgcccctgtgaagtagagaaccagaaatattaaaaattgtgacaagactgcagtttaggctgaagctttgccccaatataaaaacgtcatcttggagtacaaaataaagaggcatgttaaagcaaaatgtcagcttaagaaagctagaaaacttttaaatcctactgattcgtgtcttaacagggtggctgcattatattttgaagtattgtgaatattccaaacatcagacacatctacactaaatgtaagtgtggtagaggcttgagggtttagggcatatcataaagaaacctttagtttttcttttggactatgcctttaccgctagttgatattaccaggggactcagtgcttgagggctgtgggggaagatggaaggcagagtcacaggaatttcagcatgaacagctagatacggagaacagaggaactcgagttcatgcccttttatattatattgcacgcaggtttgtagaagaaataaaagttgcaacagaacagacaataattcagttttaaacatatgtaaacataaaaaacagaaaccaaaaccagaaataactgtccttaaaaatacaaaaatacatgtccttaaagataaataaggagaaagatttctagttatgttgtatagatggccaggataaaaagtaaccctttggcctgagatctatccctgcatagcctttctgtgttcatcgcttgctgcagcttagttgtgctttcgtgtagaagaacggtaaaggagtcttgtcggaatatggcaaaagtgttattcggcctgcagcggagcagctgttcagttcacatagctcagtggttaagcagtgggccttagcatagctagcctgggttcaaagctttggctttctgctgacttagctgtgtgactgtggttctttaacttttctaagccaaaaggaatctacaaaatggatagaactaaattaatgaggtttacaggataagataaaataattatccctgtgcctggcacactaaaaatgctcaaaatattgtacctattattgttgtcgtttcctgtcaatttattaaagacattcaagcactttttcatctttagattggggatttggactaggtagcattctatttcaggcctcaatgagagaaacccagctttaatcagtttctgtgtattaagggtctacctaaggttttttgggttttttttttggttttgggtttttgtttgttttgttttttgatacggatggagtcttgctctgtcgcccaggctggagtgcggtggcgcaatctcggctcacggcaacctctgcctcctgggttcaagcagttctcctgcctgagcccccagagtagctgggattacaggcacatgccaccaacgcctggctaattttttgtatttttagtagagacaggcttcactgtgttagccaggatggtctcgctctatctcctgaccttgtgatccacccaccttggcctcccaaaaggccaggcgtgagccactgcacccagcctgccaaaggttttttgtgtttttttttttgttttttttttttttgaggaaaaaaagtcagggggtttaaagctgtagtgtagtaaaacagtgaaaagccagtgcactgacattttacgttgtctgagagtcgagttacctaaaaagccagcagtagattatagagacagtatcatatagcacagtagcgaggctggcctgcatctgtattttggttctgtcacttactaggcatttcagtttgggtgagcttttaaacctcttcatgtctcagttttcccatctgtaaaagagggatgttaatattacctactttgttgtgaggattgtgtgaggcaatgtaactagtgacctttcttggaaccgtgcctggcacatagtaagtgccgtgtaagcctgctggggtggcgggtgttgtgctcatcagccactcactgtgctaagtggagtgcatattcagttgagtggaaaagtttttcatttaaatgattattttctctgtagacaaaaataaatatctgtgactatattcttgaatcatcctcccaagaaataaaactccctaaagatctaatttgcagaattgtatttctaagtacagtaagttctttgacatttgtttaaaaaatacctattttcttctctatccttgagtaatgggatggttaactaaataaataagcagtactagagatggaatttaaaaacaacaacaacaacgatttgggccacacacggtggctcacacctataatcctaacagtgggaagctaaggtgggagggttgcttgagcccaggagtttgagaccagccttggacaatatagtgagacctcatctctacaaaaaatttaaaaattagccaggcatggtggcacatgcctgtggtcccagctacttgggaggctaaggtgggaggatagcttgagcctgtgaggtcgaagctgcagtgagctgtgatcacactgctgcactccagtatgggcaacagagcaagaccctgtctcaaataaataaataaataaattttttaaaaaaatgatttggactagttcattttacacaaaagtacttaattcccctcaatataatttggttgcagactttgatacagaatagttacacttttcgtaagacattttgggaaagagaaaaaatattttggtgttaagtgccttaattccattcagcagttgcagggctgggcatgtggcattaatgtaacagaacaacattcagcttttccctggatgaatggaagctaagccttccctcagagttgtatcttcaccccaatcaagtcttgctggagccagacgtattacctgacatgagggaggcagcacccaggcctgctgtcagtcgtctctgagtaataccagttgttgaaatggtaccatttctactaaaagtcagacccttgaaaagagacctccagatctgaccctgtcttgattggtttgcattgttaatttaatgcaattcagtaagtatttactgagttatttttgttacatctatagtccagatgaaggagtatgctatgtgctgagagaaataatagtgaataaagatcatgatctgtcctcctaagaaaattacagtcctgggccgggcacggtggctcaacgcctgtaatcccagcactttgggaggccgaggcaggcagatcacctgaggtctggagtttgagaccagcctgaccaacatggagaaaccctgtctctactaaaaatacaaaattggctgggcatggtggcgtatgcctgtaatcccagctacccgggaggctgaggcaggagaatcacttgaacccgggaggcggaggttgcagtgagctgagatcacaccattgcactccagcctgggcaacaagagtgaaactccgtctcaaaaaaaaaaaaaaaagaaaaaaaaaattatagtcctttaatacaaggagaaaaaaacactatggagtcaaaacatcaactctgtgattttaagcaaatcatttaatctttgtaatttaattttctcatctataaaataagggcagaaatcacttaaagttgttatatggattaaaattagattgtgtatatgaaagtcctttgaaaaccaagaaaatgttatacaggttgaatatctctaatctgaaaatcccaaatccaaaacactcctggtcccaaacatttcagataagagctactcagagtgtgtaaatgtaaaagattagtgtcattatgatttcttatcagaaaaactaagtagacataggactatagaatgtcaggaaaagccagtatgtgattgtcagaaagtgctgctacagcatttcaaagtagggagaatttgaagtgtgttagaaagccacaaaccagttaccaggtagtagttaccaggtgagtaacttgctaaggattctgaactttggaaataacccttgaggactggttatggtttgggtagatagaacggagatagagtaacttgagcaaagttgtggacgttaaaaataagtttatcttgctcttgaagcagtaaagagactgatggaaaataaagttatattttgaatacttgatggaggtgtataagttgtaccctttttaaagtgtataatttggtgatttcagtatcttcacaaagtgggcatcagtcaccactacctaacttcagaacatttccatcaccccaaaaagaaaccccatatccattaacagtcactcccattcctccttaccccagcccctggcaaccaccaatctattttctgtttctgtggatttgcctattctggacatttcatataaatggaatcacccaatatgtggccttttatgtctgccttctttcacttcacatgttttcaaagttcattcatattgtagcatgtactagaacttcattattttagggctagataatattctattatatgattatattttgtttatccatttatcatctcatggacatttttggacatgattaataatactgctgtgagcatttgtgtacacattcttgtgtggacgtagtttccatttctcttcggtatgtacctggaagtgaaattcctgggtcatatggtaatctatatttaactttttgaggaactgcaaaactctttccaaagttcttacaccattttacatttgtgccaccagaaatgaatgagggttccaatttctctgcatccttgccaacacttgttcttgtctgtcttttttattgtagccatcctggtgagtttaaaatgacttggaactagtggctaatgatgttgagcatcttttcatgtgcatatttgccactcatatatcctctttggagaagcatcagatcctttgcctatttttaaatcaagtcattagtcttttttttttgagatggagtcttgccctgttgcccaggctggagtgctagtggcacgatctcagcttactgcaacctctgcctcccaggttcaagcgattctcctgccttagcctcccaagtagctgggattacaggctcccaccaccacacttagctggatttttgtatttttagtagaaacggggtttcaccatgttggccaggctggtcttgaactcctgacctcaggtgatccacccaccttggcctcccaaagtgctgggattacaggcttgagcctccgcgcctggccgtcattagtctttttattgatgagtggaagagttctttattctggatacaagctgtccttatcagataaatgatttgcaaatattttctcccattgtgtgggttgtcttttcactttacctgatcttcgtggtttattgaattaaatccattcttttggtcattatttttaaaaccctatctgtgcactcctttttaaaattccctgtgtgtgcagtcttattttcattcacaacagtaatttagttttttgctaggctagtctcttttctgttagctttcattccaggtccaatccgtgtttatttctgttctcctgcccataatctacctcgctctctctctgcctttgcaaatttctagccattccctctcttaagaccatcccctgttgtttcacttcatactgatattcctctctactttactcatttcatacgtacatggtggttgtcccactaacatgatttatggcatttaattatgtgatgactttcattgttgcttgataacataaacgtgtgaatcgtgtgaattcatgtatggagatacatgaatctcctgatctcctgcttagaggtcaggaactttgtccttcttttttgtttctctcagtgcctacatgataacttccagtgcacacatgagctgtaatataaacccacacttgaaaatgggtatatccattttctcattttagctgaaacgtatttgaaagaaccatttttctcattttaatcgaaattcagaaaaagcagacgacctggattttgtcctgtaggaccacatgaagcaaattgtctttaattctcaaagccgcattctctgctaggagtcggggccataattacaatggattagctacttttggttccctgtctaaatggcttttactatttgctttaaaataccctgtaaagaaatcattaaatccagaatattgagagagcaaaatcagtgggctccagatattgcaagcagaggggaggatatcttcaaaagtgttttgtccagtacttttatgaagaagttcagactgatatttttgttgttttttacagccaaaacaaatttcaagaaaacattgagttgtttgggttagtttttatagtatcacttctcagtaaggaaatatgattcatctgttgagtcctaaaactatcccaaattttagattattgagtcaaaagactctagatggaagattgatatttatatctcatagcaaaaagaaaaaatagcaatctgcgaagtcagatttcccatctctgattataaaactatatattttaataacccttaactgtttatggtaatacctgcagtttcttgacttcatattgcagttgctattcatctgaattgtgtttgttcatccgttaaatacttactaagctcctgctctctatgccaggaacacacaaataaataaatgtaagactatctctgccctaacagaactcctagcttcatggaggagacaaatgagtcaggagagaaatcctagctgcattcttttttatatatcataacataaaattgtattttatattatactattggttacaaatatattttataaattaggatatacttcagacagcattttgatattgtcttgaaatgcaaattttaagtgcagactgttggtaatttatttatttatttatttattttgagacagagttttgctctgtcgcccagggtggagtacagtggcatgatctcagcttacagcaatctccacctccaaggttcaagtgattctcctgcctcagtctcccaagtagctgggattacaggtgcccaccaccacgcccagccaatttttgtatttttaggagagatggggtttcaccacgttggccaggctggtttcgaacccctgacctcaagtgatctgcctgcctcggcctcccaaagtgctgggattataggtgtgagccgtcatgcctggcctgttgccaataattttaaatgcaaaataacattgtctatatttataattgggtatttcttacatatgctcacatcaacctgaagaaaattaaagtcaaggtttttctacaaaaagttatgcagtctgtatgttcagagtgcatttagaattgacatctatctctctcttatttttcctcttttcagggttattatattatgcaggacatggttatgaaaattttgggaacagcttcatggtccccgttgatgctccaaatccatataggtctgaaaattgtctgtgtgtacaaaatatactgaaattgatgcaagaaaaagaaactggacttaatgtgttcttattggatatgtgtaggaaaaggtaagttttctaatctttattaaagaattgttggagttaaatatcgaccatgacaaactagagaaacctgtgaaatgctaaaagccatttgcgtttgtgaattttagtttatacattgaaactggaagaacaaaactagaggaaaatacatttactccatgtatatctaattattttaactcttcatatttgctatagaacacaaatgaagaactaaagggcatgggcatttactcacactacaggggattcaactctccagaatgcctttagatgactttaataatcactatagttattccctcaggaattaacaaaaccaacacccatggagttgggatctctgctcactagtcagtcctggtcttccagacatggaatgagtagccgaagcagatgtttggaggtttggatcccatttgtctgccattgcctttctaaggagtagaaccaatgactgttcctctagatttactatttttttgcttgctcagcatttaccaatcaaaatccaatgccagagttcaaatgcaactctagttttaaagctaacaaggagttagtgggttattttgggtagatatgtagctacctagatgaaaaattttgaatctataattttaaattatgtattctaaaaaactgttgtattttctcattatttatacccttttaagaatgctctttaacttttcatatttctatctgccctcctccgcctcccttaaatagaaatgactacgatgataccattccaatcttggatgcactaaaagtcaccgccaatattgtgtttggatatgccacgtaagaacatttgatgtttacgttgaagtttcctttattgtttgatgtctttttgtttttgctttttaggagcaggggtcttaactctgtcacccaggctggagtgcagaggcgccatcatagctcactgctcctgggctcaagcgatcctcctgcctcagccttctgagtcgctgggattacaggcatgtgccactgtgcctggcccctgagggttttttgattatagattagaggcctagaaaatacctatagacatgtaggcataaatttacctccttgatattctgcgtagaaaattttaaatgatcgactttagcattccatatcatggtatcttaattattaagcccaaattgggcatgtaattcctgcttaaagattaactctttaattatcaatgtcatgtgagaggcagaagagaaaatgaagcttattggtgtatacagaagtcccatgtggcaagtgtttgcttttctaacattttctttttaaaaaattatttttattggatattgacaagttataattgtatgtatttatgggatacaaagatatgctatgatgtacgtattcaatgtggaatgattgaatcaagataattcacatatcacctcaaatacttatcttttttcctaactgaaacattgtaccctgtgactaacagtccccacgctgtccccacccccccccagcctctggtaaccaccattctgctgggtgcttctctgagttcatttttattagcatccacatataagtgagaacatacagtatttgcctttctgtgcctggcttaacttctttttctatttttaaggtgtcaaggagcagaagcttttgaaatccagcattctggattggcaaatggaatctttatgaaatttttaaaagacagattattagaagataagaaaatcactgtgttactggatgaagttgcagaaggtaaaataaaaaataaagagaaaagtactcagaaaaaggagagcaggggagacacacctattcagggttccctctctggtgattgttttattcttattatgtgggtttggaattagtacctactttataaaacaatttttatattaatataacgttcagcaacacttctgctatttaatgtcatctttccttcccttttgacctagctctccaccatctgtgcagcattactcagactacaaggctaagcctcggcacagtcattaataaagttgaattctcagagctctactttgcttctatgcccagtgccttggtactggcaaatctccctatttgagggtgggtgggtggcatggaggggtggtggggaattgtccagtgagcagtctctcccaggatgggagagagaaaactttacagaaatttttagacactgctgggaaaagctgagttcatttttttccctgatgaacttagtagtttttaaatcctgatttaaggatgtgatcctagggggtctaatgccacatcttccatttctatctgttctccctgcctgctggtataatgctgtgcatatgtcagatgctgaacaagtacctattatttcagtagattgcactgtgttttttgaaaaaacattttataagccatagcaaaaagaaggtaacttggccaggtatggtggctcaagcctgtaatcccagcactttgggaagctgaggcaggaggatcacttaaggccaagagttcaagaccagcctaggcaacatagcgagaccctgtcttcaaaataaaaaataaaaataaaaaagaagaaattattttacaaactagcaccactagaaaatggagtttcatggatgttccagtgatggcagtttgggtataaggtgtttgaccaactgtcagccatatttattttcatgtttttatctgtgtagctattttagatcacttgacttagccacttttccatttaacataaccagccagggctttggacttcctgccaccctcccgcttcatccagagaagttccacttttatttgttttctacattaggcttcttctgaagcttacatttgaaggaaaggctctgctgctttaaaaaaaaaaaaagaaagaaagaaaacctttggattatgtcagttatattcaaactgagatccagtaaggtgctccagaaactctacagtgttttatttcaatttcgtttttaagtccattttaactattttaaaacttaataaaaagcaccatgctcactcacatatgatatttaccaaattgtcatagcaatgaatggcatcccgatatgtgctgtgaggatatttgaacttcttataaacatcttagacagttttgcttttcgctgatctttttcagtcctaccatgtctgcttaaccagaattgcccaggcaggaagaccctgtagtgtacatggagcacactcagctcagtgccgtgcacattgtgcccttcgtgggtaacggcccactcattgtacaaaataagtaaaggcctaatagtatcatgataaataatacagttaaatctagcccttattttgagttttggatgctttgtgtctgacccctgtcttagtagtaaagagcaaaagtagttgtatgaaatttttcacaagtcatccaattttgaaacaaaactttgctgtttctccctttggatcttccagattacttaattgaaactcattccatggctgggcatggtggctcacacctgtaatcccagcactttgggaggctgaggtaggaggattgcttgagcccaggaattcaagaccagtctgggcaacacagcaagaccccatctcaatttaaaaaaaaaattatttggggccaggtacagtggctcatgcctgtaatcccagcatttggggaggctgaggcaggagaatcacttgaacacagaagtttgagaccaacctaggcaacattgtcagaccccccatctctataaaaatttaaaaaattagccaggcattatggtgtgcacctgcagtgccagctactcgcgagacttaggtgggaggattgctcgagcctggcagtttgagactgtagtaagtatgaccacaccactgctctccagcatgtgtgacagagcaagccccatctcaaaaaaaaaaaaaaagaaaattccagagggagaaaagtattcacagattataagccaagcagttgaaggggaaaataaacatgttaccaatttctttttttaattttttggtttctttgtgtgagactacagagtctctgtcgcgcaggctagagtgcagtggcatgatcttggcttactgcaacgtccacctcccaggttcaagtgatcctcttgccgcagcctcccaagtagctgggactaaaggcacacaccaccacgtccggctaatttttgtatttttggtagagatagggtttcgccatgttggccaggcctgtctcgaactcctggcctcaagtgatccaccggcctcagcctcccaaagttctgggattacagacgtgagccaccacgcccggcccaccttaccaatttcaactgtgtgcaaggaaaacaaaatatgaggtaaattggttgttataatgctacagccatcaatctgtaacgtgacttttatttttgtactattcaggacagcattattattagaagtgttgaacatactactgaaggttttcattgtgagtagatgttcgatatgaatataggaccttgaagtaacctacatctaattataggacccctcttctcccttcccccactccatgataactaccattctaaacttattcctttttcgttttacatagttttattgagtttatatatacccaaaaaagtatgcgtagttttgtttttaacttcataaaaaggtattatgctctatgtagtcttttgggactagatttttttggttaatattatgttgctaagattgatccctattgttgcatgactgtagtttttaactgctacgtaatattctgttatgcaaacatactacagtttttttcaactactctcctgtgttggtgagcatttgagttagttgtaggtttttgctatgttaacagtgctatcattaacagtcttgtgtatgtctcctggaatatgtatgcatgaatttctttgcagtataattctacaacttggaattgctgggtcatagggtgtgacagtattccattttgagagagaatgccagacagttttgtaaagtggttgccgagtctacacttaaccctactccccacggccagcaagggataatgtgaatctgtactctctccatcacttgatagtcagacttttttatttttgccaaatgttaaatagtatctcatgtgatattgaacattgttcatatttttaatagctatatgtatatcttatgtgaaacatctttttatgtcatttgtgcattcttctgtgtgtgtgtgtgtgtgtgtgttttggcttattgatttagaggaatgttgtatgtgttcttgatataatactagcgaggaccgctaagacacaattgaataggtagttgtgggcatccttgtcttgtttctgactttaaaggaaatactgctaatgtcttcacatttagaataatattgtaagtttttttattaacactttatcaggttaaggaagttctcttaatttttttgaaaatttttattatgaataaatgaacaagattaaatggtttttctgcagctatgaagaagaaaataggatgtttcttttctttcaatttcttaatatggtgagttaaatttatagatagtctaacattaatccaacttgagataaatcactttcattgggatgtatatttttaatacactactagatttaatttgccatcattctgtttagaattttcatatctatattcatatgggaaatgggcctgtaattttactttcttatagtatttggtttaattttatgagaaaataaaattagtatttagtggtatcagtgttatcagtatcagtggcatacagagtatcagtgttatctgatagaatgtagcgtaggccttgtggaatgagatggaggacaaccaagatggttgattttatgtcaacttttgccaggcctcagtgccaagatatttagtccagcattattcaagatgtttctaggtgatggatccaacattattctggataagattaaagtttaaattgatggactttcagtaaagtagattgctctccataatgtgaatgggcctcattcagttagctgaaggccttaatggagcaaagactgacctcccacaagcatggagtttgctagcagcccgcctctggggctcaaactacaactctcctctgcatccccagcctgcctgcctgcaggtttcagacttgcaccgccacaattcataaaccaataccttaagtcagtcccttcttctcactgtccctctatgtacacacatacacacacacacacacacacacgtgtacgtgtacacatgcgcccatcttgttggtactgcttctctggagaactctaatacagaagaagtacaccctgttgtttactgggaacttttgtataaattatgatctgttccctaatgtttatggtagaacttgcctataaaccaacctgggattggtatttttttggtagaagatttttaaccactggttcagtatcttgaatatttcttgtaccatataggcttttcatttcttgagtcaattttgataagttatattttcctaggaatttgggcagttttcaaattcgttgtcatttagttgctcatatttctaatagtattctttaatctctgccttatccatagttatatatccgttttcatcagtattacttgtacttactttccttttttatttattgccagcttttgccaattgtgctatttcattttgaagaaccaatctttgactctgttgatttcttctactttttcattgttttctacatcattaacttctgctgtttatttatgtcttgccttgcatttattatttctttttctaacatcatcgtagttattcacttttagcctattttttccaatttaagtttctaaggctttacatttctcttaaaacatcactttcatcacacatcctataagtttagggattttttttagttgactttttttttctttgacctttaagttatataatattatctttaattttcaaatatggcaggaattttcatttcactttttgctttttatttctaccttaattgctttgtgatcgaataatagtctgtctaattgctatgctttgaaatttgtggaggttttcattatggccaagtaaaagatgaaattttgtaaattttgcatgtgtacttgagaaaaatggatatttttgtagtaactggttgcagaactctatgtatgcccattaggtttggcgtattaatttttattgttttgttcagttctatatttctgctgattgtctctttgatcaataattgagatgttgaaatctctcaatttaccaaattttcttgtagttctagcactttttacttcatatatagtgactattttcgtgttttaaatgtttatattttcttattgaacctttatcattatgtagtgatgcctccatttcaaatgcttcttctctttttgtatcatactaacagagccacaccaacttcctttttgttgacctaatatgctattttttacacttttactttcctactcttaacccctaggctagcctgcttctctacacttttactttcaaacatttcatgtcattctgctttgctgtagcttttggaggcaccatataacagattgtttaaaatccaatctgataatcttggtcttttaatgagaaaatttagttaatttacatttgttattttttgtacctgttttaaccatctaattttttgatttggctcattttcttatcttttttaaaaaaattgtatttatatcttttcttctctaacaaataataattttaatgtactcctacaatacttggtatctccttttaactcccaacatgttgatttaacttagacttagttctggatcactatataattttgtctctttttttaaaaaaaagaaccttactattgttaatttataacatagtagacagaagtaggataaactataacttaaataatatacttctaaatttaaattgatgtgtatccatatacattagtctatctaaaacatgttgaatgaaaatggtacattacaaagacatacatagaacatttttgttgaattcaaaaacctaaaacattggcatatactatttatgaacacttacacacatgagtaaaaattaaaacatgcctgatatgtctggcacataataggtgctcaggaaatatttgttgagtgaataaatgatactgagaatataacctgataatgtaggatagttcttagcctaaatatttaaaacataagaattggtggtcttaaaaataatatttattttcatatcttttagatatgggtaagtgtcaccttaccaaaggcaaacaggctctagagattcgaagtagtttatctgagaagagagcacttactgatccaatacagggaacagaatattctgctgaatctcttgtgcggaatctacagtgggccaaggctcatggtacggtaaagcccattttttgttagatctacaatatacttaacgttaaatcataaagtttcttctgaataaataactttcctcccagttttacagtgaaaatattttggcctactaggcaaatctcaaaccaaacaaatatttcaattatggatattacactggcttatttgatttagaaatatcaaattatttagcccattattgtcactattggtaaaatttaaatgaccatttaaaaatttttctatttttaaaataggttaagtttccatttgtctaatacacaatcctttagattctcctatattgtgacctgtcgaaaatcatggattgggttctgatccagtctctaccactctatgaacatgttatctataacatgtaaataagaaatggtacctgcttcaggctgggtgtggtcgctcacgcctgtaatcctagcactttgggaggccaaggcaggtggatcacctgaggtcaggagttagacaccagcctggacaacatggcaaaacctcgtctctactaaaaatacaaaaagttagcggggtgtggtggcacgtgcctgtaatcccaactactagggtggctgaggcaagagaatctcttgaacctgagaggtggaggttgcagtgcagtgagcagagattgtcccactgcactccagtctgggcgacagagcgagactctgtctcgaaaagaaaaagaaatagtacctgcctcataggttattgggattgaatgagtgcataggtagaaatgagcatggcactcgacaagtcctctgtacttttgattattcgtataactgagcatcctctcttggacacttgatcagtaagttgagtgatcagcagagaagatgacgtgaaaatcaatctgtagcttaattaccttttggtaattgtgtatggtttaatgaaaaaataagtttaaattaccaattgaaataattttggattttctgagtccaagtatctagtctgtgagtctcttatagataattgaaaaataattgtatttaatgaacttctataaaatatctttattttcataaataataatttttgttcttggccaggtgtggtggctcacacctgtaatcccagcactttgggaggccaaggtgggtagatcacctgaggtcaggggttcaagaccagcctggccaacatggtgaaactccatctctactaaaaatacaaaaaattagctggtcatggtggcaggtgcctgtaatcccagctactctggaggctgagccaggagaatcacttgaacctgggagtcggagtttgcagtaagctgaggtcacgccattgcactccagcctgggcaacaagagcaaaactcagtctcaaaaaaagaatttattctctaatacatatttttagtaaattaacatattaaagcacattaaaatgtaaaatgctataaatatctcaccattccagataactggataagtaattgaatgtcttttctctaaaaaagatctaaacaacaaatagcaaaattacggtggtaaagatcaacaataaacgaaacttcataaaacaaaatgaaaaggtcatatagaaaatatttgtaacaaataagagaaaaaaaattaagaccctcctcagtaaacaagcaaatgatacaaattcaacaatccacactgctggaagtatagagaaaaattttttaaatggctaatgtaagtaattaaggaataattaaaactgatggtatctttctgctttttaataccatcaagtagacaaatgttttaaaaattaatactctgttttggacatgttatgctgaaactttatattccatgcaaattgaaaataatttgtcccatatgtaaaggaacaatcacatagctttatctatcttaaagcattacgtatatataaatattaactatgatagaaaaacaataaaacccagaggtattataaatattcaagagttaacagaatggttaaaggtaacaaactataatgtggctgttcagtgacattgtgctttattaaaaattctggtcatataaattgaggcaacagtgaaaatttatctacaattgtatgcatatttttgattgccacaataaaaattatatatacagttggataagaactataaacaaatggtaaatgaaagactttgtttggccagcagaatagtgagcattattttttaaattgtatgtgtttaaacaatgtaaatcatgtttttaagcaaaagaaatgctaactatattctcctccataaatatttgcctcttatcatcagaaaacctaccaaagttgttcttattgttctttttcagaacttccagaaagtatgtgtcttaagtttgactgtggtgttcagattcaattaggatttgcagctgagttttccaatgtcatgatcatctatacaagtatagtttacaaaccaccggagataataatgtgtgatgcctacgttactgattttccacttgtgagtctcttcttttatttaaaatacagtgatatattctcacttattaaagactaaattttttaaaacttaaagttgatggtaaatataaaggaaatatatatatttatatatgtgtatatatttatagtttagtaacactgatcataatatttactaattgccaaaataccttaagtttatgagatttagaaatgtctaaagttcactcaggaaggatgcctctaatttcttatatcctaaacacgagagccaatgtgaaggaataaaatgtgctataaatatgtcaagaataatttccttttaaacagttataacttatattggaaacagtagtttttaagtcttgttaaggtatggtcatatgctggaataatagaaatctagttctgctcttttcaaacatttaggtttgatagttattttacgttggtctaaagaagccagtaaatagtacccctctttcctacatgagtgtgacaaactgagaagcaagcaaggagtaagacaagcagaaacccaaaatatcactttgattactgatagaggctttgtggaggatattgcttcatgtcagagtaaatggtctagcaccaaaccccagaattgagtggccaccccacacctccagtctcagcagtacggagcccagataggcttcctgaggtactgagcaagctgggggcctgtgggcttctcactggagcagcagaacccttactcttggccattgggttggctctaaaagaagaaaaaggaaaaggctgtttatttatccttcttaaatattctaatcatataaatttccctgcaccttcccaaaagtgatgattaagaggagagaatccaggagtcaaacactaatggggctctctctgcttaagaggaaacttgagtagctcaagaagcatttctaggaatcatttgaaaggaagctctttcagagctcactttactttttagatggcttagtacagaattgagaattcctattataaccatagattgttgttttcattgtttagtcctggataattttgggattaccaaaattcacgagaggccagaattcacgagaggatagtatcagttaagatgtcttatgtactagattatattgtggctttcattgatttcattattaacagtccctaatttttttttttacaggatctagatattgatccaaaagatgcaaataaaggcacacctgaagaaactggcagctacttggtatcaaaggatcttcccaagcattgcctctataccagactcagttcactgcaaaaattaaaggttactaccttttctgtttatagctactaatggaaaactttatgaaactggaaacttattttggcatagaccatagatatgctgccttattattaaagtagagataaccagtctacagaaggtcctatcagtgaccctttttatattctgtttccgatggtgaccagaggactttatgtgtgcttaccctccagaatgctaaaaaattagtaacattagagtatattcttttttctttttttagagacagagtcttaactctgtcacccaggctggagtgcagtggcatgaacatgacctactataacctcaaactcctcagtgcatatgatcctgccacctcagcttcccaagtatctgagtctacaggcacatgccactacacccagctaattttttaaaactttttgtggagaagggatctcactatattgcccaggccaatctcaaactcctggcctcaagaatcctcccttcttggtctcccaaagcactcggagtacaggtgtgagcttccactcccagctccatattctacttttaaatatgttcagattttcaagtaatcatttcctagttctatgactagacatatagcaaattagaattttttttccatttttttatttctagttgacttacaaatgagaagctagttctgcacattgagtgttctaatgaaagcttttaatttgttcacaactacatgaccatagaatgtatcagctaaaactcagggaatggaatgggcatgattgagaattacacacataaacctgttgtcatcctgttcggagctcatctacttaaaatcctttcttctcttaaaaagttagcccattatctgattcagttatattttccacctacgattatggattactataatattttaaaaacagcttaagctttttttataaaactggtataaaaccaggtttttttttttgttttgagatggtgtctctctctgtcgcctaggttggaatgcagtggcgcgatctcagctcactgcaacctccacctcccagactcaagtgattcttgtgcctcagcctcccgagtagccaggactacaggcgcacaccaccatgcccagttaattttttgtatttttagtagagacaggtttcaccacgttggccagactggtcttgaactcctaacttcaagtgatccatctgcgtcatcctcccaaagtgctgggattataggcgtgagccaccacgccgggcccagatcattttttaattaaaagttaataccccatctctaataatagggaagggtaagtttcctaagctgcactgcttggaaaatgttttccctgttcatctagagtgtaagaaagatctctttgactttgactactaacagtagtaagaactagaaattctaaatgggttgtaagtattgcatgaaggaaaaggaagataatgatagctggcgtttctcagtttcagggagatataaaggatgccttgaggatttggaacctgggaaaggagagtgagtggatttttgggggtgggggtgtgtatgtgtgaatattttcagattgatatatattcactgttgatgccaataataaaccagatttttttccttttcaggaacatctagtcttcacagtatgtttatcatatcagtactcaggattggaagatactgtagaggacaagcaggaagtgaatgttgggaaacctctcattgctaaattagacatgcatcgaggtttgggaaggaagacttgctttcaaacttgtcttatgtctaatggtccttaccagagttctgcagccacctcaggaggagcagggcattatcactcattgcaagacccattccatggtgtttaccattcacatcctggtaatccaagtaatgttacaccagcagatagctgtcattgcagccggactccagatgcatttatttcaagt

SEQ ID NO: 15675 - DNA, 66629 bp, Homo sapiens
ctcagccccccaggtaggttttgttcttaggattattctccaggagttcatggagccaaacttagaagaaattatctcttttgaccaggtgaactgtgttaagtatttttggaaaatgtaaatgtgtagtgccttgtttgctttcccaggttgaagcaaatgcaatgcatgaatattggttggattgtggttgaagaaaccagctacatgagacatttttgagatagttggaaaaatttgaatgtaactacatatttgatatattaagtaattatcatatgataatgatactataggagaatgtcctttttttaaaaggagatgcattttaaagtatttagggagaagattcctatgacatacattggaatagtgcagccaaaaaaatgaacatatatttattcctatgtatttatatagatgaagtaaagcaagtatgacaaatgtttaagtttttttttgccgcagtgaggcttttgaatgttgattaactcaaccttgtactcttatgagtttttcctgaattaccgatattggatgaggctttgtacttcccacatcaggcgaggcttaggaaacagtccctcttctccattcagctgctctcctctcagctgcagatagagttggtctacagcagtggtggagggcaggagggacatgccattgaagttgcctggttgtggcagcactgcagacctccttctttacctggggatccagtgggccattatttgtcccacaggaagcaaagaggctggttgagcttggaaaggcaggttgagcttggaaagacaaaggacctgatgcactctattttacgtggttttgatgtataccatttcaatatataaccagcttggttatgatatatttttaagttaacatgaggaacttaaaaccataaatgagatgttattttttattgttagttgtgggatagggaattaggaacacatggtatagtggtatgctgtcagttacatgtaccagaaaccccaacccaaataggcataataaagagaatacatttctccttctaattgaaaagcttagagcaggtttggcttcaagagaatcaaggaacaatcctgttctcaacgcattggttggtttttgtctttgctcttcctttcttggcattggcttccttccatgactgactctccacatagcgcaagacgtctgctggctttttctgggctccttcattcttgccccagcaaaacccagagggttcatctagttaactagcttcggtcaaatgcctagctcttaacctgtcactgtgccaaggagatggaatgtgctgactcgcctggcttgaagccaggagtggagttgggttgagtctgctttcctggaaccacatggatcaccaaacaaaattgaaactattagaaggaaaaaggaagtagcagatactggggaggtaaccaaaaagtttactacaaatggaaagggccctggattataaataaggagacttggactcccaatcatcccctgctttacaaggccctctgtagatggtaaaataggcctctgataaatgccctatgaatttgatacacactgtattggatgcttgctttctatttcccagcgcctcttcctaccaacagggctggggtgggaataactagctgctaatgccaccctcccaaatgcaactgttgtttggcaccaaacagtaaactttcttttttaaacctggcccattactgatagaaacagtagagttcctaaagtggtatttattaatttttatattgctggtgcttgaagtagcacccaagagttgtgacatttgaaatctactagtctaggtttcatactgttaaagtccaagttctcatacctagtaaagtctcatacctagtaaagtctacttttgcttactttactaagttctcatactttattgaataccagggcctctgaaagcttaggaaacctttctgggaagtaaatataacatgtatttcattctctttttcaataattatgcttaattactctaaccgttatttgccaagtctataatatgaacataagtattctctacctcacagagttataggagctgcatgagataatgttgtgttgaatttcatctatacaatgacaggggcctcatatctcttttgatttgtgttgtgatcactggcctgagagctagggtttcggaatttttaagtttcccatatgtgaaaccgggcttgactgaaattgagtcatatatttacttaggtgtaacaatttgcctgaattttaaaaataacacaatattttatatttttatttttgacaggccagcaactaataaagtgccaccctaataaacattagtaatcttcctttgaaaaatccatttttgctctttgtgtttttctccaaataggattagcacttttctatcagtgttccccagtgaagattatcctgatgatatttggcttacagactttctcaagattatctcatagggcttttttgcatttgaggagagaataggaaaggaaagcagtttatttttttctttttgtttttaattttctcttcagtacatttgtgagctgtagggaaatattatttgttttattttgttttttaaattttttgtgataaagggtcttgctctgtctcccaggctggaatgcagtgatatgatctcggctcactgcaacttctgcctccggagcctcaagcaatcctcccgcctcagcctcctgagtagctgggactacaagcacgcaccaccatacccagctaatttttgtatttttggtagatacggggttttgccatgttgcccaggctggtcttgaactcctgggctctaagcagtccacctgccctggcctcccaaagtgctgggattacaggcgggagccaccgccctgtttctgtgttaccacttgtgcactgtttctgtgaagttttatgtcatgttagccgtataatatccttaggaattggttgttgcttgaatgttagttattgatttaacagcaaacattttgagatctaataaagctcagtaattttaggaagaagtaattaatttgttagcttactatctgcatctaatatgcataatctaagatttactcttttttttttttttttttttttttgagatggagttttgctcttcttgcccaggctggagtgcaatgtcatgattttggctcaccgcaacctctgcctcccaggttcaagcgattctcctgcctcagcctcccgagtatctgggattacaggcatgtgccaccacgcccagctaattttgtatttttagtagagatggggtttctccatgttgatcaggctggttttgaacttccgacctcaggtcatccacccacctcggcctcccaaagtgctgggattacaggcgtgagccactgcgcccagccaacttactctatttatagatagtagaataaagaaatataagaattacagagaagaattttaatattttaataaagatattgagaataaaaactattttaattatattaagaagataagctctgatagaatcaacttaattggtggtttgcctcgtgtattcaataaagtttactgtattgcaatgcccttgctgtgctaggcattatgctaggtactgtgagtttagagatgaataaaacaatcgtttccacctgctgataggtcatagtttagtaggggagacaaacatataaaagatcatatccaagacagttgtaaaaaatatatatatatagtaagtttatctgatctccagttttctctctttgctatattcttgagtcttagtgaaaatacaaaatagaaatattctaatgttttctctcttttttgcattggtactatttcataggaggacattacttcttattccacaggaagtctgatgattttcctctgtccttacagagagaagcctggtttgggttatgctgtgaactggcctttgaggtctaaatgcagggagatggggaaactttagatttattttgattaaacgagaaactatagtcttacgttgccatattctgttccaagtgacggtggaacaacagtcagaggtagctctgaaaggtaactgtaactgtcatgtggagtttctctgtcttttgagaaactgaccaagtttcttttctggatttgttttggtgcccagaaatagctagagcagtatccatgcatctctaactagagcagtttctgtgatgaggacccagcttcagcagtcactcagcatgtagtctgagtgtaaactcactctggaattataattttatatattttgtgaaggagcctcagaggatcgaggtttttactctctgttgctttctttcttgtcgagcatttccactgcacatgggttggccaacttgcccctcagtgtggtcttacttgaattatatgatagagaaatcgcttctagtttttatttgtggatggtgttcatcccattttccagcgctagtaaattgtttccctacttttattcctttgctcatctcagtgggaattgtagaagggggttaaatggatgtgttgaaagggttttgaaccaaaggtctgtaatgatttttttttttagatcttatttaagtttcaaagactgattccaaagcaaccaatattgacatctgtatagatagacttagatgtgtagttcaaggtgcttttgtttcttttgttgttgttgttgtttgtttgctttttgagtctcactctgtcacccaggctggagtgcagtggcgcgatcttggctcactgcaacctcatctcccaggttcaagcgattcttctgcctcagtctcctgagtagctgggattacaggcacgcgccaccacacccagctaatttttatatttttagtagcgacgaggtttcaccatgttggccaggctggtctgaaactcctgacctcaggtaatccgtccgcctcggcctcccaaagtactgggattgcaggcatgagccaccacacacagcctatttgtttcttttgttttaagtgaaaacattgtgagtgtagaattataggcttcatcagtcctagttacatacatcacgaaatggttgcctggagaagtgatgcccttaacctggaatgggcagagcagaggctgaacgatgggagctgtttagagagaactagcattgttgatgtggatctcattaagatgaatcccaagttgcttttcagctccagtgctgcaatattgccattttatttcactcttcatatgaaaggtgcctcactgagggtacctatgagatgtctgtggcagggtcatgtgccatcttttcagtggcaccttttccatttgcctctactccttttttatttcatacctttttttctcagatccgttgtaacatacgcattgttatgttttggctatttttattactttatctctaaaataagtgcaaaggttgtttaatgttattctttagtttctaaaatacctttacttcacattttatcttcacaattctgtgaagcgacagaacagtgctattgtgaacatttaaattttaaccaacaaacatttacatggaaaatgagatttccaaaagtgatcatttggccaaagtcacaattattgacaaaggtaggattaaaaaccaggtctgctgaccctgacctgaactcaataccatttccataatgctaggaaatttctgaattaagaaacttagttctgtattattacctcagttgcctctttgacccatggacttcaatttttttcttcttgccaacttaaaaagtgctcaaagactggatcttatttgtaagggacttttcttatttcatgaatatgaggaaattggcaattattcctaaaagaaaaatatcaagaagtgaaaagagaaaaagatggtatggatgtgcatgaggataaggaataagtagagggagagaaagggctggtgagcaaggcctgaaggaatgtctttctggatgtggagtgtggaggggagtctcaggcaatgtaacagaataagggatgtgatgtgggaaactagatttagctataatctatacagatttcaattgacatgtaagagaaacatatgtggacatactttgtgtaatgccgtaggagggacacacatggacctactttggttatatactgggggaaattgttagaggaagaggaatgatatttatttgggcacactgtagggcatgtgggtactcttctgtgatagcatagaagattgcagagtaactttgaggacaagttttagatggaagttgataaaaatctttttttgtttcatggcctctgaaagtagatggacttcagtgtatggaatagatctgtttttggaaaaagtatttattgataaactacatcaacatttaaatgcgtcgtgagagagaataacttcaagggaagctatgtgtccttttgtcaaaaattatcctaatttatctttcttataatttcagcagggttttaaatttttgttttattgcttaatagcatgtacttgtttatcggcatatgtgtgtgtagttgaaagcacgatccttggttccatcgtacctagtcacattctcccaggcttacaggaaatcaagtaacttctctgacttctttgtagatgttatctgaaaaatatgcttgtttaccaggaagctgtgtgttcaccgtttaaaatagaactttcatttgtatgccttcgtacagcctacgtagcactataccatattctttttttacctttgttcagcaccttctcactagtgggtgctgcattggggtggctaagggttgaccatgggtccctgtcgcacaaggctttgtgggaggaaggaaatttgtgtggttaaaacatgggaggtattgcaactcattttcttgactattcaccaggggtggtttccaaatcacattttgcctttcaattctcagtctttgaagcaataaattgtatatatatgttacacacacacacacacacacacacacacgcttattaataaagttgttggtgcaggacaggcttataaactgttaatttagatgtacattaaaagctactttgtcttggccaggcacagtggctcacacgtgtaatcccaacactttgggaggctaatgtaggaggatctcttgaggccagcagttccaggcaacatatgaggccaacctgggcaacataatgaggccctgtttctacaaaaaaaaaaaaaaaaaaaaaaaaaaatactaattttaaaaatcacttagtcttgtgtcccatacaaaggaaggataacttttagaacctggccatatgatccctttccagtagtcacctgcttctttgtaagatactctagaggaaaaaccctttccatccttcttgtctcttatctccttgtataatggcagagaatatttgccatggtatattcatgagccgtgtcctggtgtgggattgctctttgtgtgatacactttctcagtaaggtaggctcactgtggcagaaagcgggattaccgtgggagatatattgagaatcaccaagaggccggtcatggtggctcactcctataatcccagtgctttgggaagctgaggtgaggtggattgcttgagcccaggagctcaagaccagcctgggcaacatggcaaaaccctgcctctacaaaaaatgcaaaaattagccgggtatggtgatgcacacccgtagacccagctattgggggtgctgaggtgggaggatggcttcagcccaggaggttgacactgcagtgagccctgatcatgccactgcactccagcctgggtgacagagtgagaccctgtctcaaaaaaacaaaaagacagaatcactgagaaagcaaaacataaggtttaaaacctttaaaaggcaagaaaacctaggtttgcatcctggttctgccattttacaatgtaaaaaaaaaaaaaaagtctcagagagtttaatttaccccaggtaatttgggtgaccttctgcaaattacgtacctttttttcattgtaacatagatgtaattagtatctaccttgtgtggttatttcaaaggttagtgataaaaatgcctggtgcatgtaaagcagtcagtaacttgctgctgtagtaatttctgttattattatatatattcaacaaacacgtgttgaacacccactaacacccactgcagtgccatatgtgggcacaattctaggtgctgaatgaactggtgactaagaccatcaaggtccttggccttgccctcatggagcttctattttaatacctaagacggacagtaagaaacagggattttagagagtgaaggacactgaactgggtgaatgtaatagataactggggggtgggagggtacctaatttagagacatttcccagagaagctggtgatattttagtaagaaacctggatgatgaggaaagagcctgccatgaaacagtagaatagtggaagccagtggggtggcggttgcgggggatggcaaagcggagcttgtggggagaacccagcagaggactggtaagtggaaaggcagaaaagagcttggcttatagaaggaaggaggcccagtatggctggagcttggtgagcctggagaagagcggaggggccaaaggagcagttcgtggaggactttgtagccatggtaaggaatctggattttttattctaagtacaggcacactttgttttattatgcttcactttattgcactttgcagatacttcactttctgcaagttgaaagcttgcggcacccatgtgtctagcaagtctgtcagtgccatttttccaatagcatgtgcctacttcatatctctgtgtcacaccttggtaactcttacaatatttcgaactttttcattatatctgtcgtggtgatctgtgatcggtgatctttggtgttactactgtgattgttggtgcctggtaagatggtggcatccaggtggcggtcttaagaccagatcagtatggtgttggtggtcttaagaccagatcagtatggtgttggcagatcagtatggtgccgctaggcaggcactgactagctccaggcagctcaaccttgggagcttcggggccccgagaggtggagcctgtgagtggggcatgcactccatgtggaagccagagcctcctcccctggatggagtgtacgagatccctggaccggagcccatcccctctgtgagagagatgtacttcacgcccgggctgccaccgctgatcttcctgccctgggaccctgggtagaaacacccaaaattctgttcaccccgttcacgaccctgggaccctggctcgaagcacccaaagttctgctgctcaagctccattcacgagcagccaccatacaaagaccaggcctgctatgtctttcaccagcgttgccgccttctcaggggtgtcaagcaggccctctggcttaccgaggccaagttaataaaatgccttcctgagaaagtacttggccttgttgatgatacaaggaaccacatagagaaccaagatgagcgtcttctgaatttgatctctcatgcctgtctctggcactgtactgagtacggccccaggagagaggcctgctgtctggtcattgtggacagtctgataaagttgtgtaagtctcagattctcaggcatccttctctggccaggcagatttgtgcccaaaactccacgttatccaccacctggaattgtgtctgttcttcagggtcatggttctagtggagccggctgagtgccaaggatcctctgcccccgccatctcctccagagaagaggttgaagctactaaaaatcatgttctcgaggccttctgtcccctctccccactactgatcttcaggaatgcaatgtttctgatgtgaaagatgacacaggattctgggagggctatccttacccctatctccatatcctgcacttcctggagaaagccgatttgcaaccacatagccttcaaccagatcagctgtgggccaagatgatcctgtttgcttttggcattgccctggctcaggcccagctcctctgtggcaatgacaccaagatctcggagcagcccgtggttgtgcagagtacatgcacagacggacgtgcattccatttcctggtgttacagtagaacaccacagacctggcctcttaacaagtgtggcaagagtttggtctgggtggaatcatgccagctactctctcagcatttttggtgtctcccagtgataaaaaagaaggtgggaccgggcccagtggctcgcacctgtaatcccaacactgggagtctgaggtgggtggatcacgaggtcaggagatcgagaccatcctggctaacgtggtgaaaccccgtctttactaaaaatacaaaaaattagctgggcgtagtggcgggcgcctgtagtcccagctactctactcaggaggctgaggcaggagaatggcatgaacccgggaggcggagcttgccgtgagccgagattgcgccactgcactccagcctgggtgacagagcgagactccgtctcaaaaaaaaaaaacaacaaaaaattagccaggcatggtggcacgtgcctgtaatcccagctactcaggagatggaggcaggagaattgcttgaacctgggagatagaggttgcagtgagccaagatcgcgccactgcactccagtctgggcgacggagcgagactccgtctcaaaaaaaaaaaaaaaaaaaaaaaaagagggtggttgtggaatgcgttgggctgactggtttccagtgggagacatccaggaagtttttagctctgtatttacatggtgctacgtgagccaaggaccattctgaggcccgaaacccacctttgccttctcccactgaagagggcctggggtccccctggagcctcagtgctcatctagcctggtggtctcactgacaataaagagcccttgcattgcaaaggaaaaaaaaactattataattgttttggggtgccacaaattatgccactataagaagttgagcttaattgataaatgtcatgtgtattccaactgctccaccgactggccattcctctctctctctctctctctctctctctcactctctccctccctccctccctccctccctgtccctcttcctctcccacctccccactccctctttgggcctccctattccctgagacacaacaatattgaaattaagctgattaataaccctacaatcgtctctaagtgttcaagtgaaagaacagtgacacacaacaatattgaaattaggctgattaataaccctacagtgatctctaagtgttcaggtgaaaggaagagtcacatgtctctcactttaaatcaaaagctagaattgattttacttaatgaggaaggcatatcaaaagctgagataggctgaaaagctaggcctcttgtgccagttaaccaagttgcgaatgcagaagaaaagttcttgaaggtaattaaaaatgctacttcagtgaacacacgaatgataagaaagcaaaacagccttattgctgagatggagaaagttatagtagtctggatagatcaaaccagccacagcatgcccctaagccaaagcctaatccagagtgaggccctaactcgcctcatttctgtgaagacagagaggtgaggaagctgcggaagaaaagttggttcatgaggtttaaggaaataagctgtctctgtaacataaaagtgcaaagtgaagcagcaagtactagtggagaagctgcagcaagtcatccagaagatctagctaatgccaggcatggtggctcgtaattgatcatggtgtctataatcccaccactctgggaggccagggcaggaggattgcttgagcttaggagtttgataccagcctgggcaacatggtgaaaccccgtctttgcaaaaaatacaaaaaattagccaggcacagtggcacctgcctgtagtcccagccactcgggaggctgaggtgggagaattgcttacacctggaaggcggaggttgcagtgagcgagatcatgacactgcactccagcctaggtaacagagacagaccttgtctcaaaacaaaaaagcaataaaagatctagctaagataattaaagaaaatggctataataaacagatttttcagtgtagatgaaacagccttctattggaagaagatgtcatctagaactttgatagctagagagaagtcagtgcctggctgactcttgttaggggccaatgcagctgacaactttacgttgaagccagtgcccatttaccattctgaaaatcctagggcccttaagaatgatgctaagaaactgcaaagtttttgtcctgagtaaccagatggatggtggtaggcagtaagactggtttaccatctttgagatggggaaactgtggggactggcagaggagtagattttgtgtcagaagggatttgggacatataaaattggtggtggctataggacattcaaatttaaagccaggatagccaaaactcctatattttttagatttattacttgttctcttttgtcattgttgcaactttttcctgtcacatcgaaacttgggaaatcagaatctttgtattttaaagttgtgatgtaaaactctcctggcagatgaatggtaaatgtggggacattaaaatacagtgttatgaatttgctggcttcagcaagagtgcttatcccattttccacctttcctaccaacatgtatcacagatttcagaaaaattctgaacttcatccgtcctgtactaacttggcctcgacataaaggattaatgaatatgaatgtcctcccttggcaagagtttaaaattctgagaggctctactatatttactaaagattttctagggcttctcgaggccctcaaatgtgctaggtatacaataaatatttactcatttttaattttgcttttatttagtatctttgtgctgtgactttcatgaacattattttttttcctagaaagtttagtacctttgatgtattaagattactgttatttacactgtttcctttttacttgtaatcttgttttgtttctttgcattggtgggtggtagaagaaaaagacactgttatgaggtcacattcagtatagacaaggaaagaaaataaaagtaggtgcaggaaattaagttttataagttttaattatctttttctttacttcctaaaagccagctaacccagttttattaattacaacttttgcaaatgtaagcttttctagctttggtttcttttatgtcagttatctattgctgcattaataaattacccccaagtcagaagtgaaaaacaacaactgtttattatctcacacagtttctgaggctagtagtccagaagtggcttagctgggtagtcctggctgagggtctctcgtgaggcagcagtcagactgtcagccaggtctgcagtcatctgaaggtttccccagggttggaggatcttctcagatggctctctcacaggtgttgtcaagagacctcatttcctcactggctgtggcgggagatctgtttctttctgtagagatatggtttggctgtattcccacccaaatcttatcttgaattcccatgtgttgtgggagggacctggtgggaggtaattgaatcatgggggcaggtctttctctgctgttcttgtgatagtgaataagtcttatgagatctgatggttttataaaggggaggttccctgcccgcaccttcttctcgtttgtctgccgccatgtgagacatgcctttcaccttccaccatgattgtgagtcctccctagccacgtagaactgtaagtctattaaacctctttcttttgtaaattgcccagtcgtgggtatgcctttatcaggagtgtgaaacagactaatactcttaccacttgagcctctctgcagggctacctgaatggcctcctgccacagtcatgtgcttccctggggcgagtgagtgagagagaggcaagagaaggagttgggggtgttccattattgactaggattttcttccaaattcctgtcaaaagtcttccaagcttagatgttggcagttattcctcaaatgaggaatgtttgtgtcacaggtatatcaaatatatatctcactgctctgtttctgtgtctttctcttccaaaatcattttcatttcaatactaaataataatgcagtcatttgaagacgttttcaatggtgttgtctttgtccattgcatgcttccataatacagtaccacagactgggtaatttttaaagaacagacatttatttctcacagttttggagcctgggaagtccgtgatcaaagaaccagcttctgatgaaggttttcttgctgtgtcctcacatggcaaaagagagagaacctacctgcaaaccccgttattacagcggcattaattcattcgtgagggtagagcctcccgctaggccctacctcccaacattgttacattggggattcagtttccagcacatgaatttgggggcacatattcagacaatagcagacattgcaacttaacacgtctgttactaacagtgcacgtaacttgactgaagtggcagccatatgagcatttatgaccaaacatttccatgagctaacactgagaactaccctgtggctgtgcctgacaggcatctgttataaggtgcatcctgatttcagaagtgttagaatatgggggaaaaaagcttctagaaattgaagaaatatggtaaataattttctcccccacccaatcatggggaagtacaatagatcaaagtcttctgcaagtaagtttctttcctctgattttacaaaagctgcaactcacaaagtgtaaattgattgagaaggagatgtgaatgagtgatttatgacaaagataaatatgcaagttatttctaaaatgtttcaatttttggtttcagatgtataaacaaggaaaatccctcttgtgactttaattttttttttttttttttttttttttaggaataaagattactgtaaacccagagtcaaaggcagtcttggctggacagtttgtgaaactgtgttgccgggcaactggacatccttttgttcaatatcagtggttcaaaatgaataaagaggtaattttttaaatatatcttttaattcttccaaggagagagaatgatagagaattaattaacattatcgtcctaaatgtagttttaacagtttggtaaaagagtctgatagacattgctaggttattactgaagtagtcaatagtcattattttggtaagacagttccagaattgtctcatgaaaacattgtaaacaataatgaaattagttctccactctaaaaattgtggaaaatagggattacttagggcagcagtgttagcgagtataaaacatcaccagtacattcttgtgtatacaaactcttcacaacagattatgttccaaccaaaatctttaaaagattttcaaggctatatggaaagttaatgtgctattctttttaagaattccacatcactgttttatctgtatcagaagatttaggaccttgtggtagattctgaagtaaaattcagatgggcagaatgggccatttattccttttgtgaaatgattggatccctgcagcacccaacaaataatttaaattcacattttagaattctcttttcttcagagttccttgagccatcttgcactggggatttctcagtgggctggctgcctgcattgtgtcccacttctgtgggcttttatcttcgatccccccatccctctctatcctcctcccacttccacagtaccttgaaagtccatattcttttcactctgttagtcccagtaattcagctttcttccaaacttgatgtcacgtctccctttgcaaatctgaaactaaataaaagctgttctgagaatgacttttcctttaattggattgcctcatactgtaggtgaattctgtggttttatacgattttgtttccgtctgttacacagaggtaagacagagcaactgtggaatgtagtaaaaagattgcatgtagctttggcactagataggtctgtgttggaactctgactgccattattagccatgtgaattcctatcatcagaggttgtgagaattaagtagacaggatgttttacgtgcctaggctcttgaaagattgcacctaaaggtatttttttatcatattttctcaattgcaaagttactttcattttattaaatgccctttgaggagaaatagtggaaaaaccctactacattaagtatatcatttgtaagctatgtcctgattggaaaaaggtagaaatgtaggggatggaaaatgcatcttagagttgaagagttgtaatggattttaaaactcttaagttttgtaaaaccacatgatcataggagtattgtaggagatgtttacttaacaagtgcttgttgagcacctgttttgtgccgggccatgttctaggtgtgatgatacagcactgaccagaaggtctctgccctcaaagagcttacacgccagtggggacagagcaagtactgttaattcctgtgagttaagagctatgaggaaaatcaacagggtggcaacataatatgagaagctactaaggttttaagcaagggaagtaacatggtaggattcgtggggttttttgttgttgttgttgttgttttgttttgtttttttgttttttttttgagatggagtctcgctctgtcgccaggctggagtgcagtggcgcgatcttggctcactgcaacctccacctccccggttcaaacgattaccctgcctcagccttctgagtagctgggattacaggcgcgcatcaccacgcccagctcattttttgtgttttaggagagacggggtttcaccatgttggccagggtggtttcaatctcctgatctcgtgatccgcctgcctcagcctcccaaagtgctgggattacaggcgtgagctgtcgcacccgactaggattcatgtttttaaaacataaacttgcggcttgaaggaagcagagaacagcaaggtgagcagttgtcttaatacctgtgcttgactggaagtagcagtagcgtggagaagagaaggtggatcacagtgcataattcagtgtatattttagagagagtcaactaagctgacagattagatgtagagcatggggagaaggaagagaaatcaaggatgaccccttaggctttccacctgagcatctgagatgtgttatatactgaggtgttgaagattggaaaattaattgacagaagacagattaacggagaaaaagcttatttgtgtgcatgcaagagctttcagaaggagtagcttgctaactggttaagttatgtagctaatttagtagggaaaggcaggggccctgtgagcataatggatgggtttcttcaggaaagacaaaggggagaagaacaagggaagatagcaaagtttgtggtaatgttgttcatgcaggcaccagtggtatctcctcttcattgtgaccgtaaagtccccaaagagagatttatggtacttttactcttggtctgttgcctgggggtaaaagctgccccacgagggaatttatggcagcctcatttcccagaactttctgttttgggtcagataaaggaagactgagaagacttctttctgtatctgttgagtcccagatgtcttcagtttaatataatcttcataccaactcaggggttctgagtgggtctccacagatcttcagcccaagtagcctttgttaagaggatacatcttccattttaacaggagggaacagagcagttataaataagtacagacatggataggtttgtgatttgttggcagaaaaaggaggtaatttctgtctgaagtcagtgcctaagagaactaggattacaggaagtttgaggaaagagtatacatcaatagtctagaaggaaaacacacttaggacgatatagtaggattgtcaggcagttgtaagtgcagcctgtcatcccagttgtcacatcctgagcaaaatactcttgctttggtgtaggtactgaaaggggagagagtagagttcagtaacttggggtttggagagggaggaggtgagcttgttaaagtacaggttgaatatcccttgtctgaaatgcttgagaccagaagtatttcagattttggattttttttaggtgctgaaatatttgcattgtatacttaaaagttcagcatcccaaatctgaaatgttccagtgagcatgatggaggtgctcaaagagttttgaatttgggagtatttcagattttaaatcatcagattaacctgttctttgcaagggagttattgtaatgaggcacttgagtaagccccttggcaatgtgccaaagttgggtgtagctgatcaattgctgggagcagaaaaagcattaataaaagaaaccttactattggaggtggggactgtggatggccatcccgtcttactgtctcattgatatgctttccatagctcttctctgtctagaccttgaaggagattggatattgtttggttaaggagtttatcctcttacagaattttgcagatcagaaggtccggggtctcaaggtgaaataacttgcccacgtcttcccagctaatgtggtcagagctgaaagcaatagccaagcccaattctctgtgttttctctatgccgctgtggtgtttgtatgttgtatggctgctaaactcataaatgttgcagttgtagattctttcaatactcagtgattgatctcttaaatgccagagcaaatagttttctgttagtgagcctttggaagatgtttgggggccagcttaactctctggtttatggatttgtaaaagactggatttttaatacttcagtcctaaataactcaaagcgttactgtttttaactcagaaatgttttagaacttgggggaaaaatgttgcactttcaaagcttcatactgaaatcatagattttgtacagcatattttataaggtgtgtttttgatgagtcatccacttctcttattgattctttcacagattccaaatggaaatacatcagagcttatttttaatgcagtgcatgtaaaagatgcaggcttttatgtctgtcgagttaataacaatttcacctttgaattcagccagtggtcacagctggatgtttgcgacatcccagagagcttccagagtaagtaacgaaagaagctgaatgttgggatggggattccccatattttattttattttaaatgtttacttttaaacaatttcaaagtatcaaaaaacatagcaaaatttcacataggtacttcatccattataatgtcaaccattgttaagatttgatccatgtgttttgtctttcttttttttttaatttagtttttggttttgttgttttttaagacaaagtctttttgttgcccaggctggagtgcagtggtgccatctgatctcagctcactgcaacttccgcctcccaggttcaagtgattcctcttgccttatcctcctgagtagctgggattacaggcacatgctatcacacctgggtaatttttgtatttttagtagaagtggggtttcaccatgttggccaggctggtcttgaactcccgacctcaggtgacccacccgcctcagcctcctgaagtgctgggattacaggtgtgagccagcatgcccggcctgctttaattgtccttctgtgtgtgtgcgcgcacgttcacacatgcacacacacatatatgtgtgtgtgcagatactttaggatgacatagacaggcctcagtctggtcgctgccactgacctcttcaagtttgccttccttcatgttccattactctgccctcacacacggcacctatattcaacttcgtttctccctgctgcttccatggtctcgaaatgtcttgcatattcacactccacatctttgcgtcacttcttccttccatcttgaataccttttctgtctgtcatacttttatgactctttcaagcctcagctccctctgctgccttggcattctgattttacctctattatagaactcgttgcattgattttgaaattatttgtttgctagctgtctgagcagtgtagggataaggagttcccttttctctttctagttcttagaacaaagcctggcaggtagtagtcgcttaccagttatgcaattcattgaccaccctcatgaggcacagccttgggcttcgatgttacagctattttaaactaagcatgagagagagcccctgaccccaaactacttacacaactatcaggaaagattatctgctacaacagaaagcaggaagactttcttgctaccacctctttctcccaaaagttaatcttttgaacgtatttctatattttggttgtttgtgttgtcaggcttgtctccctatctaactgaactcctgaagggaaagtctcggtcttaataatctttcgtaaaaacaaacactcaataaccaatagcactcagtagatgtttgttgacagaatgaagaaccagggtgaattctgtttaacaaagtagagacggaaatatttccatcaaaaacatttaatattcttacatttaaagcacaaattcaaagctacctaaaaatctctgaaggattcttgatatctagaacacttccttatttaagaaacagattgtggatctggcatggtagctcacacctgtaatcccagtactttgggaagctggggtgctggggcgggtgaatcacttgaggccaggggttcaagaccatgctgggcaacatggcaaaaccctatctctacaaaaaaaatgcaaaaaaaaaaaaaaaaaatggggcctgatggtgcacacctgtagtcgcagcaactcaggaggctgaggtgtgaggatcactcaagcccgggaggcggaggttgcagtgagctgggatcacaccagtgcactccagcctaggtgacatagcaagaccctatctcaaaaaataagaaaaagaaacattgtgaaactaacatcatggaaaaatgctatttcctgaagttactcttactcatgaatactaaatatgatcattataaaaagtagatcagtagataagcacatagcatttgagacctgatagtcttgagttctataattaggatatgaatcaagaagaggtcagtttgttatgaatttgaatgttgtggtcttcagttttgtaggagaaaaaactctcatatagtagtcttgctgctcacttttcaattcttttccataatgcgtatttttctcccaaactattgtattgctcctaaaaaatgatcttgtggaaaaaaactctagcgttgatgtcagcactaaaggccatgtagtgagtgtatcattcactgcaaggaaacattcatcagactgctttgctactcactctgctccatctttttagtgcaataactagcattgatcaagacaaaaaaccagtctcctctaaagagtagttgtcagatattattttgtttatttggtgcacagtcaagaaccatgttctttgttgtatttgctggacaaaaagaaggatagggaggaaaacactttttgttaaaagagttaaaatgctgctgtctcattcttttctctcactttagtcttccgtaaactcaaatgacgttaaggttgttgagaaataaaatatcggtcaggcgcaatggctcacaccagtactcccagcactttgggaggccgaggcaggcagatcacgaggtcgggagtttgagaccagcctgaccaacatggtgaaaccctgtctctactaaaaatacaaaaattagctgggtgtggtggcccgtgactgtaatcccagctactcaggaggctgaggcagtagaatcgcttgaacccagggggcggaggttgcagtgagccaagattgcaccatggcactccagcctgggtgacagagtgagactccatctcaaaaaaaaagaaaatatcaccattttctttaaataaaaaatacctcatgcacctctgcattagcccattctcacactgctatagaggtactatctgagactgggtaatttataaacagaagagttttaattgactcacagttctgcatggctggggaggcctcaggaaacttacaatcatggtggaaggtgaaaggaaagcaaggcatgtcttacatggtggcaggagggagagagagcaaacaggggaaatgccagacatgtaaataaccagatctgtgagaactcactgtcacgagaacagcatgggggaaactgcccccatgatccaatcgcttcccaccaggtccctccctcaacatgtggggattacagttcgagatgaaatttgggtggggacacagccaactcatatcaacctttctcaattttatttaacttttttatcccattttttattaaggggtaatttatatacagtacaatgtacagatacgtgtacagtccagtgagttttaacatatatataacatgggtatatgtacccatttaacatatatatagtcattgaccagtctagatattttatattcagcttcttccactcagcataatgtttttaaaatttactcatgttgttcagtgtatcattaggcagtcccatctttttgctgagtaacattccattgtatggattgactagtttgtttattcattctcctgttgatagacatttagtttgtgtccagttttggaatattatgaataaagctacgatgaatattctcatacaagaccttttctggacatatgttttatttcttctggatagttacatagaagtggaattgctgaatcctagagtagatatatgtttaatttttcttaactgccaaagtttccaaaatagtttaccattttgcattaccaccaacagcgtataagatttcaggttactcgccccatatcttggccaacattggttgttagctcttattgatgaattaagcttttggtcattatgaaatgctcctttatctctggtaatcctctttgtcttgaagtttactttgtgtgatactaatatagccatggaagctttcttttttgttttgttttgagaaggggtctcactctgtcaccgaggttggagtgcagtggcacgatcatggctcactgcaacctctgcctcccaggctcaaatcatcctcctacctcagcctcctgagtaactgggaccacacacatgcaccactgcacctggctaattttttgtatttttggtagagatgggatttcatcatgttgcccaggctggtctcaagcgatccgcccacctcggcctcccaaagtgctgggattactggcatgagccaccgcgcctggccagaaccatggcatttctttcataagcttttttgtatagtatatgtttttcattcttttagtttggaatgtctttgtttaaagtttcattttagatgacagaatacaggtaagtgttgctttttgctctagtctagaaaaaagtctctttcaaggtgtttagtccatttacatataatgtgattatgtttaagtctgacatcttgatgttcgttttcagttagtctcatctgttctcttttgatcctcctttcctgacctcttttggactgggattacaggtgtgagccaccgcgcccggccaaaaaagcattttttaatattccattttatctcctttattgactttagctgtgtcttagtgttattttttagtggctgttttagagattacagtatgcctctaacttattgtagtaaaccttctacatattctaccttaaaatataagaaccttatatagtatactttcattgtgccccccattgtatatttgttgtcatatattttacttcgacatttacttttgagcaatcttgtaaaagtacgtgtgtgtgtgtgtgtgtgtgtgtgtgtgtgtgtatttatttttattattatactttaagttttagggtacatgtgcacattgcgcaggttagttacatatgtatacatgtgccatgctggtgcactgcacccactatctcgtcatctagcattaggtatatctcccaatgctatccctcccccctccccccaccccacaacagtccccagagtgtgatattccccttcctgtgtccatgtgatctcattgttcaattcccacctatgagtgagaatatgcggtgtttggttttttgttcttgcgatagtttactgagaatgatgatttccaatttcatccatgtccctacaaaggacatgaactcatcattttttatggctgcatagtattccatggtgtatatgtgccacattttcttaatccagtctatcattgttggacatttgggttggttccaagtctttgttatcatgaataatgccgcagtaaacatacgtgtgcatgtgtcttcatagcagcatgatttatagtcctttgggtatatacccagtaatgggatggctgggtcaaatggtatttccagttctagatcactgaggaatcgccacactgacttccacaatggttgaactagtttacagtcccaccaacagtgtaaaagtgttcctatttctccacatcctctccagcacctgttgtttcctgactttttgagatggagtctctctctgtcgcccaggctggagtgcagtggcacgatctcggctcactgcaagctctgcctcctgagttcacgccattctcctgcctcaggctcccgagtaggtgggactacaggcgcccgccaccacgcctggctaattttttgtattttttagtagagacggggtgagtcactcttatcacccacgctggagtgcagtggcgtgatctcggctcactgaaacctctgccgcccagattcaactgattctcctgcctcagcctcctgagtagctgggataacaggctcttaccactgtgcccgggtaatttttgtatttttagtagagatggcttttcaccatcttggccaggctggtcttgaactcctgacctaatgatccacctgcctcggcctcccaaacttctgggattacaggcgtgagccaccgcgcccagcccacgtgtgtataatttttaaagattttgtttaaaatattcactgacatagttacctgttgtggcactcttgagtctttccttctgacccaggttgctatcaagtaaaatttcccttctggctgaagaattcctcttaatacttcttatggttacagtctgctgtttttctgtaataatttgtaaaaattatttgtgtaataatttgtagacaaattatctcagcatttgaattctgttaatctgttgtcttcatttttgaaggatattttcgtcgtgtatagaattttagaggtgtgttggtttgttttcaccactttaaagatgccattccattgtcttttggcctccattgtttatcatggaaatttatttattccttttataattgctcccttgaatttttcctgcttggaattctctgattcttggacctgtaagttatctttcatcgattttgaatcatttttagccataatctccaaatatttttcttctactttctttctgggactcttaattatatgtatgttagactatttgatattgtcccacagatcttgtaagctctttttttttctttccttcactttatctcttttgtttccagttagatttcttctaacctgttttcaagattactgattttttggtgtgaccagtttgctggtaagcccatcgaatgcactgatgagtggaaatcttgatattttaaatttctgttatttccatttggctcttttttttttcttcaatttctcactgctgaaattgtaagttggccaccatcttctgtgcaagttgattaactgcctttttctccagatcctttaagatgtttatcttcgaattaatgtgagtctctatctgataattccagaatgtaggtcagctctgcttttctttttctttttttttttttaacaagtaaacatggtttattttagaaatgtgaggctatttcaacattagaaaatttttttttaattatactctaagttttgggatacgtgtacagaacgtgcaggtttgttacataggtatacacatgccatggtggtttgctgcacccgttaacctgtcatctacattaggtatttctcctaatgctgtccctaccctaactccccagcccctgacagggttacattttctttcttcttcgtaagtctcataattatttattcaatgctgaacattgagtataaaagaaaaatagcattaacatatgagattaacatattacacattaacatatagagattgaaattaatatttttatgctcaggaactagacacacccctcgtaatggctactagaataggggtatgagtccatccagtttgtagttgttaggtctgtgctttagatgtattcagtttactactgacggaattgagggtagaatgaggatttccctttggcaggactgaaattgacatatcgagaagactagaaatctctgttttacagctctagtgccaaactgcaagagatctctctccactttacatccagagtctcagcttattggaccactgaagcatttttgttcaccaaccccacccttgtctcttctatgtctcagggggtctgagacccccctgcctagctgccttgcccccagccagccttggaaagcaaaggcactgcattcactgagggcctcgtgggcctccaagggtttccctcaggcctctgttgtgccgtcagccttcaacaggccctgtggacctgcacttcacaggtgatcttttagctctcctctcctccttcgccttctgcaagagcacttgagaagggccgaagacagggagttggtgagtgaggcagaatcttttgcagctggggttccttgaggatctaattggtcatgcccactaggggtgaccagccatctggttttcccaggactttcctagtcttagcacttttaagtgctgcattctgggaaacctttctgtcctaggcaaactgagaccactggttaccctaatgccagctcacagtctgcctttaaaattttgtaaaacattcagctggcttacccttccttgtcaactcagttctaaaggcattaggtggcaccaaacatggtagacatttgtgtggggtgggaggcagtgggaagggactgggatgacccagagcaggatatcaaagccccggtaaggtgtccatgtgggagtggagcagtctccagaaataatcctgatgaattaagagagcaatgcatatctttctagactatttttgtgcatgtaataatatatctataagtggaatcatattcattcaatgaatattactgatcacctgtaatgtgttagacactgagtttcataatggagacttgttgcataaaattgacaagctctttgccttcaggaaacttaaagagtattaaatgagtgttaagtaaatgatgtctaatatctgcctggggtagaaatgttagtgataactcaccaatatttattcagtgcgggttacaaaacttatttcagtatgtcaaagaacggaacttagagctttccatgttaaatgccaatatcgttcaagatgttaataagttgtttgcctcgatcaaaaagattctgcagccaaacacatttagaagacacttgaactatattcctctccttaattgacaattcatactaacacttttaaagctttgagaagtcctgcaatcgagaaatgtgtttaacccagaattttctaagtttatttgtccacagcattcttttggccacagaatatctcgtaatatttctatgagtgctatagtttttttaaacagtttgggaaatgttattaaaaattgtaacaaatgaagggggaacttgacacatctctttaattatagggaaattttatttttatttttaacctagagattttattttttcttttaatttaaggaagtgttgatggcgtctctgaatccaagttgcaaatctgtgttgaaccaacttcccaaaagctgatgccaggcagcacattggttttacagtgtgttgctgttggaagccctattcctcactaccagtggttcaaaaatgaattaccattaacacatgagaccaaaaagctatacatggtaggaagttgattttggggtcttttgggggagttaacatgtaaaacaaatggtacaattgaaatataaggtgaacattaaaactcatatcctttcagatgttttaatgttttcagtatttttatttaaagtcccttatgatttcatattaactagctcttatatttgctaaagtgctagaattcaactcaggcttatatgtaaaatgtcaaatagtattgcatgaaactcagcactgttggaatcattacaacatttacttgctggtatttaacctgatgaatggagctaatgtaacaaatgtctaaagccttctaagatgttatgttttggagcgtatttttaaaacacaaaatgattttttctccaagccattaaaatagaagaggaagcatttacatgttctaatattgatataggtgccttatgtggatttggaacaccaaggaacctactggtgtcatgtatataatgatcgagacagtcaagatagcaagaaggtagaaatcatcataggtaagaagtatttccccagtgttctgacaagtggactataatataagctatataaactgcaacgtttaattaagcaaaggaaattatactttttaccccatactatttaatgatgtgttaagcattagaagttatattgtttatattgaaatttgaaagaatgcatactaaaatcataatctaggttcacagaaagcaaaaagaatcaggaaaaaaagccattttgtttaaattattttagttacagtttattttcaacacttatgataaaatatgtattctttaaagctttagctacaaaaaacttgattcagtgggaaaagatttttggccaggtgcagtggctcacacctgtaatcccatcacttttggaggccaaaggttggtggttcagttgagcccaggagtttgagaccagcccgggcaacatagtgagattccatctctaatacaaataaataaataaattagctaggcatggtggcatgcacttggtcccagctacttgggaggctaaggtgggaggattgcttcaggctgggaggttgaattaaaaataataataataaaagaaaaagatttttaataaaacatttttaaaaacaaacattatacacatataaaggaaagaaaggttattaacaatcccattcttaactgcgtaatttgggaatttgttatatttcagcttaatatatttatagttatattgttcatagttggaggtattgatgcatgtgttggtttgccaacattatctctatgatattgatctctatttgcttgacggctgcccttcttaagatcatgaattacaatatattcaaatttgttttttctgaaacaaggaagaacagatgaggcagtggagtgcactgaaggtagtgtaagtctttggtttgaaaccaaatctcctgcatgctagttactcttgggattggtggagtgcttttagcctactgagtgcagtgatggaaaaaatactagctgtaagaaatgattttgattgaagaatattgtattttaatctttgaagttttataaatggacagacatgattaaattgacacagtattacaataactaatcttcagttgactttcttttaatattacatataagaacaaagttcctgcattgtatcttttgagtagtgaacatttgcaattaattcttaatgttaatttttatctacataaaatttgtaagaaagataggtggctacgtgatcatggatatttgttttagattattttgtctgtcctttagccatgattagatgctctcaaatgaaatttagtttttataaaagtttcaggagaggagatttattgtttaacatatgttctatgaaatattaaatattctgtattaatataaaattgatcaggattttttgaagctacaggactctagataatctaccatgtcacctttaccataatatgtaaagggaactgaaaatctatttcaacataaacttctaatttgttttaattagccaaagcattgtacttaaattgtaatgagtaaatattaaaatttggatcatctttccttagtgtgatgtcacattgttttgcaaaattagatttgtggatggcaaagtatttttttcaatttctgcctctattacataagcttaggctctacttgggtaaagtaaggaaataatgttaaattttatattttctgattttcctgtccttcatgtctctatagtatcactctgaaatactataattactgttttcatcctaatatgtagttgcaaacaagaattctctcttgtaagagagttctaatcccatgatctgttaaccctgtttgagggaagccatgtgaagaaatcctaatcgaactcctcttcctctcctaatcctttttgcctaattgcatggtttttaagtcttcctaatgttggaaacctcttaagaataaatataagctagccccgctgtttggctccaaggtgatgcatgtgaattatcaccttgctgtgctgcttctgtacctgcagtattctctataatttttgcagtagcaagcacactattaaataataattttcaaataactctatttagaacatatagagatgaaaatccagttacgaagtttctccagaagtctcagatgaaaaaattagatccaaatttttttcaatgaaagtccacaaaattgagaattgcatatgaacagtgtcctttattatatatatatttttacctatttagcatggtgtcctctatttcattttgtgtattttattcaagagacttgatcagactattcagccataaaaaaggaatgaaatgatgtcacttgcagccacatggatggaacagtcattatgttaagtgaaataagccaggcacagaaagacaaatatcatatgttcttacttatctatgggagctaaaaaagttgatctcatggaggtagagagtagattgagactggcaagaggcttgggggtggatgaagagaggttggttgataagtacagacctgcagttagaaggaatcagttctagtgtttgatagcacagtagggtgacaataggtaacagctatttaccatgtctctcaaaatagctagaagtgaaatgttccccacacaaagaaataagtgtctgagatgatggatatcctaaataccctgatttgatcattatatatcatatgcatgtgtcaaaatatcatatgtatcccataaatatgtacgattattatgtatgaatgaaaaaaagatacttgatcaggatgaggggtgcgggttgaataggtggatttttttagggcagtggaactattctgtatgattaatgatgaatacatgtatacaaattttaatcatttaggaggtcagaggagggggattccaagatggaatacagactataagaaaagaacctaactgtattgcaaatgtatggtacagcctcactgaagaggggtgaaagagtacagtgctactgacctaaataactaagtaactgggaatgagttgagcctaatactgaaggcaaaaaaaattgcacataacacatgtgctgactcagaccttcttcaattgattttatgtaacatataagaataaagtttctacattaaaaaagtatgaatagtatataacatttgtaatttattgttaatgttaatttttatcttcataaaacttgaaaaaatagatagctataatgtcattacttattttacctatccattggccatgataagatgtcccatggggtacaggttaattctgaaaccactatttctcccaaaaacaccttacaccttgagaaactatgaatctaaccatgagaaaaacatcaaatctcagttgagtgacattctgcaaaatacctgacagttactcctcaaaaccgtcagtgtcatcacagacaaggaacacctgagcaggtgtcagaaccaagaagatacaagcctgaggagacacaagcagttgtaatgtgagatcctgaatggagtccctgagcaaaaaagaccattaatggttcattagttgtgacaaatatactattctagcataagacgtgacaaatacactaggctaacataagatgttaataatagagaaattaggtatggggtatataggaactctctctgcactaccttcacagtagttctgtaaaccttaaaatgttctaaaattaaaagttgacttaaaaagatcatttgagattactgtttttaattagccagaatatctaaaactatgaataaattatgaaagagcctagtttttgtcacttaatgaaaacagtgatggcttagaagtcctaaatgataagcacagcaatattcactattctttgctattcagtatttgcatggcttcttcatttaatttgaaaagttgtaaactgataaaacactataacatgattcactggctcaaaactacttggattagtcttactatttgtgctaaattggtgtttagattacttaatctattttctcttactttgttttagatgaattaaataatcttggtcatcctggtgagtaatacaaacataaaactttagttttagatttttaagttgttgaatgcagcaaagttaccgtaggtactcttttgctacagtaatactagtaacttttttctctttattgaaataatataatttaaggttgaaattaactacatgaagtacaattttatacaagtgatacattaaaaatattttaggttataaaactgtaagggtagaaaagaagtgtttgaggtaacataaaacctcaaggtattatcattgtgtattactccttatatcataacaaggaagttaatgggggaagtacgtgacctttaatctgaaagcaggaagcagtgtttgacagagtgacaggggtaacatttctgaactgatcagacccctgggacctttttcttggtgcctcagtcatacagcatatctgaactagttgggtgggtgcctatatctggagtaagaagtgtgtttgtggggatcattggcatcgtacaggtcggttggtcagtgaccatttcttaatgagtgacagttgtcaagagtatgtagaactctgtaggctaattttaattagaacagatttctaataagttaagccttcacctgagataaaaggcatatcaacagtgagaactacatgaagacacaggatatcaacctcgtgtaggctttctgaaagacaatgatggaacctgtggatagatctgaaaataaaacctttcaggaatagtttaagaaggtggttatgtcatttaatatttgtagaaaaccctattacttctccacttatttctcattattttagcatcattactagtttgcttagtgtcatactcatattgcattagcaaacatctattattgtgaatgccattgggctgtgctgactgtatataagcaaactagacacagcagaaagtccccattacctgtgcgtcattctccttgctgtagtgtcctcaaattcacataaagcctcaatgagacctgcctcaagtaggtcttgaactgtcaaaaaccatcctagtaattgtttctcttactgggggagaatagggggtctggatagaatcccctttcctaaattagtctgttaattcttgcttttctttaatgaacattatgaaaagttatttcagaaaaacttttgtaaatagccaccactaagattctaaaattttcctggccctttgagtttttcctcatttcccacaattcagggagtaccaaaaatttaggtttaaaagaagaatgttgtatagggaaagcttttaataggcttcagtggcatgtatttgaccagtagtacaaagttatctcccgacagtagtggacacacaactgatgaactacatctttccctacatggtgcttcaggtgcggggcgggattttattttatgtatactagagggtgaaagcatagaatccagaaggagactccctaagttagtatccagatttgctacttactagcttcataactttgggcaagtgactttaatctctctctgccttaatttccttatctatataatggggttaataatagtaggcacctcatagggtagagtgaggtttcattagatctgttatatataaagcatatagaacggtgccagctgaggcatcaggaaatggtaactactgctacttcctattgtgaacaccaccatcgtttttttccattcaagagtgtttttattaaaaatctgaagagtagaaactatattctgtaagtgatgctgctgatgttatatacttttcatgtatctttaactctggaaatataccatggatcttacatgttttgcttttttatctttgtatagataataaagagcaaacaactgaccagcctttgggtgagtagaactttaaaatgcattatcaaagtataattattgtgtataactccagaaggaatttaagacattttaatttggttttttaaagaaatgtgaataacattgggaccaaatgttttatttttttgtatctgtaaaagaaggtttagaagaggaggcttaaaaatgattacaaattcagtttctagggtcaagtcaacttctgtggagtgatttgtgtgtttctcacgatatgcaaacagacatgcgtacaaaaagaaacatgtacatgctgcatagttagcatagaggaggaagtggttagtgctgtctcttggtgagggatagaaatcacaaaggctgcagtagctttagcgtttgctcccctgtcttctccaatggaaagagaaaagaatttaggataaaatgtaaacgaacagttgcatttgaagaatgcctgggacaagaaaatgtaagggagaaaactttagcagataaaagtttagcagattaacatttaaagatggtaaaaatagctaacagcttgatgctggcagaagccagataaaatatgtctaaaatttgtccattggattcagctactgaagatgtgattggtggctttgagtggaatgttgaaagtgcctaatatgtgtcagttactgagttatgctgggaatttaaacatggatacaatgtataaaatagtggaaaaagaaagattcagaagtgaacaaatgaagacagtacatattaatttgttggaaagaaagagtggtttgaaattaactagatagggcatatattcaaagtgttttggtaggaggggaaaatgtgaggatatttacatttggaaaggaagtatctgttgagactgtgtagattagagtgatccatcaaagagaggacaatttatagagcaagttcctagaagagatgatagggatttgggccaaggtgaaaacaagagaaattggctttaatcagaatgttgaaacctcttttgagattaaaaagaaggagagattggtgaacagatagatttattgggaagctgaggacatttttagtttatgttttttgtttctaagtaattaggcgtagtaatatgcttaaaagattgaggaaaaggctgggcatggtggctcacacctgtagtcccagcactttgtgaggccgaggcaggcaggatcacctggggtcagaagattgagatcagcctaaccaacatggagaaaccccgtctctactaaaaatacaaaaattagctgggcattgtggtgcatgcctgtaatcccagctacgtaggaggctgaggcagaagaatctcttgaacccgagaggtggaggttgtggtgagctgagatcgtgccattgcacttcagctgggcaacgagagtgaaactctgtctcaaaaaaaaaaaaaaagattgagggaaaaagagtaaagtaaggctgaatatagatcttattctatggcagaggcttagaggctaaagaaaatggaagcaaggtcttacaagtctgatctacaagtgaatgtgtattgagagtccaactaagacttttaaagagtaagaatttataatggttcagatcagttgtgtgctttttctgtagcagatctcagctttaaaatagagaagataggctgggtgtggtggtacacgcctgtaatcccagctactcgggaagctgaggcacgagaatcacttgaacccaggaggcggaggttgcagtgagtggagattgtgccactgcactccagcctgggcgacagagtaagactcttgtctcaaaaaaaaaaaaaaaaaaaaagaaacctgctatgtttcattcatagtggtaagttttcatgtattccagctccatgatcttttctttagatcctccagacagacctcactgattaagaaatacctattaaaatagtgttctgaacaaaggcatagccatcatattctgtagagaggagcatacatatgtcttaggtacacaaaatgacaagatccaaatgtaactgggttagttgctgaagatggtttaatcacaaatatgcatttaatagtaatgctaataaactaagtgttttcacctagtgaaatgtttaatttaaccctgagatgtaggtatttttcctcatttttagtagatgaaaatttaaaactgtaagtgtttaataaaacttgctcaggattatacaatgtagtagttgagacaggattgaaacccatctatctctcattccatagcctccgttagctccattatgccaggtattctttctcaaacatgtcccaattgaaagaataacaagataaatggaatatcaggtcaacttctatcattgaagttcactaaacatttatctaatgtttcatctgtgctttatgacaggcatcccccacccccaggctgtggaccagaactggtctgtggcctgttaggaactgagacacacagcaggaggcgagtgagcgagcattaccacctgagctctgcctcctgtcagatcagcagcggcatttgattctcataggagtgtgaaccctattgtgcactccttaggagaatctaactaatgcctgatgatctgagatggaacaatttcatctcaaaaccacccctcccctgacaccgtccatggaaaaattgtcttccacaaaactggtccctggtgccagaaaggttggggaccgctgcttaatgaaacaagagaacaagccttggtttgtgaattcaaggctttggatactaataggaggcagacattaaatgaataatatagtacatgctacatgcctagtagaaatatgtaaagaatctagaaattgttcatagaagatggtgatcagattagtcgaggagagttagagagggctttacctaagaggcaaagccaaggtgaggattttcaaggacgaattgggagctctcaaggggataaaatgaaaatatatgggatgagagttcattcagaaatgaaggagagggaaaaaagggtgaagacatggtaagaatggaggcatgaaatagatggtgtgggtgaggaacaaagttcagtattgctagaaggtagaaaactagggaaggagtggctggaggctatactggtaatgtagttatttattgctgaataacactgcaaaatttactagcttaagaacagcatcagttttattatctctcattgttctgtgggttggactgggtttagcaggtggttctgctggtctttcttggggtctctcatgcaactgcagtcagatgaggctgggactgccacattcaagatggctttgcttacatacctggcaccttagtgggggttggtgaaagactgtgaagactgaaaaaatctccctccctctctctctctctttctcttcctcttactctgtctctctgtctctccctctccttgtctgtctctctctgtcctcccctcctcttcccgcccccaacttctttctcttcgtttccctctccctctttcctttggttccttctccctccctgagtggtctctccatgtagctgttttctttatgtcgggctggatctccaaagtggaaactgtcagagcttttaagggcttagaccctgaactggcagaggggtcacacatattatgttgctcaaagaaagtcgtgatacagcccagattcacaggtgggggtgactgtactacacaagggcaaggatactgtggtttgctgggggctacctgctaccacatctggaaagataggcatggactagaatgcaaatggccttgaatgccaaactacatcaccagtctaacccccagccactccttccctagtcctctaccttccagcaatactgagctgcctgttcctcacccacaccatcaaactgggactttattttgtaggacatggagagtcattaaaagatttaatacatgtgatttttaaataaatacttaatagcatttactatatgccagctccttttctaggtgcttctgaatattaactctatttagaaaagtaacataataatcagaattattagacatgggattaatgatataacaccagtttttgaagaatatattacattaaactttggaagacgtttaggatcatgagttaaaatgtctttctgaagtggcttcattattcttttgctgaatccactggcatttttgtttcacttttccaataaattgtttgtgttcaagaagttgtgggtagctcttacagtaaatatttttctacagaaaaactctttcatttatgttatcacttgaaaaccattataaattgctttatatttgccgtcttgaagttttctttattcctcactcttacctcctcaaattcaagttttattgttcgtttctctgtcgtgtcctttttcctctccctttctactacttctcgatcttccatccaccccagttcacctgtcacccaggaactgttttacaagtagattggacaggtaagatttacttacccaccatctttttcaccagtaaagtcaaggaaatgctgtaagacatcttaggaactagctattaaaaattatcattggaggaaaattttagaagtgttatagacaattatcgatacatatgttttaagacctgtagttctcacactgttgaacccgtgcattctgtaaactgtaccaagtattctttcccaaatagagaacaaaaccagtgaataatgatttgatatcagcaaaaacatcccatgatgcttagtttgacagttaattttatttccccaaagacccagtgatttttttattatatacttataattgttttctaccaataaaaatctatgatgtgtataattaaatgatggtattccatggaaaaatggaattatttacaagcattttactaccccagtaactttttaacctcttgctgtaaacctatgatttggactataatgatgtaaagcagagacaatgcattctcacatttcccctcaccttagaagaagactgatttgagtctgtcactctgttgaggttggatccttattctaatagcattgatggactcaaaaaaatgtgctgtggatcagccagctaagagtcttgctgtagcaggtactttagtgtaagaatactagtttattttaaaagaaattttaaaaaggccaggcgtggtggctcacacctgtaatcccagcactttggaaggccgaggtgggcagatcacctgaggtcaggagttcgagaccaccccgacctaagtggagaaaccccatctctactaaaaatacaaaattagctgggcgtggtggcgcatgcctgtaatcccagctactcgggaggctgaggtgggagaatcgcttgaacccgggaggcagaaggttgcagtgagctgagatcatgccattgcactccagcctgggcaacaagagcgaaactccgtctcaaaaaaaaggaaatacaagtgatgttaagttttatgctgcctcctattgaaatccatgctgagtattctccgctttttcattgaattaataatgcggcttaagtatcatttcactgttatgtatattcataacactgggcagttggctagaaatctctgaacatgtacatatagaatagagatgacatgatataaaattactgaggcttttcacaaagtagagttttttttatcctttgagagagtcacagtcttttaaattgatgctagttttaacactaggtttaagtgttccatggaaagaaaagcaatttcaccagagagatttttggtgaaataatcatctcaattatttgaaacatctgaaattacatattgtagacgtcgagtcagcaatgtgattattcatgcctgtttcaacttcataagagtagtattcataataacttacaaataaactacttagcagcactttgtggcaggggttggttaccaagtcctggcctgcgtcagagggggtggcctgcagttctacccaggcggctcttcagccagttggctggggctgcaggtgctcttgtcaccctgtctctctgctccctggcatttctgtcactgctgctactattacgggtgctgcacacgccccactgtcagccctcaagaagaaagccgtcagaggctattattgtcacgggatggtcttgaggttttggtgtgttctttatttttttttttttatttttttcttccctttgataccagtgggtcttgagtttttaaccattgaccccattccaggctatcaaagaaaggtaccgtgttgaagacctcataagcactaagctaggtctggctttccacactgttttagatgggctgcacacctggttaagctagctgctactttttaaggcatagatacagatctttttttctcttatgaacaaaaaaactgtttctatcagaatacattatctttgagcaaagtctcagtgcactaagttcaaaaaatgaacttttaaggtactcatacacaaaatcttcacatacccctgaaatagcctcatctgagtcaaatgggggagtatttttaaaagatgctaagaggagacggtagtacatccacatggctactgcagaaaccaagaatacagtacccgtgaagttctctctctctttgatatttcccctcattcactctgatgggattcttcctgtcccttttttagttatcttgtttttagcctcttccattctcagcaaaacagaacctaatttgatgggaacccaatttcaaatattccttgtttaaattttctccaaaagtctagttgaatattatatcccttttgttataatttaataaaagtaaactttaatattaattactgttatgtttcatatacagctaataaatatcctttgcctggctctcaaaagtgtgaatatgcttaatttcagtttgatgattttagcatctgtgttcctcagagaatattgatctgcttacataaatagttctaaaatgaaattaaataatgaaatcttatttgaaatgaaataatgcaatcttaaagcatactttttattataataccatctccataggttttgttttaatctttatatcttctttaaacaccccctttctttttttttcaaagcgaaggacaaggttgcccttttgataggaaatatgaattaccgggagcaccccaagctcaaagctcctttggtggatgtgtacgaattgactaacttactgagacagctggacttcaaagtggtttcactgttggatcttactgaatatgagatgcgtaatgctgtggatgagtttttactccttttagacaagggagtatatggtaagatatttataatgtttgtttttacaattatccattattcttttcattatacaagttaggttaagaattgaaaatcagataaagataaggtaaacatgttgttgaatggaagagttttatttttcttattaagatgatacatttgatcttcattccatctgaataactaattagcttcatgtctttacttttatgtttcctgttttgtcaaaacatatttttcttactagaattcttacctgtcttttgtgatttttttttaattgatagagccacagtataataaaacttgataaccacacagcaaaatttacattcatatgcgtaaaatattacagtatgtggggttttctttgaggggggtagcataaaaggttctagtagaatgtatattttgtatgtttccttttcctaactattgcatggtcttttctagtcttttagtgagaactagattttaacaaggaaatgttggtggatggggcatataatagtaatttgtaaattaaagttctatacagatatgcttagaaatgtacctctacaaaaattcttacagtaaatatttaatgttttttccccattctttcacctaaatatattaacactgcatatatggtaaagaatttcaaaggagacagaatgtgctgtcactagctaatcatttatttggtgatttatttctttcaatatgggaaggccagctgttgagctcatctgaaccgtgttttgcaggattgtgcttccatgacattgtgcaataacatcagattgccagggaagtgacatttccaggcctgttgttaggcatgcaatgataaacaaaaagtaccggtttggctcctgtatctttccagttattttattttaataatttctgaatttactcttgttatttataattagattgatatgataaggcaagtttggtcagaatttttaatggtgctcaaagtagaatttttaatggaacaaaagctttttttttccccccaagatttaccacactgttgtgtaagggatggggaaaagtctcaaaatcttacttaaatgagtttccctctctaaatagtgaggatttagagaaagacaaatgaagttaacaaggtaaacacctcaaatgtgagatttcagctattatgctgatgtgttaataaaactttatttataactcttatggactgatgactaatgggtgaatccatccatttttttcttatgaaaatatgaaagaatatacaatgcaaatatgccaccttggtaattggcttatacaggttgagcattcctaatctgaaaatccaaagtctaaaacttcgtgagtgccaacatgatgccacaagtggaaaattttacaccttacgtcatgaggggtcgcagttaaaactttgtatcatgcacaaaattatttaaaatattgtataaaattaccttcaggctatgtgtataatatgtatatgaaacataaatgaggctgggcatggtggctcatgcctgtaatctcagcactttgggaggccgaggtgggtggatcacttgagcccaggagtttgagaccagcctgggcaacatggcgaaaccccatctctactaaaaatacaaaaattgggccggacgcagtggcttacgtctgtaatcccagcactttgggaggccaaggcaggcagatcacctgaggtcaggagttcgagaccctcctgtccaacatggtgaaatcccatctctactaaaaatgtatggtggcagtcatctgtaatcccagctactcaagaggctgaggcaggagaatggtttaaacccgggaggtgaaggttgcagtaagccgagatcacaccactgcacttcagcctgggtgacagagcaagactccgtctcaaaaaaaaaaaaaatagaataaaataaaataaaaacacgaaaattagctgggcgtggtggtgcatgcctgtaatcccagctactcaagaggctgagacacaagaatcgcttgaacccaggaggcagaggttgcagtgaaccaagatcacaccactgtactgcagcctaggcgacagaatgagacttggaatcttggtctcaaaaaagaaaagaaaaacataaatgagtttcatgtttagacttgggtggcatccccaagataacctcattatgtatacgtaaatattccaaaatctggaaaaaaaaaatctgaaacacttctggtcccaagtctttcggataaaggatactcaacctgtattttcaatctggcatcaggggtgttgtttgtttttatattatacaattgatctcagcttttaaggtgcctacgtgacataaaaaggaaaaggcttccaaaacttcactagaagtgatgaggtgtaaggaaaaaatattgatcagtttaggtttctgtattggtgaagtatttaaagattgagggaatcatatgaagaattactaccttggttgtttattctcatttcttattgatattttcaccttggcttttaagccctttgtttgacttttaaaaccaaatcctgtggccagggcatggcggctcacacctgtaatcccagcactttgggaggccaaggcgggcagatcacctaaggtcaggagttcgagaccagcctggccaacatggtgaaaccccgtctctactaaaagtacaaaaattagcccagcgtgatggtgggcacctgtaatcccagctacttgggaagctgaggcaggagaatcacttgaacttgggagggggaggttgcagtgagccaagatcatgccactgcactccagcctgggcaacaaagcgagactccatctcaaaataacaaaaacagatcctttagttgcccctgtgaagtagagaaccagaaatattaaaaattgtgacaagactgcagtttaggctgaagctttgccccaatataaaaacgtcatcttggagtacaaaataaagaggcatgttaaagcaaaatgtcagcttaagaaagctagaaaacttttaaatcctactgattcgtgtcttaacagggtggctgcattatattttgaagtattgtgaatattccaaacatcagacacatctacactaaatgtaagtgtggtagaggcttgagggtttagggcatatcataaagaaacctttagtttttcttttggactatgcctttaccgctagttgatattaccaggggactcagtgcttgagggctgtgggggaagatggaaggcagagtcacaggaatttcagcatgaacagctagatacggagaacagaggaactcgagttcatgcccttttatattatattgcacgcaggtttgtagaagaaataaaagttgcaacagaacagacaataattcagttttaaacatatgtaaacataaaaaacagaaaccaaaaccagaaataactgtccttaaaaatacaaaaatacatgtccttaaagataaataaggagaaagatttctagttatgttgtatagatggccaggataaaaagtaaccctttggcctgagatctatccctgcatagcctttctgtgttcatcgcttgctgcagcttagttgtgctttcgtgtagaagaacggtaaaggagtcttgtcggaatatggcaaaagtgttattcggcctgcagcggagcagctgttcagttcacatagctcagtggttaagcagtgggccttagcatagctagcctgggttcaaagctttggctttctgctgacttagctgtgtgactgtggttctttaacttttctaagccaaaaggaatctacaaaatggatagaactaaattaatgaggtttacaggataagataaaataattatccctgtgcctggcacactaaaaatgctcaaaatattgtacctattattgttgtcgtttcctgtcaatttattaaagacattcaagcactttttcatctttagattggggatttggactaggtagcattctatttcaggcctcaatgagagaaacccagctttaatcagtttctgtgtattaagggtctacctaaggttttttgggttttttttttggttttgggtttttgtttgttttgttttttgatacggatggagtcttgctctgtcgcccaggctggagtgcggtggcgcaatctcggctcacggcaacctctgcctcctgggttcaagcagttctcctgcctgagcccccagagtagctgggattacaggcacatgccaccaacgcctggctaattttttgtatttttagtagagacaggcttcactgtgttagccaggatggtctcgctctatctcctgaccttgtgatccacccaccttggcctcccaaaaggccaggcgtgagccactgcacccagcctgccaaaggttttttgtgtttttttttttgttttttttttttttgaggaaaaaaagtcagggggtttaaagctgtagtgtagtaaaacagtgaaaagccagtgcactgacattttacgttgtctgagagtcgagttacctaaaaagccagcagtagattatagagacagtatcatatagcacagtagcgaggctggcctgcatctgtattttggttctgtcacttactaggcatttcagtttgggtgagcttttaaacctcttcatgtctcagttttcccatctgtaaaagagggatgttaatattacctactttgttgtgaggattgtgtgaggcaatgtaactagtgacctttcttggaaccgtgcctggcacatagtaagtgccgtgtaagcctgctggggtggcgggtgttgtgctcatcagccactcactgtgctaagtggagtgcatattcagttgagtggaaaagtttttcatttaaatgattattttctctgtagacaaaaataaatatctgtgactatattcttgaatcatcctcccaagaaataaaactccctaaagatctaatttgcagaattgtatttctaagtacagtaagttctttgacatttgtttaaaaaatacctattttcttctctatccttgagtaatgggatggttaactaaataaataagcagtactagagatggaatttaaaaacaacaacaacaacgatttgggccacacacggtggctcacacctataatcctaacagtgggaagctaaggtgggagggttgcttgagcccaggagtttgagaccagccttggacaatatagtgagacctcatctctacaaaaaatttaaaaattagccaggcatggtggcacatgcctgtggtcccagctacttgggaggctaaggtgggaggatagcttgagcctgtgaggtcgaagctgcagtgagctgtgatcacactgctgcactccagtatgggcaacagagcaagaccctgtctcaaataaataaataaataaattttttaaaaaaatgatttggactagttcattttacacaaaagtacttaattcccctcaatataatttggttgcagactttgatacagaatagttacacttttcgtaagacattttgggaaagagaaaaaatattttggtgttaagtgccttaattccattcagcagttgcagggctgggcatgtggcattaatgtaacagaacaacattcagcttttccctggatgaatggaagctaagccttccctcagagttgtatcttcaccccaatcaagtcttgctggagccagacgtattacctgacatgagggaggcagcacccaggcctgctgtcagtcgtctctgagtaataccagttgttgaaatggtaccatttctactaaaagtcagacccttgaaaagagacctccagatctgaccctgtcttgattggtttgcattgttaatttaatgcaattcagtaagtatttactgagttatttttgttacatctatagtccagatgaaggagtatgctatgtgctgagagaaataatagtgaataaagatcatgatctgtcctcctaagaaaattacagtcctgggccgggcacggtggctcaacgcctgtaatcccagcactttgggaggccgaggcaggcagatcacctgaggtctggagtttgagaccagcctgaccaacatggagaaaccctgtctctactaaaaatacaaaattggctgggcatggtggcgtatgcctgtaatcccagctacccgggaggctgaggcaggagaatcacttgaacccgggaggcggaggttgcagtgagctgagatcacaccattgcactccagcctgggcaacaagagtgaaactccgtctcaaaaaaaaaaaaaaaagaaaaaaaaaattatagtcctttaatacaaggagaaaaaaacactatggagtcaaaacatcaactctgtgattttaagcaaatcatttaatctttgtaatttaattttctcatctataaaataagggcagaaatcacttaaagttgttatatggattaaaattagattgtgtatatgaaagtcctttgaaaaccaagaaaatgttatacaggttgaatatctctaatctgaaaatcccaaatccaaaacactcctggtcccaaacatttcagataagagctactcagagtgtgtaaatgtaaaagattagtgtcattatgatttcttatcagaaaaactaagtagacataggactatagaatgtcaggaaaagccagtatgtgattgtcagaaagtgctgctacagcatttcaaagtagggagaatttgaagtgtgttagaaagccacaaaccagttaccaggtagtagttaccaggtgagtaacttgctaaggattctgaactttggaaataacccttgaggactggttatggtttgggtagatagaacggagatagagtaacttgagcaaagttgtggacgttaaaaataagtttatcttgctcttgaagcagtaaagagactgatggaaaataaagttatattttgaatacttgatggaggtgtataagttgtaccctttttaaagtgtataatttggtgatttcagtatcttcacaaagtgggcatcagtcaccactacctaacttcagaacatttccatcaccccaaaaagaaaccccatatccattaacagtcactcccattcctccttaccccagcccctggcaaccaccaatctattttctgtttctgtggatttgcctattctggacatttcatataaatggaatcacccaatatgtggccttttatgtctgccttctttcacttcacatgttttcaaagttcattcatattgtagcatgtactagaacttcattattttagggctagataatattctattatatgattatattttgtttatccatttatcatctcatggacatttttggacatgattaataatactgctgtgagcatttgtgtacacattcttgtgtggacgtagtttccatttctcttcggtatgtacctggaagtgaaattcctgggtcatatggtaatctatatttaactttttgaggaactgcaaaactctttccaaagttcttacaccattttacatttgtgccaccagaaatgaatgagggttccaatttctctgcatccttgccaacacttgttcttgtctgtcttttttattgtagccatcctggtgagtttaaaatgacttggaactagtggctaatgatgttgagcatcttttcatgtgcatatttgccactcatatatcctctttggagaagcatcagatcctttgcctatttttaaatcaagtcattagtcttttttttttgagatggagtcttgccctgttgcccaggctggagtgctagtggcacgatctcagcttactgcaacctctgcctcccaggttcaagcgattctcctgccttagcctcccaagtagctgggattacaggctcccaccaccacacttagctggatttttgtatttttagtagaaacggggtttcaccatgttggccaggctggtcttgaactcctgacctcaggtgatccacccaccttggcctcccaaagtgctgggattacaggcttgagcctccgcgcctggccgtcattagtctttttattgatgagtggaagagttctttattctggatacaagctgtccttatcagataaatgatttgcaaatattttctcccattgtgtgggttgtcttttcactttacctgatcttcgtggtttattgaattaaatccattcttttggtcattatttttaaaaccctatctgtgcactcctttttaaaattccctgtgtgtgcagtcttattttcattcacaacagtaatttagttttttgctaggctagtctcttttctgttagctttcattccaggtccaatccgtgtttatttctgttctcctgcccataatctacctcgctctctctctgcctttgcaaatttctagccattccctctcttaagaccatcccctgttgtttcacttcatactgatattcctctctactttactcatttcatacgtacatggtggttgtcccactaacatgatttatggcatttaattatgtgatgactttcattgttgcttgataacataaacgtgtgaatcgtgtgaattcatgtatggagatacatgaatctcctgatctcctgcttagaggtcaggaactttgtccttcttttttgtttctctcagtgcctacatgataacttccagtgcacacatgagctgtaatataaacccacacttgaaaatgggtatatccattttctcattttagctgaaacgtatttgaaagaaccatttttctcattttaatcgaaattcagaaaaagcagacgacctggattttgtcctgtaggaccacatgaagcaaattgtctttaattctcaaagccgcattctctgctaggagtcggggccataattacaatggattagctacttttggttccctgtctaaatggcttttactatttgctttaaaataccctgtaaagaaatcattaaatccagaatattgagagagcaaaatcagtgggctccagatattgcaagcagaggggaggatatcttcaaaagtgttttgtccagtacttttatgaagaagttcagactgatatttttgttgttttttacagccaaaacaaatttcaagaaaacattgagttgtttgggttagtttttatagtatcacttctcagtaaggaaatatgattcatctgttgagtcctaaaactatcccaaattttagattattgagtcaaaagactctagatggaagattgatatttatatctcatagcaaaaagaaaaaatagcaatctgcgaagtcagatttcccatctctgattataaaactatatattttaataacccttaactgtttatggtaatacctgcagtttcttgacttcatattgcagttgctattcatctgaattgtgtttgttcatccgttaaatacttactaagctcctgctctctatgccaggaacacacaaataaataaatgtaagactatctctgccctaacagaactcctagcttcatggaggagacaaatgagtcaggagagaaatcctagctgcattcttttttatatatcataacataaaattgtattttatattatactattggttacaaatatattttataaattaggatatacttcagacagcattttgatattgtcttgaaatgcaaattttaagtgcagactgttggtaatttatttatttatttatttattttgagacagagttttgctctgtcgcccagggtggagtacagtggcatgatctcagcttacagcaatctccacctccaaggttcaagtgattctcctgcctcagtctcccaagtagctgggattacaggtgcccaccaccacgcccagccaatttttgtatttttaggagagatggggtttcaccacgttggccaggctggtttcgaacccctgacctcaagtgatctgcctgcctcggcctcccaaagtgctgggattataggtgtgagccgtcatgcctggcctgttgccaataattttaaatgcaaaataacattgtctatatttataattgggtatttcttacatatgctcacatcaacctgaagaaaattaaagtcaaggtttttctacaaaaagttatgcagtctgtatgttcagagtgcatttagaattgacatctatctctctcttatttttcctcttttcagggttattatattatgcaggacatggttatgaaaattttgggaacagcttcatggtccccgttgatgctccaaatccatataggtctgaaaattgtctgtgtgtacaaaatatactgaaattgatgcaagaaaaagaaactggacttaatgtgttcttattggatatgtgtaggaaaaggtaagttttctaatctttattaaagaattgttggagttaaatatcgaccatgacaaactagagaaacctgtgaaatgctaaaagccatttgcgtttgtgaattttagtttatacattgaaactggaagaacaaaactagaggaaaatacatttactccatgtatatctaattattttaactcttcatatttgctatagaacacaaatgaagaactaaagggcatgggcatttactcacactacaggggattcaactctccagaatgcctttagatgactttaataatcactatagttattccctcaggaattaacaaaaccaacacccatggagttgggatctctgctcactagtcagtcctggtcttccagacatggaatgagtagccgaagcagatgtttggaggtttggatcccatttgtctgccattgcctttctaaggagtagaaccaatgactgttcctctagatttactatttttttgcttgctcagcatttaccaatcaaaatccaatgccagagttcaaatgcaactctagttttaaagctaacaaggagttagtgggttattttgggtagatatgtagctacctagatgaaaaattttgaatctataattttaaattatgtattctaaaaaactgttgtattttctcattatttatacccttttaagaatgctctttaacttttcatatttctatctgccctcctccgcctcccttaaatagaaatgactacgatgataccattccaatcttggatgcactaaaagtcaccgccaatattgtgtttggatatgccacgtaagaacatttgatgtttacgttgaagtttcctttattgtttgatgtctttttgtttttgctttttaggagcaggggtcttaactctgtcacccaggctggagtgcagaggcgccatcatagctcactgctcctgggctcaagcgatcctcctgcctcagccttctgagtcgctgggattacaggcatgtgccactgtgcctggcccctgagggttttttgattatagattagaggcctagaaaatacctatagacatgtaggcataaatttacctccttgatattctgcgtagaaaattttaaatgatcgactttagcattccatatcatggtatcttaattattaagcccaaattgggcatgtaattcctgcttaaagattaactctttaattatcaatgtcatgtgagaggcagaagagaaaatgaagcttattggtgtatacagaagtcccatgtggcaagtgtttgcttttctaacattttctttttaaaaaattatttttattggatattgacaagttataattgtatgtatttatgggatacaaagatatgctatgatgtacgtattcaatgtggaatgattgaatcaagataattcacatatcacctcaaatacttatcttttttcctaactgaaacattgtaccctgtgactaacagtccccacgctgtccccacccccccccagcctctggtaaccaccattctgctgggtgcttctctgagttcatttttattagcatccacatataagtgagaacatacagtatttgcctttctgtgcctggcttaacttctttttctatttttaaggtgtcaaggagcagaagcttttgaaatccagcattctggattggcaaatggaatctttatgaaatttttaaaagacagattattagaagataagaaaatcactgtgttactggatgaagttgcagaaggtaaaataaaaaataaagagaaaagtactcagaaaaaggagagcaggggagacacacctattcagggttccctctctggtgattgttttattcttattatgtgggtttggaattagtacctactttataaaacaatttttatattaatataacgttcagcaacacttctgctatttaatgtcatctttccttcccttttgacctagctctccaccatctgtgcagcattactcagactacaaggctaagcctcggcacagtcattaataaagttgaattctcagagctctactttgcttctatgcccagtgccttggtactggcaaatctccctatttgagggtgggtgggtggcatggaggggtggtggggaattgtccagtgagcagtctctcccaggatgggagagagaaaactttacagaaatttttagacactgctgggaaaagctgagttcatttttttccctgatgaacttagtagtttttaaatcctgatttaaggatgtgatcctagggggtctaatgccacatcttccatttctatctgttctccctgcctgctggtataatgctgtgcatatgtcagatgctgaacaagtacctattatttcagtagattgcactgtgttttttgaaaaaacattttataagccatagcaaaaagaaggtaacttggccaggtatggtggctcaagcctgtaatcccagcactttgggaagctgaggcaggaggatcacttaaggccaagagttcaagaccagcctaggcaacatagcgagaccctgtcttcaaaataaaaaataaaaataaaaaagaagaaattattttacaaactagcaccactagaaaatggagtttcatggatgttccagtgatggcagtttgggtataaggtgtttgaccaactgtcagccatatttattttcatgtttttatctgtgtagctattttagatcacttgacttagccacttttccatttaacataaccagccagggctttggacttcctgccaccctcccgcttcatccagagaagttccacttttatttgttttctacattaggcttcttctgaagcttacatttgaaggaaaggctctgctgctttaaaaaaaaaaaaagaaagaaagaaaacctttggattatgtcagttatattcaaactgagatccagtaaggtgctccagaaactctacagtgttttatttcaatttcgtttttaagtccattttaactattttaaaacttaataaaaagcaccatgctcactcacatatgatatttaccaaattgtcatagcaatgaatggcatcccgatatgtgctgtgaggatatttgaacttcttataaacatcttagacagttttgcttttcgctgatctttttcagtcctaccatgtctgcttaaccagaattgcccaggcaggaagaccctgtagtgtacatggagcacactcagctcagtgccgtgcacattgtgcccttcgtgggtaacggcccactcattgtacaaaataagtaaaggcctaatagtatcatgataaataatacagttaaatctagcccttattttgagttttggatgctttgtgtctgacccctgtcttagtagtaaagagcaaaagtagttgtatgaaatttttcacaagtcatccaattttgaaacaaaactttgctgtttctccctttggatcttccagattacttaattgaaactcattccatggctgggcatggtggctcacacctgtaatcccagcactttgggaggctgaggtaggaggattgcttgagcccaggaattcaagaccagtctgggcaacacagcaagaccccatctcaatttaaaaaaaaaattatttggggccaggtacagtggctcatgcctgtaatcccagcatttggggaggctgaggcaggagaatcacttgaacacagaagtttgagaccaacctaggcaacattgtcagaccccccatctctataaaaatttaaaaaattagccaggcattatggtgtgcacctgcagtgccagctactcgcgagacttaggtgggaggattgctcgagcctggcagtttgagactgtagtaagtatgaccacaccactgctctccagcatgtgtgacagagcaagccccatctcaaaaaaaaaaaaaaagaaaattccagagggagaaaagtattcacagattataagccaagcagttgaaggggaaaataaacatgttaccaatttctttttttaattttttggtttctttgtgtgagactacagagtctctgtcgcgcaggctagagtgcagtggcatgatcttggcttactgcaacgtccacctcccaggttcaagtgatcctcttgccgcagcctcccaagtagctgggactaaaggcacacaccaccacgtccggctaatttttgtatttttggtagagatagggtttcgccatgttggccaggcctgtctcgaactcctggcctcaagtgatccaccggcctcagcctcccaaagttctgggattacagacgtgagccaccacgcccggcccaccttaccaatttcaactgtgtgcaaggaaaacaaaatatgaggtaaattggttgttataatgctacagccatcaatctgtaacgtgacttttatttttgtactattcaggacagcattattattagaagtgttgaacatactactgaaggttttcattgtgagtagatgttcgatatgaatataggaccttgaagtaacctacatctaattataggacccctcttctcccttcccccactccatgataactaccattctaaacttattcctttttcgttttacatagttttattgagtttatatatacccaaaaaagtatgcgtagttttgtttttaacttcataaaaaggtattatgctctatgtagtcttttgggactagatttttttggttaatattatgttgctaagattgatccctattgttgcatgactgtagtttttaactgctacgtaatattctgttatgcaaacatactacagtttttttcaactactctcctgtgttggtgagcatttgagttagttgtaggtttttgctatgttaacagtgctatcattaacagtcttgtgtatgtctcctggaatatgtatgcatgaatttctttgcagtataattctacaacttggaattgctgggtcatagggtgtgacagtattccattttgagagagaatgccagacagttttgtaaagtggttgccgagtctacacttaaccctactccccacggccagcaagggataatgtgaatctgtactctctccatcacttgatagtcagacttttttatttttgccaaatgttaaatagtatctcatgtgatattgaacattgttcatatttttaatagctatatgtatatcttatgtgaaacatctttttatgtcatttgtgcattcttctgtgtgtgtgtgtgtgtgtgtgttttggcttattgatttagaggaatgttgtatgtgttcttgatataatactagcgaggaccgctaagacacaattgaataggtagttgtgggcatccttgtcttgtttctgactttaaaggaaatactgctaatgtcttcacatttagaataatattgtaagtttttttattaacactttatcaggttaaggaagttctcttaatttttttgaaaatttttattatgaataaatgaacaagattaaatggtttttctgcagctatgaagaagaaaataggatgtttcttttctttcaatttcttaatatggtgagttaaatttatagatagtctaacattaatccaacttgagataaatcactttcattgggatgtatatttttaatacactactagatttaatttgccatcattctgtttagaattttcatatctatattcatatgggaaatgggcctgtaattttactttcttatagtatttggtttaattttatgagaaaataaaattagtatttagtggtatcagtgttatcagtatcagtggcatacagagtatcagtgttatctgatagaatgtagcgtaggccttgtggaatgagatggaggacaaccaagatggttgattttatgtcaacttttgccaggcctcagtgccaagatatttagtccagcattattcaagatgtttctaggtgatggatccaacattattctggataagattaaagtttaaattgatggactttcagtaaagtagattgctctccataatgtgaatgggcctcattcagttagctgaaggccttaatggagcaaagactgacctcccacaagcatggagtttgctagcagcccgcctctggggctcaaactacaactctcctctgcatccccagcctgcctgcctgcaggtttcagacttgcaccgccacaattcataaaccaataccttaagtcagtcccttcttctcactgtccctctatgtacacacatacacacacacacacacacacacgtgtacgtgtacacatgcgcccatcttgttggtactgcttctctggagaactctaatacagaagaagtacaccctgttgtttactgggaacttttgtataaattatgatctgttccctaatgtttatggtagaacttgcctataaaccaacctgggattggtatttttttggtagaagatttttaaccactggttcagtatcttgaatatttcttgtaccatataggcttttcatttcttgagtcaattttgataagttatattttcctaggaatttgggcagttttcaaattcgttgtcatttagttgctcatatttctaatagtattctttaatctctgccttatccatagttatatatccgttttcatcagtattacttgtacttactttccttttttatttattgccagcttttgccaattgtgctatttcattttgaagaaccaatctttgactctgttgatttcttctactttttcattgttttctacatcattaacttctgctgtttatttatgtcttgccttgcatttattatttctttttctaacatcatcgtagttattcacttttagcctattttttccaatttaagtttctaaggctttacatttctcttaaaacatcactttcatcacacatcctataagtttagggattttttttagttgactttttttttctttgacctttaagttatataatattatctttaattttcaaatatggcaggaattttcatttcactttttgctttttatttctaccttaattgctttgtgatcgaataatagtctgtctaattgctatgctttgaaatttgtggaggttttcattatggccaagtaaaagatgaaattttgtaaattttgcatgtgtacttgagaaaaatggatatttttgtagtaactggttgcagaactctatgtatgcccattaggtttggcgtattaatttttattgttttgttcagttctatatttctgctgattgtctctttgatcaataattgagatgttgaaatctctcaatttaccaaattttcttgtagttctagcactttttacttcatatatagtgactattttcgtgttttaaatgtttatattttcttattgaacctttatcattatgtagtgatgcctccatttcaaatgcttcttctctttttgtatcatactaacagagccacaccaacttcctttttgttgacctaatatgctattttttacacttttactttcctactcttaacccctaggctagcctgcttctctacacttttactttcaaacatttcatgtcattctgctttgctgtagcttttggaggcaccatataacagattgtttaaaatccaatctgataatcttggtcttttaatgagaaaatttagttaatttacatttgttattttttgtacctgttttaaccatctaattttttgatttggctcattttcttatcttttttaaaaaaattgtatttatatcttttcttctctaacaaataataattttaatgtactcctacaatacttggtatctccttttaactcccaacatgttgatttaacttagacttagttctggatcactatataattttgtctctttttttaaaaaaaagaaccttactattgttaatttataacatagtagacagaagtaggataaactataacttaaataatatacttctaaatttaaattgatgtgtatccatatacattagtctatctaaaacatgttgaatgaaaatggtacattacaaagacatacatagaacatttttgttgaattcaaaaacctaaaacattggcatatactatttatgaacacttacacacatgagtaaaaattaaaacatgcctgatatgtctggcacataataggtgctcaggaaatatttgttgagtgaataaatgatactgagaatataacctgataatgtaggatagttcttagcctaaatatttaaaacataagaattggtggtcttaaaaataatatttattttcatatcttttagatatgggtaagtgtcaccttaccaaaggcaaacaggctctagagattcgaagtagtttatctgagaagagagcacttactgatccaatacagggaacagaatattctgctgaatctcttgtgcggaatctacagtgggccaaggctcatggtacggtaaagcccattttttgttagatctacaatatacttaacgttaaatcataaagtttcttctgaataaataactttcctcccagttttacagtgaaaatattttggcctactaggcaaatctcaaaccaaacaaatatttcaattatggatattacactggcttatttgatttagaaatatcaaattatttagcccattattgtcactattggtaaaatttaaatgaccatttaaaaatttttctatttttaaaataggttaagtttccatttgtctaatacacaatcctttagattctcctatattgtgacctgtcgaaaatcatggattgggttctgatccagtctctaccactctatgaacatgttatctataacatgtaaataagaaatggtacctgcttcaggctgggtgtggtcgctcacgcctgtaatcctagcactttgggaggccaaggcaggtggatcacctgaggtcaggagttagacaccagcctggacaacatggcaaaacctcgtctctactaaaaatacaaaaagttagcggggtgtggtggcacgtgcctgtaatcccaactactagggtggctgaggcaagagaatctcttgaacctgagaggtggaggttgcagtgcagtgagcagagattgtcccactgcactccagtctgggcgacagagcgagactctgtctcgaaaagaaaaagaaatagtacctgcctcataggttattgggattgaatgagtgcataggtagaaatgagcatggcactcgacaagtcctctgtacttttgattattcgtataactgagcatcctctcttggacacttgatcagtaagttgagtgatcagcagagaagatgacgtgaaaatcaatctgtagcttaattaccttttggtaattgtgtatggtttaatgaaaaaataagtttaaattaccaattgaaataattttggattttctgagtccaagtatctagtctgtgagtctcttatagataattgaaaaataattgtatttaatgaacttctataaaatatctttattttcataaataataatttttgttcttggccaggtgtggtggctcacacctgtaatcccagcactttgggaggccaaggtgggtagatcacctgaggtcaggggttcaagaccagcctggccaacatggtgaaactccatctctactaaaaatacaaaaaattagctggtcatggtggcaggtgcctgtaatcccagctactctggaggctgagccaggagaatcacttgaacctgggagtcggagtttgcagtaagctgaggtcacgccattgcactccagcctgggcaacaagagcaaaactcagtctcaaaaaaagaatttattctctaatacatatttttagtaaattaacatattaaagcacattaaaatgtaaaatgctataaatatctcaccattccagataactggataagtaattgaatgtcttttctctaaaaaagatctaaacaacaaatagcaaaattacggtggtaaagatcaacaataaacgaaacttcataaaacaaaatgaaaaggtcatatagaaaatatttgtaacaaataagagaaaaaaaattaagaccctcctcagtaaacaagcaaatgatacaaattcaacaatccacactgctggaagtatagagaaaaattttttaaatggctaatgtaagtaattaaggaataattaaaactgatggtatctttctgctttttaataccatcaagtagacaaatgttttaaaaattaatactctgttttggacatgttatgctgaaactttatattccatgcaaattgaaaataatttgtcccatatgtaaaggaacaatcacatagctttatctatcttaaagcattacgtatatataaatattaactatgatagaaaaacaataaaacccagaggtattataaatattcaagagttaacagaatggttaaaggtaacaaactataatgtggctgttcagtgacattgtgctttattaaaaattctggtcatataaattgaggcaacagtgaaaatttatctacaattgtatgcatatttttgattgccacaataaaaattatatatacagttggataagaactataaacaaatggtaaatgaaagactttgtttggccagcagaatagtgagcattattttttaaattgtatgtgtttaaacaatgtaaatcatgtttttaagcaaaagaaatgctaactatattctcctccataaatatttgcctcttatcatcagaaaacctaccaaagttgttcttattgttctttttcagaacttccagaaagtatgtgtcttaagtttgactgtggtgttcagattcaattaggatttgcagctgagttttccaatgtcatgatcatctatacaagtatagtttacaaaccaccggagataataatgtgtgatgcctacgttactgattttccacttgtgagtctcttcttttatttaaaatacagtgatatattctcacttattaaagactaaattttttaaaacttaaagttgatggtaaatataaaggaaatatatatatttatatatgtgtatatatttatagtttagtaacactgatcataatatttactaattgccaaaataccttaagtttatgagatttagaaatgtctaaagttcactcaggaaggatgcctctaatttcttatatcctaaacacgagagccaatgtgaaggaataaaatgtgctataaatatgtcaagaataatttccttttaaacagttataacttatattggaaacagtagtttttaagtcttgttaaggtatggtcatatgctggaataatagaaatctagttctgctcttttcaaacatttaggtttgatagttattttacgttggtctaaagaagccagtaaatagtacccctctttcctacatgagtgtgacaaactgagaagcaagcaaggagtaagacaagcagaaacccaaaatatcactttgattactgatagaggctttgtggaggatattgcttcatgtcagagtaaatggtctagcaccaaaccccagaattgagtggccaccccacacctccagtctcagcagtacggagcccagataggcttcctgaggtactgagcaagctgggggcctgtgggcttctcactggagcagcagaacccttactcttggccattgggttggctctaaaagaagaaaaaggaaaaggctgtttatttatccttcttaaatattctaatcatataaatttccctgcaccttcccaaaagtgatgattaagaggagagaatccaggagtcaaacactaatggggctctctctgcttaagaggaaacttgagtagctcaagaagcatttctaggaatcatttgaaaggaagctctttcagagctcactttactttttagatggcttagtacagaattgagaattcctattataaccatagattgttgttttcattgtttagtcctggataattttgggattaccaaaattcacgagaggccagaattcacgagaggatagtatcagttaagatgtcttatgtactagattatattgtggctttcattgatttcattattaacagtccctaatttttttttttacaggatctagatattgatccaaaagatgcaaataaaggcacacctgaagaaactggcagctacttggtatcaaaggatcttcccaagcattgcctctataccagactcagttcactgcaaaaattaaaggttactaccttttctgtttatagctactaatggaaaactttatgaaactggaaacttattttggcatagaccatagatatgctgccttattattaaagtagagataaccagtctacagaaggtcctatcagtgaccctttttatattctgtttccgatggtgaccagaggactttatgtgtgcttaccctccagaatgctaaaaaattagtaacattagagtatattcttttttctttttttagagacagagtcttaactctgtcacccaggctggagtgcagtggcatgaacatgacctactataacctcaaactcctcagtgcatatgatcctgccacctcagcttcccaagtatctgagtctacaggcacatgccactacacccagctaattttttaaaactttttgtggagaagggatctcactatattgcccaggccaatctcaaactcctggcctcaagaatcctcccttcttggtctcccaaagcactcggagtacaggtgtgagcttccactcccagctccatattctacttttaaatatgttcagattttcaagtaatcatttcctagttctatgactagacatatagcaaattagaattttttttccatttttttatttctagttgacttacaaatgagaagctagttctgcacattgagtgttctaatgaaagcttttaatttgttcacaactacatgaccatagaatgtatcagctaaaactcagggaatggaatgggcatgattgagaattacacacataaacctgttgtcatcctgttcggagctcatctacttaaaatcctttcttctcttaaaaagttagcccattatctgattcagttatattttccacctacgattatggattactataatattttaaaaacagcttaagctttttttataaaactggtataaaaccaggtttttttttttgttttgagatggtgtctctctctgtcgcctaggttggaatgcagtggcgcgatctcagctcactgcaacctccacctcccagactcaagtgattcttgtgcctcagcctcccgagtagccaggactacaggcgcacaccaccatgcccagttaattttttgtatttttagtagagacaggtttcaccacgttggccagactggtcttgaactcctaacttcaagtgatccatctgcgtcatcctcccaaagtgctgggattataggcgtgagccaccacgccgggcccagatcattttttaattaaaagttaataccccatctctaataatagggaagggtaagtttcctaagctgcactgcttggaaaatgttttccctgttcatctagagtgtaagaaagatctctttgactttgactactaacagtagtaagaactagaaattctaaatgggttgtaagtattgcatgaaggaaaaggaagataatgatagctggcgtttctcagtttcagggagatataaaggatgccttgaggatttggaacctgggaaaggagagtgagtggatttttgggggtgggggtgtgtatgtgtgaatattttcagattgatatatattcactgttgatgccaataataaaccagatttttttccttttcaggaacatctagtcttcacagtatgtttatcatatcagtactcaggattggaagatactgtagaggacaagcaggaagtgaatgttgggaaacctctcattgctaaattagacatgcatcgaggtttgggaaggaagacttgctttcaaacttgtcttatgtctaatggtccttaccagagttctgcagccacctcaggaggagcagggcattatcactcattgcaagacccattccatggtgtttaccattcacatcctggtaatccaagtaatgttacaccagcagatagctgtcattgcagccggactccagatgcatttatttcaagtttcgctcaccatgcttcatgtcattttagtagaagtaatgtgccagtagagacaactgatgaaataccatttagtttctctgacaggctcagaatttctgaaaaatgacctccttgtttttgaaagttagcataattttagatgcctgtgaaatagtactgcacttacataaagtgagacattgtgaaaaggcaaatttgtatatgtagagaaagaat

SEQ ID NO: 15676 - DNA, 83013 bp, Homo sapiens; identical to SEQ ID NO: 1212

SEQ ID NO: 15677 - DNA, 76937 bp, Homo sapiens
agcggaaggtgccccggggccgaggcccgtgacggggcgggcgggagccccggcagtccggggtcgccggcgagggccatgtcgctgttgggggacccgctacaggccctgccgccctcggccgcccccacggggccgctgctcgcccctccggccggcgcgaccctcaaccgcctgcgggagccgctgctgcggaggctcagcgagctcctggatcaggcgcccgagggccggggctggaggagactggcggagctggcggggagtcgcgggcgcctccgcctcaggtgagctcagggccgcggcaggccgggcgcgcgggtcgagcggggtgggctgcggtggggaggtgggggcgctgtcggtggggctgagcgcggcgggggccgccggcgtgagtgagcggaggtggggaggacttcggtcattgaggcggagcggaactcagcagctccccggaacgcctggggtttgagagcggggcccagggctctggagggtggaggcaaaagtggcccagcggctgcctcgctccctgttcccacccccgcccctggtgaaagggagaagtcgaggttgaccccggaggatagtgagagaaggaaagctgtcaggggacccctaggatggggcagtcatccagaggacttaaaatgcaaaagaaagggatgtggacactgctctgggagacctaaggaaggctgggaagaagcgcaggcgaggtgatgaatgcagagggtggggtgcaggaattcatgaacattttgcaaggtattgggaaagactgacgccgaactcatcatctccctccatcaaaccaggttaccacgttctcttcttgacttcaccatgaacatgaaactcgaagtaaaactattttccttgttaggtttggaatggctgtattagggttcctgaagttttggtctcgagactcctttaccctcttaagaattattgaggaccccagagagctcttatgtgggttagagataatacatacatgtaatacatactgatatttaccacctttgaaattaaagctaagacatttaaaaaatattaatttatttaaaaagaataacccattatatggtaacagaaataatactttcgtggaaaaacaaattttccaaaacaaaaaagtctattagagaagtggcattggttttcattttgaagatctctttaatgtcttggcttaatcacagagctggattcgtttatgtgcttctgcattcagtctgtcgcactattacaggtcacagaacgctggaaactgcagtgtccactcctgaaagaatgaatgaaaaagctaaataaagtcttaatattgttatgaaaaatctttatgaccttgtggaccccgcgaaagggtctcaggaactgcactaggggttcccagaccccacttagaaccattactttataccattgttgtaactttggcctgcctttgaaccccttagcagttttttgaacttctcaaatgacaaagatttgtcttacagtataattatttgtacacatctttataaatgccttaagaacaaaaactgtctcttaatattctgttatgtatagaggttagtaaatacttgatgagaggaaagtcattcattcaaaatggtatttattaagtgcttattatttgctagaaattttagaagataaaaaactaacaaatattcaattcctaatcataagggtttatccaggaatggactattatttggggacctttacaataacatattaaatgctgtgttgggtatgaatgataatggatttttatcttttattgaggacatggtatgtaccacaaaatatactaaatgtttacatgctgctgctgctgcttcattcttctttattcttcttatttttgcattatcttttttttttccgagatggagtcttgctctttcgcccaggctggagtgcagtggtgtgatcgtggctcactacaacctccgcctcccaggttcaagcaattctcctgcctcagcctcctgagtagctgggattacaggcgtgcgccactacagcccgctaatttttttgtatttttagtaaagacggggttttgctgtgttagccaggctggtcttgacctaaggtgatccagccgcctcagtcttccaaagtactgggattacaggcatgagctaccctgcctggccacattattttcttaaaccctcctgacaactcttgtttcagagtttgggattgaggcaaaggataatagtgacttgggattattgcttgtgcaaaggagtaatgatgtgaggagggaataactagcaaggcctagcagagaagtggcataatttttttctgttctaggaaaaacacgttgggcttttggatatgcaaaaaaaacaaatacaaaatattgttatgctaggtacataaaattttgaatttctggacttaccataatgtaaaaaattgtctttgggggcagatctccagagtattacggtgctaacgagtactctggttagggaaggttctgggcttcctgaagaaagccaggtatggaggactcctacatggccatgaaggagagagaagaaagtcagcaaggccctgccagggaagaagcgtggctgctggaatccaaaagcagcggatacttgatgttgggtgttgtgttttcctcgcctgccttcagtcagtttttgttaaaggctacaaaatggtcttagctttgtttgggggaactaaaggaaatatttgaggccacttttctgtggagtcacacagagagaaggggacagttgcctaacaagaggtggcaagcacaaagggcatgcagttgtggaatctgagaatttggggtgggaagtctgatgagaggcagatgagtttcacctgtctttcaagatggtaaagattagttttgaggaggttggctggggtgagaagggttggagaatttgggaacgttaagctcatccctatggagatcagaagaattaaacggactttttttcaaaaaacagcactgggagcttgggggctggacagtgaagcaaggtcagctggggatgcttactctatttaagacaaaaaagttattgtaaagtgatttcatgctgttgggagaagatctgtgatactagaaggtcctaaaggtattttttctctggtgccaaagacaggaattatagtgtgagtgtctagtccgtgtgggtgacaagtcccacgaggctgtgaagtgctttcttcagtcactggatctgcagccctagaatctcgaaatgttgcccattctgtttctttttcttctcttcacttttttttctgacactttacatctttcctcaaactgggtgaaaatttaataatacaaataagtaaaccacaagaaaagagcccgttcaaactgtctacaagagattagaaataattgtaaatgttttcattgctgatgactcagagtaaatccttgttgatagcttagttccccacaaccatgtacatttgggaatgtgctatagtcagacccggccctgattccattcaagactgacctggacaccctttgctgttagtgtagatagacacagactctgagggtcttgcccaagctatgtaaattctttggtggcatggaacatctgagccctaaggatggcagaccttccaggaggttctaaatgctgcctaaaattctgttaagtagggagcttagaaatggggctgtggaacctggaccatggaaaaacagtcattgcatacctgctgagtagaaggtgcacttttagctgcagaaatcctgctttcatgcagtttattataggaatgagaacgtgtaaaaggctctaacagaaggtttcctcccagcctgggaaacatactgagaccctgtttctacaaaaaaacaaaaaattagccaggcatagtggcacaggcctgtagtcccagctactctgcaggctgaggtgggattgcttgagcccaggagttcgaggctgcagtgagcctcaacaattattattgaaattcattcagtaatcattcatttatgaataattaatatggacaagacagaattttattgatttaggtattgtcaacctccagcatggtcgacagagaagaccttgtctctaaaacaaataaactaaaaaaggtttccttctcgccctcttggtcttatccttcagtcccatgactttacatttatttgggttgattactcctaatttctatttccagcccatttctctgctttgaactcctagattcacgtatgtaaacacttgtttgccatcttctcttgaatgactaagacacgtcttaaatataacatgtccaaaatttaacacgtcttcccttataaacctctttctttcagtttctgcaccctctggttgttcagtccaaaaacttcgaattcattcctgactccacttttacacacaaatcgtttttgtcagcccatccttcctgctgtaccttcactatatatatgtagaatccaatgtccactgctggcacgctgggccaagccacgttgtctctcaactagattattccagtagccacttaacttctccctgttttgctttgctcccaccccagtctgttaccaatatagcagtaagaattattcttttaaaacatcacatcaggtcttattcctcctctgctcaaaactctcctattgtggccaggcgtggtagcctcacacctgtaatcccagcactttgggaggccagggtgggaggattacttatgcctaggacttcaaaaccagcctgagcaacatagatagaccccattaaaaaaaaatgccaactctcctattgtttttccatctcagagtaaaaacaccattagctaccagttcactcttcaacctgatatcttcttgtctccatccctctctactctggtcacatgtgctttcttgccttcctttggacacagtagtctttgtacttgctgcctactcaggctgagatggtctccacaggtaaccacatgacttgttcacctcactgagctcttctctgatcataatatttaaaattaccctctacatctgctcagtgttacctgtctacttgcgttacctccacaacacttaagaccattggttagttggatacatacacaaaaagatatctctgtgtttatttaaatttatgtctgtacttctctagaatgaaagatccaggaagatacagaattttgttttgtttgctgctgtatcctcaacacctagaaaaaacagtggcctattttaggtgatggagaaatagatcaaattaatgaataaagattccaaatagtaaatgtaccaagaggagaagcagaagaacctaaaaacagcattatggtttgtcccctaaagggtgtataatacattctatttgattatatatttttttaaagataaaaatagagatatttttaaaaagtaaagtacatttgtttcagtcataaagcagtttttaaattaaatcaaaaattctaaattaggactttcagaaactacttcaaagcacactcttacaggaatgtaacttaaaaaggaaagaaagaaaagttaggtatgtataagcatcatcttagctgaaagccagtgcccatacggaaaatcagtaaaaacaaaaagagatacagagtcttctttttctcctgtgcctcttgtaatggaagagaaatcatctgtacttcaatttgatctttgttcttttgggggggaaggaaagccaagtgtttttaattttctctatatcaatatagacattaattaaagcatcacttggttgcatttgatgagatggcttcttaatttcatttatcagatcctggtaaacttctgaatcataaaaattatatttagcatacagcatccctatttttacaaatctcattctaattatttacaaaattagtaatccttgtattgtttctaatacaggttctttcacttgggtatttcagaaactagtaaaataaaatttcacaaaataagagcactaacaggcagcttcacctttttatgttttctgtcatcatagtcaccattgtttcttaaaagaaagaacactttaacacctaaaaatggaaaagacaattttagaataaaagacagctttattgtccttatttttatcattttaccttggactgcagattgtgctgccactggtctacagtccagaatttgagactggttgacttgtgatatgatgattcacatttaacaagaatggcatattgaatataataaaattgaactaggatgcttagaaaagaatacctagtaaatatagtgatcacaggaggccttagaggacattttcaggttaccaaaataatagttactcaaaaaaatgtttaaggaaaagctaaaattgtttcagaaataagcatagttaagaagttagctttaatattcttttaatatccccatattcttattgcataataagagctaacctttattgaatgtctgttacttgccaagcactgtgttaagcacttcttacatggattagctatttaattctaacaaccctatgaggtagataatattactaatgaaattaatttgatcgtatacattttttccatatgaaataatcaacattatcactgaattttaaatcttgggtaacagtataaatgctatgacagcatcttcataagactactcaaaatgaatgaggattaatatttcaagcaataaaatagtttgctaaccttgattctgtcacaccctggcactattatgtttcacctcttgcatctgttcaggctttcagccttgacaattatgattgaaattcattcagtaatcattcattaatgcataattaatatggacaagacagaattttaggtattgagggattttatgtctgcgtgtgtgtgtgtatacacacacatatatgtttaatatgatggggtttctgttttcaaggagtttactataatctagttggataaggcagcttttcttcatgctcatgaagaaaagctcaccgttctaaggtgaaattatgtgagataaaacatgaaacaagtctgcacatgactgcttaaggcccaaatccaggctgctacccgtttcatatagcccatgatctaagactggtttttgtattttacgaattgtaaaacaaaaaacaacaaagaagaatgtgtgatagagactctatggcccagaatatctaaaatatatccttgctggccacttagaaaaacagttgtctataaaataagtgcagttaggagactgtgtctataaagtgtgtttggtggactggtgtggtctaggaggaccttgtagagaagctagagttaatatgggactgtaattcaaattggcaggaaaaggagcaggatctgcaaagatggatgaggtgtgaattctacagtatatcatgcagattatctaaacactttggttggctgttgttggttatgtttctttgggaaagtttttctgtcgttgattgctcggttttttcttgattcttttgtctccccttgaatgtttaatacttgtactttccccttctataaaatgattacaattcatatcattgttccattcttcatggccttctatgatctgatcttaacctgtctttctaatctggtataccactactgcacacaataacatggaaaaggaaattgtatatgtatgttaaatactggtatttttaaaagaatagttttaataaaaggacaataagacattctttaaaggaagggttagcaaactatttccatagagggcccaatggtaaatatttttggctttgcagccaggtattcagctctgcagttgtatcaggagagctgccatagacatttgtgaatatgtgaatgaatgagtgtagctgtgctccagtgaaactttatttacagaaatcaggtagctgaacacatttggcccacaggccatggtccctgcaataggatatttctaggtacttagaagtactttggtttttttctttcttttttttaagaccgagtctcgatctgtcgcccaagctggagtgcagtggcatgatctcagctcactgcaatctccgcctcctgggttcaagcgattcttgtgcctcctgagtagctgggactacaggcgtgcaccaccacacaccggctaacttttgtatttttagtagagatggggcttcaccatgttggccaggctggtctcaaactcctggcttgatgagatccgcgtgccttggcctcccacagtgctgggattacgggtgtgagccaccgtgcccagcctaagtactttgaatgtcaatagtactggttctctttctaaatatactttttaaaaattatcaaaagagccaggagtggtggctccagctctttgggaggcagaggcaggattattgcttgagcccaggagtttgaaaccagcctgggcaacatagcaagacagcatctctattaaaaaaaaattatcaaaaaataaatgcacataaaaaaatcaacagtacaaaaggggttatagtgaaaagtagatcatccagccatgagctctactgtcttaccctctgtgaggcaactatggctacgagtttcttagataccttttcagagtttactctccatgtataagaacacacacaaatgatcttggtaataacaaacgctgttctgtatcttccttttttcatatgaatacacacatagacatactaccttgttaatacaaatagtagtgtattatacacagttttttatgttaattccttcatttctcagtatgtcttaaagacctatgcctttacctcaggctcagtttttttaatgaattaacagtatttcatttgatatacatgccataatttatttaaactagtaattaaggatatttttagtatttttcaattgctaaccttgtaacactgattgttctatccgcttcatttggggtcattttgtatttcatcatctttgaagaaggagtaaggaaatttttctggccttcctattccccattcctaaattaaaggcaaaaaaacctttgtcagtatcaaggctcaatttctctcacatcctgtttctgggtttctcattctcctgatttaataatcatgggacacttggggaggccgaggcaggtggatcatgaggtcaggagatcgagaccatcctggctaacaaggtgaaaccccgtctctactaaaaatacaaaaaattagccgggcgcggtggcgggcgcctgtagtcccagctactcgggaggctgaggcaggagaatggcgtgaacccgggaagcggagcttgcagtgagccgagattgcgccactgcagtccgcagtccggcctgggcgacagagcgagactccgtctcaaaaaaaaaaaaaaaaaaaaaaaaaataatcatgggagctgagtgggagaagggaataaagaggaattccccgtgatgaaagaggaggaaaggatactcgcattcattatgtgaatagtttgtcaccacccacccactcacttgtgatttattccatacagcaccaccgtggtccagatatatagcaggtgtatcatgtggaagaaagctgttgacttgaattctttctgttgctttcagttgcctagacctggagcagtgttctcttaaggtactggagcctgaaggaagccccagcctgtgtctgctgaagttaatgggtgaaaaaggttgcacagtcacagaattgagtgatttcctgcaggctatggaacacactgaagttcttcagcttctcagccccccaggtaggttttgttcttaggattattctccaggagttcatggagccaaacttagaagaaattatctcttttgaccaggtgaactgtgttaagtatttttggaaaatgtaaatgtgtagtgccttgtttgctttcccaggttgaagcaaatgcaatgcatgaatattggttggattgtggttgaagaaaccagctacatgagacatttttgagatagttggaaaaatttgaatgtaactacatatttgatatattaagtaattatcatatgataatgatactataggagaatgtcctttttttaaaaggagatgcattttaaagtatttagggagaagattcctatgacatacattggaatagtgcagccaaaaaaatgaacatatatttattcctatgtatttatatagatgaagtaaagcaagtatgacaaatgtttaagtttttttttgccgcagtgaggcttttgaatgttgattaactcaaccttgtactcttatgagtttttcctgaattaccgatattggatgaggctttgtacttcccacatcaggcgaggcttaggaaacagtccctcttctccattcagctgctctcctctcagctgcagatagagttggtctacagcagtggtggagggcaggagggacatgccattgaagttgcctggttgtggcagcactgcagacctccttctttacctggggatccagtgggccattatttgtcccacaggaagcaaagaggctggttgagcttggaaaggcaggttgagcttggaaagacaaaggacctgatgcactctattttacgtggttttgatgtataccatttcaatatataaccagcttggttatgatatatttttaagttaacatgaggaacttaaaaccataaatgagatgttattttttattgttagttgtgggatagggaattaggaacacatggtatagtggtatgctgtcagttacatgtaccagaaaccccaacccaaataggcataataaagagaatacatttctccttctaattgaaaagcttagagcaggtttggcttcaagagaatcaaggaacaatcctgttctcaacgcattggttggtttttgtctttgctcttcctttcttggcattggcttccttccatgactgactctccacatagcgcaagacgtctgctggctttttctgggctccttcattcttgccccagcaaaacccagagggttcatctagttaactagcttcggtcaaatgcctagctcttaacctgtcactgtgccaaggagatggaatgtgctgactcgcctggcttgaagccaggagtggagttgggttgagtctgctttcctggaaccacatggatcaccaaacaaaattgaaactattagaaggaaaaaggaagtagcagatactggggaggtaaccaaaaagtttactacaaatggaaagggccctggattataaataaggagacttggactcccaatcatcccctgctttacaaggccctctgtagatggtaaaataggcctctgataaatgccctatgaatttgatacacactgtattggatgcttgctttctatttcccagcgcctcttcctaccaacagggctggggtgggaataactagctgctaatgccaccctcccaaatgcaactgttgtttggcaccaaacagtaaactttcttttttaaacctggcccattactgatagaaacagtagagttcctaaagtggtatttattaatttttatattgctggtgcttgaagtagcacccaagagttgtgacatttgaaatctactagtctaggtttcatactgttaaagtccaagttctcatacctagtaaagtctcatacctagtaaagtctacttttgcttactttactaagttctcatactttattgaataccagggcctctgaaagcttaggaaacctttctgggaagtaaatataacatgtatttcattctctttttcaataattatgcttaattactctaaccgttatttgccaagtctataatatgaacataagtattctctacctcacagagttataggagctgcatgagataatgttgtgttgaatttcatctatacaatgacaggggcctcatatctcttttgatttgtgttgtgatcactggcctgagagctagggtttcggaatttttaagtttcccatatgtgaaaccgggcttgactgaaattgagtcatatatttacttaggtgtaacaatttgcctgaattttaaaaataacacaatattttatatttttatttttgacaggccagcaactaataaagtgccaccctaataaacattagtaatcttcctttgaaaaatccatttttgctctttgtgtttttctccaaataggattagcacttttctatcagtgttccccagtgaagattatcctgatgatatttggcttacagactttctcaagattatctcatagggcttttttgcatttgaggagagaataggaaaggaaagcagtttatttttttctttttgtttttaattttctcttcagtacatttgtgagctgtagggaaatattatttgttttattttgttttttaaattttttgtgataaagggtcttgctctgtctcccaggctggaatgcagtgatatgatctcggctcactgcaacttctgcctccggagcctcaagcaatcctcccgcctcagcctcctgagtagctgggactacaagcacgcaccaccatacccagctaatttttgtatttttggtagatacggggttttgccatgttgcccaggctggtcttgaactcctgggctctaagcagtccacctgccctggcctcccaaagtgctgggattacaggcgggagccaccgccctgtttctgtgttaccacttgtgcactgtttctgtgaagttttatgtcatgttagccgtataatatccttaggaattggttgttgcttgaatgttagttattgatttaacagcaaacattttgagatctaataaagctcagtaattttaggaagaagtaattaatttgttagcttactatctgcatctaatatgcataatctaagatttactcttttttttttttttttttttttttgagatggagttttgctcttcttgcccaggctggagtgcaatgtcatgattttggctcaccgcaacctctgcctcccaggttcaagcgattctcctgcctcagcctcccgagtatctgggattacaggcatgtgccaccacgcccagctaattttgtatttttagtagagatggggtttctccatgttgatcaggctggttttgaacttccgacctcaggtcatccacccacctcggcctcccaaagtgctgggattacaggcgtgagccactgcgcccagccaacttactctatttatagatagtagaataaagaaatataagaattacagagaagaattttaatattttaataaagatattgagaataaaaactattttaattatattaagaagataagctctgatagaatcaacttaattggtggtttgcctcgtgtattcaataaagtttactgtattgcaatgcccttgctgtgctaggcattatgctaggtactgtgagtttagagatgaataaaacaatcgtttccacctgctgataggtcatagtttagtaggggagacaaacatataaaagatcatatccaagacagttgtaaaaaatatatatatatagtaagtttatctgatctccagttttctctctttgctatattcttgagtcttagtgaaaatacaaaatagaaatattctaatgttttctctcttttttgcattggtactatttcataggaggacattacttcttattccacaggaagtctgatgattttcctctgtccttacagagagaagcctggtttgggttatgctgtgaactggcctttgaggtctaaatgcagggagatggggaaactttagatttattttgattaaacgagaaactatagtcttacgttgccatattctgttccaagtgacggtggaacaacagtcagaggtagctctgaaaggtaactgtaactgtcatgtggagtttctctgtcttttgagaaactgaccaagtttcttttctggatttgttttggtgcccagaaatagctagagcagtatccatgcatctctaactagagcagtttctgtgatgaggacccagcttcagcagtcactcagcatgtagtctgagtgtaaactcactctggaattataattttatatattttgtgaaggagcctcagaggatcgaggtttttactctctgttgctttctttcttgtcgagcatttccactgcacatgggttggccaacttgcccctcagtgtggtcttacttgaattatatgatagagaaatcgcttctagtttttatttgtggatggtgttcatcccattttccagcgctagtaaattgtttccctacttttattcctttgctcatctcagtgggaattgtagaagggggttaaatggatgtgttgaaagggttttgaaccaaaggtctgtaatgatttttttttttagatcttatttaagtttcaaagactgattccaaagcaaccaatattgacatctgtatagatagacttagatgtgtagttcaaggtgcttttgtttcttttgttgttgttgttgtttgtttgctttttgagtctcactctgtcacccaggctggagtgcagtggcgcgatcttggctcactgcaacctcatctcccaggttcaagcgattcttctgcctcagtctcctgagtagctgggattacaggcacgcgccaccacacccagctaatttttatatttttagtagcgacgaggtttcaccatgttggccaggctggtctgaaactcctgacctcaggtaatccgtccgcctcggcctcccaaagtactgggattgcaggcatgagccaccacacacagcctatttgtttcttttgttttaagtgaaaacattgtgagtgtagaattataggcttcatcagtcctagttacatacatcacgaaatggttgcctggagaagtgatgcccttaacctggaatgggcagagcagaggctgaacgatgggagctgtttagagagaactagcattgttgatgtggatctcattaagatgaatcccaagttgcttttcagctccagtgctgcaatattgccattttatttcactcttcatatgaaaggtgcctcactgagggtacctatgagatgtctgtggcagggtcatgtgccatcttttcagtggcaccttttccatttgcctctactccttttttatttcatacctttttttctcagatccgttgtaacatacgcattgttatgttttggctatttttattactttatctctaaaataagtgcaaaggttgtttaatgttattctttagtttctaaaatacctttacttcacattttatcttcacaattctgtgaagcgacagaacagtgctattgtgaacatttaaattttaaccaacaaacatttacatggaaaatgagatttccaaaagtgatcatttggccaaagtcacaattattgacaaaggtaggattaaaaaccaggtctgctgaccctgacctgaactcaataccatttccataatgctaggaaatttctgaattaagaaacttagttctgtattattacctcagttgcctctttgacccatggacttcaatttttttcttcttgccaacttaaaaagtgctcaaagactggatcttatttgtaagggacttttcttatttcatgaatatgaggaaattggcaattattcctaaaagaaaaatatcaagaagtgaaaagagaaaaagatggtatggatgtgcatgaggataaggaataagtagagggagagaaagggctggtgagcaaggcctgaaggaatgtctttctggatgtggagtgtggaggggagtctcaggcaatgtaacagaataagggatgtgatgtgggaaactagatttagctataatctatacagatttcaattgacatgtaagagaaacatatgtggacatactttgtgtaatgccgtaggagggacacacatggacctactttggttatatactgggggaaattgttagaggaagaggaatgatatttatttgggcacactgtagggcatgtgggtactcttctgtgatagcatagaagattgcagagtaactttgaggacaagttttagatggaagttgataaaaatctttttttgtttcatggcctctgaaagtagatggacttcagtgtatggaatagatctgtttttggaaaaagtatttattgataaactacatcaacatttaaatgcgtcgtgagagagaataacttcaagggaagctatgtgtccttttgtcaaaaattatcctaatttatctttcttataatttcagcagggttttaaatttttgttttattgcttaatagcatgtacttgtttatcggcatatgtgtgtgtagttgaaagcacgatccttggttccatcgtacctagtcacattctcccaggcttacaggaaatcaagtaacttctctgacttctttgtagatgttatctgaaaaatatgcttgtttaccaggaagctgtgtgttcaccgtttaaaatagaactttcatttgtatgccttcgtacagcctacgtagcactataccatattctttttttacctttgttcagcaccttctcactagtgggtgctgcattggggtggctaagggttgaccatgggtccctgtcgcacaaggctttgtgggaggaaggaaatttgtgtggttaaaacatgggaggtattgcaactcattttcttgactattcaccaggggtggtttccaaatcacattttgcctttcaattctcagtctttgaagcaataaattgtatatatatgttacacacacacacacacacacacacacacgcttattaataaagttgttggtgcaggacaggcttataaactgttaatttagatgtacattaaaagctactttgtcttggccaggcacagtggctcacacgtgtaatcccaacactttgggaggctaatgtaggaggatctcttgaggccagcagttccaggcaacatatgaggccaacctgggcaacataatgaggccctgtttctacaaaaaaaaaaaaaaaaaaaaaaaaaaatactaattttaaaaatcacttagtcttgtgtcccatacaaaggaaggataacttttagaacctggccatatgatccctttccagtagtcacctgcttctttgtaagatactctagaggaaaaaccctttccatccttcttgtctcttatctccttgtataatggcagagaatatttgccatggtatattcatgagccgtgtcctggtgtgggattgctctttgtgtgatacactttctcagtaaggtaggctcactgtggcagaaagcgggattaccgtgggagatatattgagaatcaccaagaggccggtcatggtggctcactcctataatcccagtgctttgggaagctgaggtgaggtggattgcttgagcccaggagctcaagaccagcctgggcaacatggcaaaaccctgcctctacaaaaaatgcaaaaattagccgggtatggtgatgcacacccgtagacccagctattgggggtgctgaggtgggaggatggcttcagcccaggaggttgacactgcagtgagccctgatcatgccactgcactccagcctgggtgacagagtgagaccctgtctcaaaaaaacaaaaagacagaatcactgagaaagcaaaacataaggtttaaaacctttaaaaggcaagaaaacctaggtttgcatcctggttctgccattttacaatgtaaaaaaaaaaaaaaagtctcagagagtttaatttaccccaggtaatttgggtgaccttctgcaaattacgtacctttttttcattgtaacatagatgtaattagtatctaccttgtgtggttatttcaaaggttagtgataaaaatgcctggtgcatgtaaagcagtcagtaacttgctgctgtagtaatttctgttattattatatatattcaacaaacacgtgttgaacacccactaacacccactgcagtgccatatgtgggcacaattctaggtgctgaatgaactggtgactaagaccatcaaggtccttggccttgccctcatggagcttctattttaatacctaagacggacagtaagaaacagggattttagagagtgaaggacactgaactgggtgaatgtaatagataactggggggtgggagggtacctaatttagagacatttcccagagaagctggtgatattttagtaagaaacctggatgatgaggaaagagcctgccatgaaacagtagaatagtggaagccagtggggtggcggttgcgggggatggcaaagcggagcttgtggggagaacccagcagaggactggtaagtggaaaggcagaaaagagcttggcttatagaaggaaggaggcccagtatggctggagcttggtgagcctggagaagagcggaggggccaaaggagcagttcgtggaggactttgtagccatggtaaggaatctggattttttattctaagtacaggcacactttgttttattatgcttcactttattgcactttgcagatacttcactttctgcaagttgaaagcttgcggcacccatgtgtctagcaagtctgtcagtgccatttttccaatagcatgtgcctacttcatatctctgtgtcacaccttggtaactcttacaatatttcgaactttttcattatatctgtcgtggtgatctgtgatcggtgatctttggtgttactactgtgattgttggtgcctggtaagatggtggcatccaggtggcggtcttaagaccagatcagtatggtgttggtggtcttaagaccagatcagtatggtgttggcagatcagtatggtgccgctaggcaggcactgactagctccaggcagctcaaccttgggagcttcggggccccgagaggtggagcctgtgagtggggcatgcactccatgtggaagccagagcctcctcccctggatggagtgtacgagatccctggaccggagcccatcccctctgtgagagagatgtacttcacgcccgggctgccaccgctgatcttcctgccctgggaccctgggtagaaacacccaaaattctgttcaccccgttcacgaccctgggaccctggctcgaagcacccaaagttctgctgctcaagctccattcacgagcagccaccatacaaagaccaggcctgctatgtctttcaccagcgttgccgccttctcaggggtgtcaagcaggccctctggcttaccgaggccaagttaataaaatgccttcctgagaaagtacttggccttgttgatgatacaaggaaccacatagagaaccaagatgagcgtcttctgaatttgatctctcatgcctgtctctggcactgtactgagtacggccccaggagagaggcctgctgtctggtcattgtggacagtctgataaagttgtgtaagtctcagattctcaggcatccttctctggccaggcagatttgtgcccaaaactccacgttatccaccacctggaattgtgtctgttcttcagggtcatggttctagtggagccggctgagtgccaaggatcctctgcccccgccatctcctccagagaagaggttgaagctactaaaaatcatgttctcgaggccttctgtcccctctccccactactgatcttcaggaatgcaatgtttctgatgtgaaagatgacacaggattctgggagggctatccttacccctatctccatatcctgcacttcctggagaaagccgatttgcaaccacatagccttcaaccagatcagctgtgggccaagatgatcctgtttgcttttggcattgccctggctcaggcccagctcctctgtggcaatgacaccaagatctcggagcagcccgtggttgtgcagagtacatgcacagacggacgtgcattccatttcctggtgttacagtagaacaccacagacctggcctcttaacaagtgtggcaagagtttggtctgggtggaatcatgccagctactctctcagcatttttggtgtctcccagtgataaaaaagaaggtgggaccgggcccagtggctcgcacctgtaatcccaacactgggagtctgaggtgggtggatcacgaggtcaggagatcgagaccatcctggctaacgtggtgaaaccccgtctttactaaaaatacaaaaaattagctgggcgtagtggcgggcgcctgtagtcccagctactctactcaggaggctgaggcaggagaatggcatgaacccgggaggcggagcttgccgtgagccgagattgcgccactgcactccagcctgggtgacagagcgagactccgtctcaaaaaaaaaaaacaacaaaaaattagccaggcatggtggcacgtgcctgtaatcccagctactcaggagatggaggcaggagaattgcttgaacctgggagatagaggttgcagtgagccaagatcgcgccactgcactccagtctgggcgacggagcgagactccgtctcaaaaaaaaaaaaaaaaaaaaaaaaagagggtggttgtggaatgcgttgggctgactggtttccagtgggagacatccaggaagtttttagctctgtatttacatggtgctacgtgagccaaggaccattctgaggcccgaaacccacctttgccttctcccactgaagagggcctggggtccccctggagcctcagtgctcatctagcctggtggtctcactgacaataaagagcccttgcattgcaaaggaaaaaaaaactattataattgttttggggtgccacaaattatgccactataagaagttgagcttaattgataaatgtcatgtgtattccaactgctccaccgactggccattcctctctctctctctctctctctctctctcactctctccctccctccctccctccctccctgtccctcttcctctcccacctccccactccctctttgggcctccctattccctgagacacaacaatattgaaattaagctgattaataaccctacaatcgtctctaagtgttcaagtgaaagaacagtgacacacaacaatattgaaattaggctgattaataaccctacagtgatctctaagtgttcaggtgaaaggaagagtcacatgtctctcactttaaatcaaaagctagaattgattttacttaatgaggaaggcatatcaaaagctgagataggctgaaaagctaggcctcttgtgccagttaaccaagttgcgaatgcagaagaaaagttcttgaaggtaattaaaaatgctacttcagtgaacacacgaatgataagaaagcaaaacagccttattgctgagatggagaaagttatagtagtctggatagatcaaaccagccacagcatgcccctaagccaaagcctaatccagagtgaggccctaactcgcctcatttctgtgaagacagagaggtgaggaagctgcggaagaaaagttggttcatgaggtttaaggaaataagctgtctctgtaacataaaagtgcaaagtgaagcagcaagtactagtggagaagctgcagcaagtcatccagaagatctagctaatgccaggcatggtggctcgtaattgatcatggtgtctataatcccaccactctgggaggccagggcaggaggattgcttgagcttaggagtttgataccagcctgggcaacatggtgaaaccccgtctttgcaaaaaatacaaaaaattagccaggcacagtggcacctgcctgtagtcccagccactcgggaggctgaggtgggagaattgcttacacctggaaggcggaggttgcagtgagcgagatcatgacactgcactccagcctaggtaacagagacagaccttgtctcaaaacaaaaaagcaataaaagatctagctaagataattaaagaaaatggctataataaacagatttttcagtgtagatgaaacagccttctattggaagaagatgtcatctagaactttgatagctagagagaagtcagtgcctggctgactcttgttaggggccaatgcagctgacaactttacgttgaagccagtgcccatttaccattctgaaaatcctagggcccttaagaatgatgctaagaaactgcaaagtttttgtcctgagtaaccagatggatggtggtaggcagtaagactggtttaccatctttgagatggggaaactgtggggactggcagaggagtagattttgtgtcagaagggatttgggacatataaaattggtggtggctataggacattcaaatttaaagccaggatagccaaaactcctatattttttagatttattacttgttctcttttgtcattgttgcaactttttcctgtcacatcgaaacttgggaaatcagaatctttgtattttaaagttgtgatgtaaaactctcctggcagatgaatggtaaatgtggggacattaaaatacagtgttatgaatttgctggcttcagcaagagtgcttatcccattttccacctttcctaccaacatgtatcacagatttcagaaaaattctgaacttcatccgtcctgtactaacttggcctcgacataaaggattaatgaatatgaatgtcctcccttggcaagagtttaaaattctgagaggctctactatatttactaaagattttctagggcttctcgaggccctcaaatgtgctaggtatacaataaatatttactcatttttaattttgcttttatttagtatctttgtgctgtgactttcatgaacattattttttttcctagaaagtttagtacctttgatgtattaagattactgttatttacactgtttcctttttacttgtaatcttgttttgtttctttgcattggtgggtggtagaagaaaaagacactgttatgaggtcacattcagtatagacaaggaaagaaaataaaagtaggtgcaggaaattaagttttataagttttaattatctttttctttacttcctaaaagccagctaacccagttttattaattacaacttttgcaaatgtaagcttttctagctttggtttcttttatgtcagttatctattgctgcattaataaattacccccaagtcagaagtgaaaaacaacaactgtttattatctcacacagtttctgaggctagtagtccagaagtggcttagctgggtagtcctggctgagggtctctcgtgaggcagcagtcagactgtcagccaggtctgcagtcatctgaaggtttccccagggttggaggatcttctcagatggctctctcacaggtgttgtcaagagacctcatttcctcactggctgtggcgggagatctgtttctttctgtagagatatggtttggctgtattcccacccaaatcttatcttgaattcccatgtgttgtgggagggacctggtgggaggtaattgaatcatgggggcaggtctttctctgctgttcttgtgatagtgaataagtcttatgagatctgatggttttataaaggggaggttccctgcccgcaccttcttctcgtttgtctgccgccatgtgagacatgcctttcaccttccaccatgattgtgagtcctccctagccacgtagaactgtaagtctattaaacctctttcttttgtaaattgcccagtcgtgggtatgcctttatcaggagtgtgaaacagactaatactcttaccacttgagcctctctgcagggctacctgaatggcctcctgccacagtcatgtgcttccctggggcgagtgagtgagagagaggcaagagaaggagttgggggtgttccattattgactaggattttcttccaaattcctgtcaaaagtcttccaagcttagatgttggcagttattcctcaaatgaggaatgtttgtgtcacaggtatatcaaatatatatctcactgctctgtttctgtgtctttctcttccaaaatcattttcatttcaatactaaataataatgcagtcatttgaagacgttttcaatggtgttgtctttgtccattgcatgcttccataatacagtaccacagactgggtaatttttaaagaacagacatttatttctcacagttttggagcctgggaagtccgtgatcaaagaaccagcttctgatgaaggttttcttgctgtgtcctcacatggcaaaagagagagaacctacctgcaaaccccgttattacagcggcattaattcattcgtgagggtagagcctcccgctaggccctacctcccaacattgttacattggggattcagtttccagcacatgaatttgggggcacatattcagacaatagcagacattgcaacttaacacgtctgttactaacagtgcacgtaacttgactgaagtggcagccatatgagcatttatgaccaaacatttccatgagctaacactgagaactaccctgtggctgtgcctgacaggcatctgttataaggtgcatcctgatttcagaagtgttagaatatgggggaaaaaagcttctagaaattgaagaaatatggtaaataattttctcccccacccaatcatggggaagtacaatagatcaaagtcttctgcaagtaagtttctttcctctgattttacaaaagctgcaactcacaaagtgtaaattgattgagaaggagatgtgaatgagtgatttatgacaaagataaatatgcaagttatttctaaaatgtttcaatttttggtttcagatgtataaacaaggaaaatccctcttgtgactttaattttttttttttttttttttttttttaggaataaagattactgtaaacccagagtcaaaggcagtcttggctggacagtttgtgaaactgtgttgccgggcaactggacatccttttgttcaatatcagtggttcaaaatgaataaagaggtaattttttaaatatatcttttaattcttccaaggagagagaatgatagagaattaattaacattatcgtcctaaatgtagttttaacagtttggtaaaagagtctgatagacattgctaggttattactgaagtagtcaatagtcattattttggtaagacagttccagaattgtctcatgaaaacattgtaaacaataatgaaattagttctccactctaaaaattgtggaaaatagggattacttagggcagcagtgttagcgagtataaaacatcaccagtacattcttgtgtatacaaactcttcacaacagattatgttccaaccaaaatctttaaaagattttcaaggctatatggaaagttaatgtgctattctttttaagaattccacatcactgttttatctgtatcagaagatttaggaccttgtggtagattctgaagtaaaattcagatgggcagaatgggccatttattccttttgtgaaatgattggatccctgcagcacccaacaaataatttaaattcacattttagaattctcttttcttcagagttccttgagccatcttgcactggggatttctcagtgggctggctgcctgcattgtgtcccacttctgtgggcttttatcttcgatccccccatccctctctatcctcctcccacttccacagtaccttgaaagtccatattcttttcactctgttagtcccagtaattcagctttcttccaaacttgatgtcacgtctccctttgcaaatctgaaactaaataaaagctgttctgagaatgacttttcctttaattggattgcctcatactgtaggtgaattctgtggttttatacgattttgtttccgtctgttacacagaggtaagacagagcaactgtggaatgtagtaaaaagattgcatgtagctttggcactagataggtctgtgttggaactctgactgccattattagccatgtgaattcctatcatcagaggttgtgagaattaagtagacaggatgttttacgtgcctaggctcttgaaagattgcacctaaaggtatttttttatcatattttctcaattgcaaagttactttcattttattaaatgccctttgaggagaaatagtggaaaaaccctactacattaagtatatcatttgtaagctatgtcctgattggaaaaaggtagaaatgtaggggatggaaaatgcatcttagagttgaagagttgtaatggattttaaaactcttaagttttgtaaaaccacatgatcataggagtattgtaggagatgtttacttaacaagtgcttgttgagcacctgttttgtgccgggccatgttctaggtgtgatgatacagcactgaccagaaggtctctgccctcaaagagcttacacgccagtggggacagagcaagtactgttaattcctgtgagttaagagctatgaggaaaatcaacagggtggcaacataatatgagaagctactaaggttttaagcaagggaagtaacatggtaggattcgtggggttttttgttgttgttgttgttgttttgttttgtttttttgttttttttttgagatggagtctcgctctgtcgccaggctggagtgcagtggcgcgatcttggctcactgcaacctccacctccccggttcaaacgattaccctgcctcagccttctgagtagctgggattacaggcgcgcatcaccacgcccagctcattttttgtgttttaggagagacggggtttcaccatgttggccagggtggtttcaatctcctgatctcgtgatccgcctgcctcagcctcccaaagtgctgggattacaggcgtgagctgtcgcacccgactaggattcatgtttttaaaacataaacttgcggcttgaaggaagcagagaacagcaaggtgagcagttgtcttaatacctgtgcttgactggaagtagcagtagcgtggagaagagaaggtggatcacagtgcataattcagtgtatattttagagagagtcaactaagctgacagattagatgtagagcatggggagaaggaagagaaatcaaggatgaccccttaggctttccacctgagcatctgagatgtgttatatactgaggtgttgaagattggaaaattaattgacagaagacagattaacggagaaaaagcttatttgtgtgcatgcaagagctttcagaaggagtagcttgctaactggttaagttatgtagctaatttagtagggaaaggcaggggccctgtgagcataatggatgggtttcttcaggaaagacaaaggggagaagaacaagggaagatagcaaagtttgtggtaatgttgttcatgcaggcaccagtggtatctcctcttcattgtgaccgtaaagtccccaaagagagatttatggtacttttactcttggtctgttgcctgggggtaaaagctgccccacgagggaatttatggcagcctcatttcccagaactttctgttttgggtcagataaaggaagactgagaagacttctttctgtatctgttgagtcccagatgtcttcagtttaatataatcttcataccaactcaggggttctgagtgggtctccacagatcttcagcccaagtagcctttgttaagaggatacatcttccattttaacaggagggaacagagcagttataaataagtacagacatggataggtttgtgatttgttggcagaaaaaggaggtaatttctgtctgaagtcagtgcctaagagaactaggattacaggaagtttgaggaaagagtatacatcaatagtctagaaggaaaacacacttaggacgatatagtaggattgtcaggcagttgtaagtgcagcctgtcatcccagttgtcacatcctgagcaaaatactcttgctttggtgtaggtactgaaaggggagagagtagagttcagtaacttggggtttggagagggaggaggtgagcttgttaaagtacaggttgaatatcccttgtctgaaatgcttgagaccagaagtatttcagattttggattttttttaggtgctgaaatatttgcattgtatacttaaaagttcagcatcccaaatctgaaatgttccagtgagcatgatggaggtgctcaaagagttttgaatttgggagtatttcagattttaaatcatcagattaacctgttctttgcaagggagttattgtaatgaggcacttgagtaagccccttggcaatgtgccaaagttgggtgtagctgatcaattgctgggagcagaaaaagcattaataaaagaaaccttactattggaggtggggactgtggatggccatcccgtcttactgtctcattgatatgctttccatagctcttctctgtctagaccttgaaggagattggatattgtttggttaaggagtttatcctcttacagaattttgcagatcagaaggtccggggtctcaaggtgaaataacttgcccacgtcttcccagctaatgtggtcagagctgaaagcaatagccaagcccaattctctgtgttttctctatgccgctgtggtgtttgtatgttgtatggctgctaaactcataaatgttgcagttgtagattctttcaatactcagtgattgatctcttaaatgccagagcaaatagttttctgttagtgagcctttggaagatgtttgggggccagcttaactctctggtttatggatttgtaaaagactggatttttaatacttcagtcctaaataactcaaagcgttactgtttttaactcagaaatgttttagaacttgggggaaaaatgttgcactttcaaagcttcatactgaaatcatagattttgtacagcatattttataaggtgtgtttttgatgagtcatccacttctcttattgattctttcacagattccaaatggaaatacatcagagcttatttttaatgcagtgcatgtaaaagatgcaggcttttatgtctgtcgagttaataacaatttcacctttgaattcagccagtggtcacagctggatgtttgcgacatcccagagagcttccagagtaagtaacgaaagaagctgaatgttgggatggggattccccatattttattttattttaaatgtttacttttaaacaatttcaaagtatcaaaaaacatagcaaaatttcacataggtacttcatccattataatgtcaaccattgttaagatttgatccatgtgttttgtctttcttttttttttaatttagtttttggttttgttgttttttaagacaaagtctttttgttgcccaggctggagtgcagtggtgccatctgatctcagctcactgcaacttccgcctcccaggttcaagtgattcctcttgccttatcctcctgagtagctgggattacaggcacatgctatcacacctgggtaatttttgtatttttagtagaagtggggtttcaccatgttggccaggctggtcttgaactcccgacctcaggtgacccacccgcctcagcctcctgaagtgctgggattacaggtgtgagccagcatgcccggcctgctttaattgtccttctgtgtgtgtgcgcgcacgttcacacatgcacacacacatatatgtgtgtgtgcagatactttaggatgacatagacaggcctcagtctggtcgctgccactgacctcttcaagtttgccttccttcatgttccattactctgccctcacacacggcacctatattcaacttcgtttctccctgctgcttccatggtctcgaaatgtcttgcatattcacactccacatctttgcgtcacttcttccttccatcttgaataccttttctgtctgtcatacttttatgactctttcaagcctcagctccctctgctgccttggcattctgattttacctctattatagaactcgttgcattgattttgaaattatttgtttgctagctgtctgagcagtgtagggataaggagttcccttttctctttctagttcttagaacaaagcctggcaggtagtagtcgcttaccagttatgcaattcattgaccaccctcatgaggcacagccttgggcttcgatgttacagctattttaaactaagcatgagagagagcccctgaccccaaactacttacacaactatcaggaaagattatctgctacaacagaaagcaggaagactttcttgctaccacctctttctcccaaaagttaatcttttgaacgtatttctatattttggttgtttgtgttgtcaggcttgtctccctatctaactgaactcctgaagggaaagtctcggtcttaataatctttcgtaaaaacaaacactcaataaccaatagcactcagtagatgtttgttgacagaatgaagaaccagggtgaattctgtttaacaaagtagagacggaaatatttccatcaaaaacatttaatattcttacatttaaagcacaaattcaaagctacctaaaaatctctgaaggattcttgatatctagaacacttccttatttaagaaacagattgtggatctggcatggtagctcacacctgtaatcccagtactttgggaagctggggtgctggggcgggtgaatcacttgaggccaggggttcaagaccatgctgggcaacatggcaaaaccctatctctacaaaaaaaatgcaaaaaaaaaaaaaaaaaatggggcctgatggtgcacacctgtagtcgcagcaactcaggaggctgaggtgtgaggatcactcaagcccgggaggcggaggttgcagtgagctgggatcacaccagtgcactccagcctaggtgacatagcaagaccctatctcaaaaaataagaaaaagaaacattgtgaaactaacatcatggaaaaatgctatttcctgaagttactcttactcatgaatactaaatatgatcattataaaaagtagatcagtagataagcacatagcatttgagacctgatagtcttgagttctataattaggatatgaatcaagaagaggtcagtttgttatgaatttgaatgttgtggtcttcagttttgtaggagaaaaaactctcatatagtagtcttgctgctcacttttcaattcttttccataatgcgtatttttctcccaaactattgtattgctcctaaaaaatgatcttgtggaaaaaaactctagcgttgatgtcagcactaaaggccatgtagtgagtgtatcattcactgcaaggaaacattcatcagactgctttgctactcactctgctccatctttttagtgcaataactagcattgatcaagacaaaaaaccagtctcctctaaagagtagttgtcagatattattttgtttatttggtgcacagtcaagaaccatgttctttgttgtatttgctggacaaaaagaaggatagggaggaaaacactttttgttaaaagagttaaaatgctgctgtctcattcttttctctcactttagtcttccgtaaactcaaatgacgttaaggttgttgagaaataaaatatcggtcaggcgcaatggctcacaccagtactcccagcactttgggaggccgaggcaggcagatcacgaggtcgggagtttgagaccagcctgaccaacatggtgaaaccctgtctctactaaaaatacaaaaattagctgggtgtggtggcccgtgactgtaatcccagctactcaggaggctgaggcagtagaatcgcttgaacccagggggcggaggttgcagtgagccaagattgcaccatggcactccagcctgggtgacagagtgagactccatctcaaaaaaaaagaaaatatcaccattttctttaaataaaaaatacctcatgcacctctgcattagcccattctcacactgctatagaggtactatctgagactgggtaatttataaacagaagagttttaattgactcacagttctgcatggctggggaggcctcaggaaacttacaatcatggtggaaggtgaaaggaaagcaaggcatgtcttacatggtggcaggagggagagagagcaaacaggggaaatgccagacatgtaaataaccagatctgtgagaactcactgtcacgagaacagcatgggggaaactgcccccatgatccaatcgcttcccaccaggtccctccctcaacatgtggggattacagttcgagatgaaatttgggtggggacacagccaactcatatcaacctttctcaattttatttaacttttttatcccattttttattaaggggtaatttatatacagtacaatgtacagatacgtgtacagtccagtgagttttaacatatatataacatgggtatatgtacccatttaacatatatatagtcattgaccagtctagatattttatattcagcttcttccactcagcataatgtttttaaaatttactcatgttgttcagtgtatcattaggcagtcccatctttttgctgagtaacattccattgtatggattgactagtttgtttattcattctcctgttgatagacatttagtttgtgtccagttttggaatattatgaataaagctacgatgaatattctcatacaagaccttttctggacatatgttttatttcttctggatagttacatagaagtggaattgctgaatcctagagtagatatatgtttaatttttcttaactgccaaagtttccaaaatagtttaccattttgcattaccaccaacagcgtataagatttcaggttactcgccccatatcttggccaacattggttgttagctcttattgatgaattaagcttttggtcattatgaaatgctcctttatctctggtaatcctctttgtcttgaagtttactttgtgtgatactaatatagccatggaagctttcttttttgttttgttttgagaaggggtctcactctgtcaccgaggttggagtgcagtggcacgatcatggctcactgcaacctctgcctcccaggctcaaatcatcctcctacctcagcctcctgagtaactgggaccacacacatgcaccactgcacctggctaattttttgtatttttggtagagatgggatttcatcatgttgcccaggctggtctcaagcgatccgcccacctcggcctcccaaagtgctgggattactggcatgagccaccgcgcctggccagaaccatggcatttctttcataagcttttttgtatagtatatgtttttcattcttttagtttggaatgtctttgtttaaagtttcattttagatgacagaatacaggtaagtgttgctttttgctctagtctagaaaaaagtctctttcaaggtgtttagtccatttacatataatgtgattatgtttaagtctgacatcttgatgttcgttttcagttagtctcatctgttctcttttgatcctcctttcctgacctcttttggactgggattacaggtgtgagccaccgcgcccggccaaaaaagcattttttaatattccattttatctcctttattgactttagctgtgtcttagtgttattttttagtggctgttttagagattacagtatgcctctaacttattgtagtaaaccttctacatattctaccttaaaatataagaaccttatatagtatactttcattgtgccccccattgtatatttgttgtcatatattttacttcgacatttacttttgagcaatcttgtaaaagtacgtgtgtgtgtgtgtgtgtgtgtgtgtgtgtgtgtatttatttttattattatactttaagttttagggtacatgtgcacattgcgcaggttagttacatatgtatacatgtgccatgctggtgcactgcacccactatctcgtcatctagcattaggtatatctcccaatgctatccctcccccctccccccaccccacaacagtccccagagtgtgatattccccttcctgtgtccatgtgatctcattgttcaattcccacctatgagtgagaatatgcggtgtttggttttttgttcttgcgatagtttactgagaatgatgatttccaatttcatccatgtccctacaaaggacatgaactcatcattttttatggctgcatagtattccatggtgtatatgtgccacattttcttaatccagtctatcattgttggacatttgggttggttccaagtctttgttatcatgaataatgccgcagtaaacatacgtgtgcatgtgtcttcatagcagcatgatttatagtcctttgggtatatacccagtaatgggatggctgggtcaaatggtatttccagttctagatcactgaggaatcgccacactgacttccacaatggttgaactagtttacagtcccaccaacagtgtaaaagtgttcctatttctccacatcctctccagcacctgttgtttcctgactttttgagatggagtctctctctgtcgcccaggctggagtgcagtggcacgatctcggctcactgcaagctctgcctcctgagttcacgccattctcctgcctcaggctcccgagtaggtgggactacaggcgcccgccaccacgcctggctaattttttgtattttttagtagagacggggtgagtcactcttatcacccacgctggagtgcagtggcgtgatctcggctcactgaaacctctgccgcccagattcaactgattctcctgcctcagcctcctgagtagctgggataacaggctcttaccactgtgcccgggtaatttttgtatttttagtagagatggcttttcaccatcttggccaggctggtcttgaactcctgacctaatgatccacctgcctcggcctcccaaacttctgggattacaggcgtgagccaccgcgcccagcccacgtgtgtataatttttaaagattttgtttaaaatattcactgacatagttacctgttgtggcactcttgagtctttccttctgacccaggttgctatcaagtaaaatttcccttctggctgaagaattcctcttaatacttcttatggttacagtctgctgtttttctgtaataatttgtaaaaattatttgtgtaataatttgtagacaaattatctcagcatttgaattctgttaatctgttgtcttcatttttgaaggatattttcgtcgtgtatagaattttagaggtgtgttggtttgttttcaccactttaaagatgccattccattgtcttttggcctccattgtttatcatggaaatttatttattccttttataattgctcccttgaatttttcctgcttggaattctctgattcttggacctgtaagttatctttcatcgattttgaatcatttttagccataatctccaaatatttttcttctactttctttctgggactcttaattatatgtatgttagactatttgatattgtcccacagatcttgtaagctctttttttttctttccttcactttatctcttttgtttccagttagatttcttctaacctgttttcaagattactgattttttggtgtgaccagtttgctggtaagcccatcgaatgcactgatgagtggaaatcttgatattttaaatttctgttatttccatttggctcttttttttttcttcaatttctcactgctgaaattgtaagttggccaccatcttctgtgcaagttgattaactgcctttttctccagatcctttaagatgtttatcttcgaattaatgtgagtctctatctgataattccagaatgtaggtcagctctgcttttctttttctttttttttttttaacaagtaaacatggtttattttagaaatgtgaggctatttcaacattagaaaatttttttttaattatactctaagttttgggatacgtgtacagaacgtgcaggtttgttacataggtatacacatgccatggtggtttgctgcacccgttaacctgtcatctacattaggtatttctcctaatgctgtccctaccctaactccccagcccctgacagggttacattttctttcttcttcgtaagtctcataattatttattcaatgctgaacattgagtataaaagaaaaatagcattaacatatgagattaacatattacacattaacatatagagattgaaattaatatttttatgctcaggaactagacacacccctcgtaatggctactagaataggggtatgagtccatccagtttgtagttgttaggtctgtgctttagatgtattcagtttactactgacggaattgagggtagaatgaggatttccctttggcaggactgaaattgacatatcgagaagactagaaatctctgttttacagctctagtgccaaactgcaagagatctctctccactttacatccagagtctcagcttattggaccactgaagcatttttgttcaccaaccccacccttgtctcttctatgtctcagggggtctgagacccccctgcctagctgccttgcccccagccagccttggaaagcaaaggcactgcattcactgagggcctcgtgggcctccaagggtttccctcaggcctctgttgtgccgtcagccttcaacaggccctgtggacctgcacttcacaggtgatcttttagctctcctctcctccttcgccttctgcaagagcacttgagaagggccgaagacagggagttggtgagtgaggcagaatcttttgcagctggggttccttgaggatctaattggtcatgcccactaggggtgaccagccatctggttttcccaggactttcctagtcttagcacttttaagtgctgcattctgggaaacctttctgtcctaggcaaactgagaccactggttaccctaatgccagctcacagtctgcctttaaaattttgtaaaacattcagctggcttacccttccttgtcaactcagttctaaaggcattaggtggcaccaaacatggtagacatttgtgtggggtgggaggcagtgggaagggactgggatgacccagagcaggatatcaaagccccggtaaggtgtccatgtgggagtggagcagtctccagaaataatcctgatgaattaagagagcaatgcatatctttctagactatttttgtgcatgtaataatatatctataagtggaatcatattcattcaatgaatattactgatcacctgtaatgtgttagacactgagtttcataatggagacttgttgcataaaattgacaagctctttgccttcaggaaacttaaagagtattaaatgagtgttaagtaaatgatgtctaatatctgcctggggtagaaatgttagtgataactcaccaatatttattcagtgcgggttacaaaacttatttcagtatgtcaaagaacggaacttagagctttccatgttaaatgccaatatcgttcaagatgttaataagttgtttgcctcgatcaaaaagattctgcagccaaacacatttagaagacacttgaactatattcctctccttaattgacaattcatactaacacttttaaagctttgagaagtcctgcaatcgagaaatgtgtttaacccagaattttctaagtttatttgtccacagcattcttttggccacagaatatctcgtaatatttctatgagtgctatagtttttttaaacagtttgggaaatgttattaaaaattgtaacaaatgaagggggaacttgacacatctctttaattatagggaaattttatttttatttttaacctagagattttattttttcttttaatttaaggaagtgttgatggcgtctctgaatccaagttgcaaatctgtgttgaaccaacttcccaaaagctgatgccaggcagcacattggttttacagtgtgttgctgttggaagccctattcctcactaccagtggttcaaaaatgaattaccattaacacatgagaccaaaaagctatacatggtaggaagttgattttggggtcttttgggggagttaacatgtaaaacaaatggtacaattgaaatataaggtgaacattaaaactcatatcctttcagatgttttaatgttttcagtatttttatttaaagtcccttatgatttcatattaactagctcttatatttgctaaagtgctagaattcaactcaggcttatatgtaaaatgtcaaatagtattgcatgaaactcagcactgttggaatcattacaacatttacttgctggtatttaacctgatgaatggagctaatgtaacaaatgtctaaagccttctaagatgttatgttttggagcgtatttttaaaacacaaaatgattttttctccaagccattaaaatagaagaggaagcatttacatgttctaatattgatataggtgccttatgtggatttggaacaccaaggaacctactggtgtcatgtatataatgatcgagacagtcaagatagcaagaaggtagaaatcatcataggtaagaagtatttccccagtgttctgacaagtggactataatataagctatataaactgcaacgtttaattaagcaaaggaaattatactttttaccccatactatttaatgatgtgttaagcattagaagttatattgtttatattgaaatttgaaagaatgcatactaaaatcataatctaggttcacagaaagcaaaaagaatcaggaaaaaaagccattttgtttaaattattttagttacagtttattttcaacacttatgataaaatatgtattctttaaagctttagctacaaaaaacttgattcagtgggaaaagatttttggccaggtgcagtggctcacacctgtaatcccatcacttttggaggccaaaggttggtggttcagttgagcccaggagtttgagaccagcccgggcaacatagtgagattccatctctaatacaaataaataaataaattagctaggcatggtggcatgcacttggtcccagctacttgggaggctaaggtgggaggattgcttcaggctgggaggttgaattaaaaataataataataaaagaaaaagatttttaataaaacatttttaaaaacaaacattatacacatataaaggaaagaaaggttattaacaatcccattcttaactgcgtaatttgggaatttgttatatttcagcttaatatatttatagttatattgttcatagttggaggtattgatgcatgtgttggtttgccaacattatctctatgatattgatctctatttgcttgacggctgcccttcttaagatcatgaattacaatatattcaaatttgttttttctgaaacaaggaagaacagatgaggcagtggagtgcactgaaggtagtgtaagtctttggtttgaaaccaaatctcctgcatgctagttactcttgggattggtggagtgcttttagcctactgagtgcagtgatggaaaaaatactagctgtaagaaatgattttgattgaagaatattgtattttaatctttgaagttttataaatggacagacatgattaaattgacacagtattacaataactaatcttcagttgactttcttttaatattacatataagaacaaagttcctgcattgtatcttttgagtagtgaacatttgcaattaattcttaatgttaatttttatctacataaaatttgtaagaaagataggtggctacgtgatcatggatatttgttttagattattttgtctgtcctttagccatgattagatgctctcaaatgaaatttagtttttataaaagtttcaggagaggagatttattgtttaacatatgttctatgaaatattaaatattctgtattaatataaaattgatcaggattttttgaagctacaggactctagataatctaccatgtcacctttaccataatatgtaaagggaactgaaaatctatttcaacataaacttctaatttgttttaattagccaaagcattgtacttaaattgtaatgagtaaatattaaaatttggatcatctttccttagtgtgatgtcacattgttttgcaaaattagatttgtggatggcaaagtatttttttcaatttctgcctctattacataagcttaggctctacttgggtaaagtaaggaaataatgttaaattttatattttctgattttcctgtccttcatgtctctatagtatcactctgaaatactataattactgttttcatcctaatatgtagttgcaaacaagaattctctcttgtaagagagttctaatcccatgatctgttaaccctgtttgagggaagccatgtgaagaaatcctaatcgaactcctcttcctctcctaatcctttttgcctaattgcatggtttttaagtcttcctaatgttggaaacctcttaagaataaatataagctagccccgctgtttggctccaaggtgatgcatgtgaattatcaccttgctgtgctgcttctgtacctgcagtattctctataatttttgcagtagcaagcacactattaaataataattttcaaataactctatttagaacatatagagatgaaaatccagttacgaagtttctccagaagtctcagatgaaaaaattagatccaaatttttttcaatgaaagtccacaaaattgagaattgcatatgaacagtgtcctttattatatatatatttttacctatttagcatggtgtcctctatttcattttgtgtattttattcaagagacttgatcagactattcagccataaaaaaggaatgaaatgatgtcacttgcagccacatggatggaacagtcattatgttaagtgaaataagccaggcacagaaagacaaatatcatatgttcttacttatctatgggagctaaaaaagttgatctcatggaggtagagagtagattgagactggcaagaggcttgggggtggatgaagagaggttggttgataagtacagacctgcagttagaaggaatcagttctagtgtttgatagcacagtagggtgacaataggtaacagctatttaccatgtctctcaaaatagctagaagtgaaatgttccccacacaaagaaataagtgtctgagatgatggatatcctaaataccctgatttgatcattatatatcatatgcatgtgtcaaaatatcatatgtatcccataaatatgtacgattattatgtatgaatgaaaaaaagatacttgatcaggatgaggggtgcgggttgaataggtggatttttttagggcagtggaactattctgtatgattaatgatgaatacatgtatacaaattttaatcatttaggaggtcagaggagggggattccaagatggaatacagactataagaaaagaacctaactgtattgcaaatgtatggtacagcctcactgaagaggggtgaaagagtacagtgctactgacctaaataactaagtaactgggaatgagttgagcctaatactgaaggcaaaaaaaattgcacataacacatgtgctgactcagaccttcttcaattgattttatgtaacatataagaataaagtttctacattaaaaaagtatgaatagtatataacatttgtaatttattgttaatgttaatttttatcttcataaaacttgaaaaaatagatagctataatgtcattacttattttacctatccattggccatgataagatgtcccatggggtacaggttaattctgaaaccactatttctcccaaaaacaccttacaccttgagaaactatgaatctaaccatgagaaaaacatcaaatctcagttgagtgacattctgcaaaatacctgacagttactcctcaaaaccgtcagtgtcatcacagacaaggaacacctgagcaggtgtcagaaccaagaagatacaagcctgaggagacacaagcagttgtaatgtgagatcctgaatggagtccctgagcaaaaaagaccattaatggttcattagttgtgacaaatatactattctagcataagacgtgacaaatacactaggctaacataagatgttaataatagagaaattaggtatggggtatataggaactctctctgcactaccttcacagtagttctgtaaaccttaaaatgttctaaaattaaaagttgacttaaaaagatcatttgagattactgtttttaattagccagaatatctaaaactatgaataaattatgaaagagcctagtttttgtcacttaatgaaaacagtgatggcttagaagtcctaaatgataagcacagcaatattcactattctttgctattcagtatttgcatggcttcttcatttaatttgaaaagttgtaaactgataaaacactataacatgattcactggctcaaaactacttggattagtcttactatttgtgctaaattggtgtttagattacttaatctattttctcttactttgttttagatgaattaaataatcttggtcatcctggtgagtaatacaaacataaaactttagttttagatttttaagttgttgaatgcagcaaagttaccgtaggtactcttttgctacagtaatactagtaacttttttctctttattgaaataatataatttaaggttgaaattaactacatgaagtacaattttatacaagtgatacattaaaaatattttaggttataaaactgtaagggtagaaaagaagtgtttgaggtaacataaaacctcaaggtattatcattgtgtattactccttatatcataacaaggaagttaatgggggaagtacgtgacctttaatctgaaagcaggaagcagtgtttgacagagtgacaggggtaacatttctgaactgatcagacccctgggacctttttcttggtgcctcagtcatacagcatatctgaactagttgggtgggtgcctatatctggagtaagaagtgtgtttgtggggatcattggcatcgtacaggtcggttggtcagtgaccatttcttaatgagtgacagttgtcaagagtatgtagaactctgtaggctaattttaattagaacagatttctaataagttaagccttcacctgagataaaaggcatatcaacagtgagaactacatgaagacacaggatatcaacctcgtgtaggctttctgaaagacaatgatggaacctgtggatagatctgaaaataaaacctttcaggaatagtttaagaaggtggttatgtcatttaatatttgtagaaaaccctattacttctccacttatttctcattattttagcatcattactagtttgcttagtgtcatactcatattgcattagcaaacatctattattgtgaatgccattgggctgtgctgactgtatataagcaaactagacacagcagaaagtccccattacctgtgcgtcattctccttgctgtagtgtcctcaaattcacataaagcctcaatgagacctgcctcaagtaggtcttgaactgtcaaaaaccatcctagtaattgtttctcttactgggggagaatagggggtctggatagaatcccctttcctaaattagtctgttaattcttgcttttctttaatgaacattatgaaaagttatttcagaaaaacttttgtaaatagccaccactaagattctaaaattttcctggccctttgagtttttcctcatttcccacaattcagggagtaccaaaaatttaggtttaaaagaagaatgttgtatagggaaagcttttaataggcttcagtggcatgtatttgaccagtagtacaaagttatctcccgacagtagtggacacacaactgatgaactacatctttccctacatggtgcttcaggtgcggggcgggattttattttatgtatactagagggtgaaagcatagaatccagaaggagactccctaagttagtatccagatttgctacttactagcttcataactttgggcaagtgactttaatctctctctgccttaatttccttatctatataatggggttaataatagtaggcacctcatagggtagagtgaggtttcattagatctgttatatataaagcatatagaacggtgccagctgaggcatcaggaaatggtaactactgctacttcctattgtgaacaccaccatcgtttttttccattcaagagtgtttttattaaaaatctgaagagtagaaactatattctgtaagtgatgctgctgatgttatatacttttcatgtatctttaactctggaaatataccatggatcttacatgttttgcttttttatctttgtatagataataaagagcaaacaactgaccagcctttgggtgagtagaactttaaaatgcattatcaaagtataattattgtgtataactccagaaggaatttaagacattttaatttggttttttaaagaaatgtgaataacattgggaccaaatgttttatttttttgtatctgtaaaagaaggtttagaagaggaggcttaaaaatgattacaaattcagtttctagggtcaagtcaacttctgtggagtgatttgtgtgtttctcacgatatgcaaacagacatgcgtacaaaaagaaacatgtacatgctgcatagttagcatagaggaggaagtggttagtgctgtctcttggtgagggatagaaatcacaaaggctgcagtagctttagcgtttgctcccctgtcttctccaatggaaagagaaaagaatttaggataaaatgtaaacgaacagttgcatttgaagaatgcctgggacaagaaaatgtaagggagaaaactttagcagataaaagtttagcagattaacatttaaagatggtaaaaatagctaacagcttgatgctggcagaagccagataaaatatgtctaaaatttgtccattggattcagctactgaagatgtgattggtggctttgagtggaatgttgaaagtgcctaatatgtgtcagttactgagttatgctgggaatttaaacatggatacaatgtataaaatagtggaaaaagaaagattcagaagtgaacaaatgaagacagtacatattaatttgttggaaagaaagagtggtttgaaattaactagatagggcatatattcaaagtgttttggtaggaggggaaaatgtgaggatatttacatttggaaaggaagtatctgttgagactgtgtagattagagtgatccatcaaagagaggacaatttatagagcaagttcctagaagagatgatagggatttgggccaaggtgaaaacaagagaaattggctttaatcagaatgttgaaacctcttttgagattaaaaagaaggagagattggtgaacagatagatttattgggaagctgaggacatttttagtttatgttttttgtttctaagtaattaggcgtagtaatatgcttaaaagattgaggaaaaggctgggcatggtggctcacacctgtagtcccagcactttgtgaggccgaggcaggcaggatcacctggggtcagaagattgagatcagcctaaccaacatggagaaaccccgtctctactaaaaatacaaaaattagctgggcattgtggtgcatgcctgtaatcccagctacgtaggaggctgaggcagaagaatctcttgaacccgagaggtggaggttgtggtgagctgagatcgtgccattgcacttcagctgggcaacgagagtgaaactctgtctcaaaaaaaaaaaaaaagattgagggaaaaagagtaaagtaaggctgaatatagatcttattctatggcagaggcttagaggctaaagaaaatggaagcaaggtcttacaagtctgatctacaagtgaatgtgtattgagagtccaactaagacttttaaagagtaagaatttataatggttcagatcagttgtgtgctttttctgtagcagatctcagctttaaaatagagaagataggctgggtgtggtggtacacgcctgtaatcccagctactcgggaagctgaggcacgagaatcacttgaacccaggaggcggaggttgcagtgagtggagattgtgccactgcactccagcctgggcgacagagtaagactcttgtctcaaaaaaaaaaaaaaaaaaaaagaaacctgctatgtttcattcatagtggtaagttttcatgtattccagctccatgatcttttctttagatcctccagacagacctcactgattaagaaatacctattaaaatagtgttctgaacaaaggcatagccatcatattctgtagagaggagcatacatatgtcttaggtacacaaaatgacaagatccaaatgtaactgggttagttgctgaagatggtttaatcacaaatatgcatttaatagtaatgctaataaactaagtgttttcacctagtgaaatgtttaatttaaccctgagatgtaggtatttttcctcatttttagtagatgaaaatttaaaactgtaagtgtttaataaaacttgctcaggattatacaatgtagtagttgagacaggattgaaacccatctatctctcattccatagcctccgttagctccattatgccaggtattctttctcaaacatgtcccaattgaaagaataacaagataaatggaatatcaggtcaacttctatcattgaagttcactaaacatttatctaatgtttcatctgtgctttatgacaggcatcccccacccccaggctgtggaccagaactggtctgtggcctgttaggaactgagacacacagcaggaggcgagtgagcgagcattaccacctgagctctgcctcctgtcagatcagcagcggcatttgattctcataggagtgtgaaccctattgtgcactccttaggagaatctaactaatgcctgatgatctgagatggaacaatttcatctcaaaaccacccctcccctgacaccgtccatggaaaaattgtcttccacaaaactggtccctggtgccagaaaggttggggaccgctgcttaatgaaacaagagaacaagccttggtttgtgaattcaaggctttggatactaataggaggcagacattaaatgaataatatagtacatgctacatgcctagtagaaatatgtaaagaatctagaaattgttcatagaagatggtgatcagattagtcgaggagagttagagagggctttacctaagaggcaaagccaaggtgaggattttcaaggacgaattgggagctctcaaggggataaaatgaaaatatatgggatgagagttcattcagaaatgaaggagagggaaaaaagggtgaagacatggtaagaatggaggcatgaaatagatggtgtgggtgaggaacaaagttcagtattgctagaaggtagaaaactagggaaggagtggctggaggctatactggtaatgtagttatttattgctgaataacactgcaaaatttactagcttaagaacagcatcagttttattatctctcattgttctgtgggttggactgggtttagcaggtggttctgctggtctttcttggggtctctcatgcaactgcagtcagatgaggctgggactgccacattcaagatggctttgcttacatacctggcaccttagtgggggttggtgaaagactgtgaagactgaaaaaatctccctccctctctctctctctttctcttcctcttactctgtctctctgtctctccctctccttgtctgtctctctctgtcctcccctcctcttcccgcccccaacttctttctcttcgtttccctctccctctttcctttggttccttctccctccctgagtggtctctccatgtagctgttttctttatgtcgggctggatctccaaagtggaaactgtcagagcttttaagggcttagaccctgaactggcagaggggtcacacatattatgttgctcaaagaaagtcgtgatacagcccagattcacaggtgggggtgactgtactacacaagggcaaggatactgtggtttgctgggggctacctgctaccacatctggaaagataggcatggactagaatgcaaatggccttgaatgccaaactacatcaccagtctaacccccagccactccttccctagtcctctaccttccagcaatactgagctgcctgttcctcacccacaccatcaaactgggactttattttgtaggacatggagagtcattaaaagatttaatacatgtgatttttaaataaatacttaatagcatttactatatgccagctccttttctaggtgcttctgaatattaactctatttagaaaagtaacataataatcagaattattagacatgggattaatgatataacaccagtttttgaagaatatattacattaaactttggaagacgtttaggatcatgagttaaaatgtctttctgaagtggcttcattattcttttgctgaatccactggcatttttgtttcacttttccaataaattgtttgtgttcaagaagttgtgggtagctcttacagtaaatatttttctacagaaaaactctttcatttatgttatcacttgaaaaccattataaattgctttatatttgccgtcttgaagttttctttattcctcactcttacctcctcaaattcaagttttattgttcgtttctctgtcgtgtcctttttcctctccctttctactacttctcgatcttccatccaccccagttcacctgtcacccaggaactgttttacaagtagattggacaggtaagatttacttacccaccatctttttcaccagtaaagtcaaggaaatgctgtaagacatcttaggaactagctattaaaaattatcattggaggaaaattttagaagtgttatagacaattatcgatacatatgttttaagacctgtagttctcacactgttgaacccgtgcattctgtaaactgtaccaagtattctttcccaaatagagaacaaaaccagtgaataatgatttgatatcagcaaaaacatcccatgatgcttagtttgacagttaattttatttccccaaagacccagtgatttttttattatatacttataattgttttctaccaataaaaatctatgatgtgtataattaaatgatggtattccatggaaaaatggaattatttacaagcattttactaccccagtaactttttaacctcttgctgtaaacctatgatttggactataatgatgtaaagcagagacaatgcattctcacatttcccctcaccttagaagaagactgatttgagtctgtcactctgttgaggttggatccttattctaatagcattgatggactcaaaaaaatgtgctgtggatcagccagctaagagtcttgctgtagcaggtactttagtgtaagaatactagtttattttaaaagaaattttaaaaaggccaggcgtggtggctcacacctgtaatcccagcactttggaaggccgaggtgggcagatcacctgaggtcaggagttcgagaccaccccgacctaagtggagaaaccccatctctactaaaaatacaaaattagctgggcgtggtggcgcatgcctgtaatcccagctactcgggaggctgaggtgggagaatcgcttgaacccgggaggcagaaggttgcagtgagctgagatcatgccattgcactccagcctgggcaacaagagcgaaactccgtctcaaaaaaaaggaaatacaagtgatgttaagttttatgctgcctcctattgaaatccatgctgagtattctccgctttttcattgaattaataatgcggcttaagtatcatttcactgttatgtatattcataacactgggcagttggctagaaatctctgaacatgtacatatagaatagagatgacatgatataaaattactgaggcttttcacaaagtagagttttttttatcctttgagagagtcacagtcttttaaattgatgctagttttaacactaggtttaagtgttccatggaaagaaaagcaatttcaccagagagatttttggtgaaataatcatctcaattatttgaaacatctgaaattacatattgtagacgtcgagtcagcaatgtgattattcatgcctgtttcaacttcataagagtagtattcataataacttacaaataaactacttagcagcactttgtggcaggggttggttaccaagtcctggcctgcgtcagagggggtggcctgcagttctacccaggcggctcttcagccagttggctggggctgcaggtgctcttgtcaccctgtctctctgctccctggcatttctgtcactgctgctactattacgggtgctgcacacgccccactgtcagccctcaagaagaaagccgtcagaggctattattgtcacgggatggtcttgaggttttggtgtgttctttatttttttttttttatttttttcttccctttgataccagtgggtcttgagtttttaaccattgaccccattccaggctatcaaagaaaggtaccgtgttgaagacctcataagcactaagctaggtctggctttccacactgttttagatgggctgcacacctggttaagctagctgctactttttaaggcatagatacagatctttttttctcttatgaacaaaaaaactgtttctatcagaatacattatctttgagcaaagtctcagtgcactaagttcaaaaaatgaacttttaaggtactcatacacaaaatcttcacatacccctgaaatagcctcatctgagtcaaatgggggagtatttttaaaagatgctaagaggagacggtagtacatccacatggctactgcagaaaccaagaatacagtacccgtgaagttctctctctctttgatatttcccctcattcactctgatgggattcttcctgtcccttttttagttatcttgtttttagcctcttccattctcagcaaaacagaacctaatttgatgggaacccaatttcaaatattccttgtttaaattttctccaaaagtctagttgaatattatatcccttttgttataatttaataaaagtaaactttaatattaattactgttatgtttcatatacagctaataaatatcctttgcctggctctcaaaagtgtgaatatgcttaatttcagtttgatgattttagcatctgtgttcctcagagaatattgatctgcttacataaatagttctaaaatgaaattaaataatgaaatcttatttgaaatgaaataatgcaatcttaaagcatactttttattataataccatctccataggttttgttttaatctttatatcttctttaaacaccccctttctttttttttcaaagcgaaggacaaggttgcccttttgataggaaatatgaattaccgggagcaccccaagctcaaagctcctttggtggatgtgtacgaattgactaacttactgagacagctggacttcaaagtggtttcactgttggatcttactgaatatgagatgcgtaatgctgtggatgagtttttactccttttagacaagggagtatatggtaagatatttataatgtttgtttttacaattatccattattcttttcattatacaagttaggttaagaattgaaaatcagataaagataaggtaaacatgttgttgaatggaagagttttatttttcttattaagatgatacatttgatcttcattccatctgaataactaattagcttcatgtctttacttttatgtttcctgttttgtcaaaacatatttttcttactagaattcttacctgtcttttgtgatttttttttaattgatagagccacagtataataaaacttgataaccacacagcaaaatttacattcatatgcgtaaaatattacagtatgtggggttttctttgaggggggtagcataaaaggttctagtagaatgtatattttgtatgtttccttttcctaactattgcatggtcttttctagtcttttagtgagaactagattttaacaaggaaatgttggtggatggggcatataatagtaatttgtaaattaaagttctatacagatatgcttagaaatgtacctctacaaaaattcttacagtaaatatttaatgttttttccccattctttcacctaaatatattaacactgcatatatggtaaagaatttcaaaggagacagaatgtgctgtcactagctaatcatttatttggtgatttatttctttcaatatgggaaggccagctgttgagctcatctgaaccgtgttttgcaggattgtgcttccatgacattgtgcaataacatcagattgccagggaagtgacatttccaggcctgttgttaggcatgcaatgataaacaaaaagtaccggtttggctcctgtatctttccagttattttattttaataatttctgaatttactcttgttatttataattagattgatatgataaggcaagtttggtcagaatttttaatggtgctcaaagtagaatttttaatggaacaaaagctttttttttccccccaagatttaccacactgttgtgtaagggatggggaaaagtctcaaaatcttacttaaatgagtttccctctctaaatagtgaggatttagagaaagacaaatgaagttaacaaggtaaacacctcaaatgtgagatttcagctattatgctgatgtgttaataaaactttatttataactcttatggactgatgactaatgggtgaatccatccatttttttcttatgaaaatatgaaagaatatacaatgcaaatatgccaccttggtaattggcttatacaggttgagcattcctaatctgaaaatccaaagtctaaaacttcgtgagtgccaacatgatgccacaagtggaaaattttacaccttacgtcatgaggggtcgcagttaaaactttgtatcatgcacaaaattatttaaaatattgtataaaattaccttcaggctatgtgtataatatgtatatgaaacataaatgaggctgggcatggtggctcatgcctgtaatctcagcactttgggaggccgaggtgggtggatcacttgagcccaggagtttgagaccagcctgggcaacatggcgaaaccccatctctactaaaaatacaaaaattgggccggacgcagtggcttacgtctgtaatcccagcactttgggaggccaaggcaggcagatcacctgaggtcaggagttcgagaccctcctgtccaacatggtgaaatcccatctctactaaaaatgtatggtggcagtcatctgtaatcccagctactcaagaggctgaggcaggagaatggtttaaacccgggaggtgaaggttgcagtaagccgagatcacaccactgcacttcagcctgggtgacagagcaagactccgtctcaaaaaaaaaaaaaatagaataaaataaaataaaaacacgaaaattagctgggcgtggtggtgcatgcctgtaatcccagctactcaagaggctgagacacaagaatcgcttgaacccaggaggcagaggttgcagtgaaccaagatcacaccactgtactgcagcctaggcgacagaatgagacttggaatcttggtctcaaaaaagaaaagaaaaacataaatgagtttcatgtttagacttgggtggcatccccaagataacctcattatgtatacgtaaatattccaaaatctggaaaaaaaaaatctgaaacacttctggtcccaagtctttcggataaaggatactcaacctgtattttcaatctggcatcaggggtgttgtttgtttttatattatacaattgatctcagcttttaaggtgcctacgtgacataaaaaggaaaaggcttccaaaacttcactagaagtgatgaggtgtaaggaaaaaatattgatcagtttaggtttctgtattggtgaagtatttaaagattgagggaatcatatgaagaattactaccttggttgtttattctcatttcttattgatattttcaccttggcttttaagccctttgtttgacttttaaaaccaaatcctgtggccagggcatggcggctcacacctgtaatcccagcactttgggaggccaaggcgggcagatcacctaaggtcaggagttcgagaccagcctggccaacatggtgaaaccccgtctctactaaaagtacaaaaattagcccagcgtgatggtgggcacctgtaatcccagctacttgggaagctgaggcaggagaatcacttgaacttgggagggggaggttgcagtgagccaagatcatgccactgcactccagcctgggcaacaaagcgagactccatctcaaaataacaaaaacagatcctttagttgcccctgtgaagtagagaaccagaaatattaaaaattgtgacaagactgcagtttaggctgaagctttgccccaatataaaaacgtcatcttggagtacaaaataaagaggcatgttaaagcaaaatgtcagcttaagaaagctagaaaacttttaaatcctactgattcgtgtcttaacagggtggctgcattatattttgaagtattgtgaatattccaaacatcagacacatctacactaaatgtaagtgtggtagaggcttgagggtttagggcatatcataaagaaacctttagtttttcttttggactatgcctttaccgctagttgatattaccaggggactcagtgcttgagggctgtgggggaagatggaaggcagagtcacaggaatttcagcatgaacagctagatacggagaacagaggaactcgagttcatgcccttttatattatattgcacgcaggtttgtagaagaaataaaagttgcaacagaacagacaataattcagttttaaacatatgtaaacataaaaaacagaaaccaaaaccagaaataactgtccttaaaaatacaaaaatacatgtccttaaagataaataaggagaaagatttctagttatgttgtatagatggccaggataaaaagtaaccctttggcctgagatctatccctgcatagcctttctgtgttcatcgcttgctgcagcttagttgtgctttcgtgtagaagaacggtaaaggagtcttgtcggaatatggcaaaagtgttattcggcctgcagcggagcagctgttcagttcacatagctcagtggttaagcagtgggccttagcatagctagcctgggttcaaagctttggctttctgctgacttagctgtgtgactgtggttctttaacttttctaagccaaaaggaatctacaaaatggatagaactaaattaatgaggtttacaggataagataaaataattatccctgtgcctggcacactaaaaatgctcaaaatattgtacctattattgttgtcgtttcctgtcaatttattaaagacattcaagcactttttcatctttagattggggatttggactaggtagcattctatttcaggcctcaatgagagaaacccagctttaatcagtttctgtgtattaagggtctacctaaggttttttgggttttttttttggttttgggtttttgtttgttttgttttttgatacggatggagtcttgctctgtcgcccaggctggagtgcggtggcgcaatctcggctcacggcaacctctgcctcctgggttcaagcagttctcctgcctgagcccccagagtagctgggattacaggcacatgccaccaacgcctggctaattttttgtatttttagtagagacaggcttcactgtgttagccaggatggtctcgctctatctcctgaccttgtgatccacccaccttggcctcccaaaaggccaggcgtgagccactgcacccagcctgccaaaggttttttgtgtttttttttttgttttttttttttttgaggaaaaaaagtcagggggtttaaagctgtagtgtagtaaaacagtgaaaagccagtgcactgacattttacgttgtctgagagtcgagttacctaaaaagccagcagtagattatagagacagtatcatatagcacagtagcgaggctggcctgcatctgtattttggttctgtcacttactaggcatttcagtttgggtgagcttttaaacctcttcatgtctcagttttcccatctgtaaaagagggatgttaatattacctactttgttgtgaggattgtgtgaggcaatgtaactagtgacctttcttggaaccgtgcctggcacatagtaagtgccgtgtaagcctgctggggtggcgggtgttgtgctcatcagccactcactgtgctaagtggagtgcatattcagttgagtggaaaagtttttcatttaaatgattattttctctgtagacaaaaataaatatctgtgactatattcttgaatcatcctcccaagaaataaaactccctaaagatctaatttgcagaattgtatttctaagtacagtaagttctttgacatttgtttaaaaaatacctattttcttctctatccttgagtaatgggatggttaactaaataaataagcagtactagagatggaatttaaaaacaacaacaacaacgatttgggccacacacggtggctcacacctataatcctaacagtgggaagctaaggtgggagggttgcttgagcccaggagtttgagaccagccttggacaatatagtgagacctcatctctacaaaaaatttaaaaattagccaggcatggtggcacatgcctgtggtcccagctacttgggaggctaaggtgggaggatagcttgagcctgtgaggtcgaagctgcagtgagctgtgatcacactgctgcactccagtatgggcaacagagcaagaccctgtctcaaataaataaataaataaattttttaaaaaaatgatttggactagttcattttacacaaaagtacttaattcccctcaatataatttggttgcagactttgatacagaatagttacacttttcgtaagacattttgggaaagagaaaaaatattttggtgttaagtgccttaattccattcagcagttgcagggctgggcatgtggcattaatgtaacagaacaacattcagcttttccctggatgaatggaagctaagccttccctcagagttgtatcttcaccccaatcaagtcttgctggagccagacgtattacctgacatgagggaggcagcacccaggcctgctgtcagtcgtctctgagtaataccagttgttgaaatggtaccatttctactaaaagtcagacccttgaaaagagacctccagatctgaccctgtcttgattggtttgcattgttaatttaatgcaattcagtaagtatttactgagttatttttgttacatctatagtccagatgaaggagtatgctatgtgctgagagaaataatagtgaataaagatcatgatctgtcctcctaagaaaattacagtcctgggccgggcacggtggctcaacgcctgtaatcccagcactttgggaggccgaggcaggcagatcacctgaggtctggagtttgagaccagcctgaccaacatggagaaaccctgtctctactaaaaatacaaaattggctgggcatggtggcgtatgcctgtaatcccagctacccgggaggctgaggcaggagaatcacttgaacccgggaggcggaggttgcagtgagctgagatcacaccattgcactccagcctgggcaacaagagtgaaactccgtctcaaaaaaaaaaaaaaaagaaaaaaaaaattatagtcctttaatacaaggagaaaaaaacactatggagtcaaaacatcaactctgtgattttaagcaaatcatttaatctttgtaatttaattttctcatctataaaataagggcagaaatcacttaaagttgttatatggattaaaattagattgtgtatatgaaagtcctttgaaaaccaagaaaatgttatacaggttgaatatctctaatctgaaaatcccaaatccaaaacactcctggtcccaaacatttcagataagagctactcagagtgtgtaaatgtaaaagattagtgtcattatgatttcttatcagaaaaactaagtagacataggactatagaatgtcaggaaaagccagtatgtgattgtcagaaagtgctgctacagcatttcaaagtagggagaatttgaagtgtgttagaaagccacaaaccagttaccaggtagtagttaccaggtgagtaacttgctaaggattctgaactttggaaataacccttgaggactggttatggtttgggtagatagaacggagatagagtaacttgagcaaagttgtggacgttaaaaataagtttatcttgctcttgaagcagtaaagagactgatggaaaataaagttatattttgaatacttgatggaggtgtataagttgtaccctttttaaagtgtataatttggtgatttcagtatcttcacaaagtgggcatcagtcaccactacctaacttcagaacatttccatcaccccaaaaagaaaccccatatccattaacagtcactcccattcctccttaccccagcccctggcaaccaccaatctattttctgtttctgtggatttgcctattctggacatttcatataaatggaatcacccaatatgtggccttttatgtctgccttctttcacttcacatgttttcaaagttcattcatattgtagcatgtactagaacttcattattttagggctagataatattctattatatgattatattttgtttatccatttatcatctcatggacatttttggacatgattaataatactgctgtgagcatttgtgtacacattcttgtgtggacgtagtttccatttctcttcggtatgtacctggaagtgaaattcctgggtcatatggtaatctatatttaactttttgaggaactgcaaaactctttccaaagttcttacaccattttacatttgtgccaccagaaatgaatgagggttccaatttctctgcatccttgccaacacttgttcttgtctgtcttttttattgtagccatcctggtgagtttaaaatgacttggaactagtggctaatgatgttgagcatcttttcatgtgcatatttgccactcatatatcctctttggagaagcatcagatcctttgcctatttttaaatcaagtcattagtcttttttttttgagatggagtcttgccctgttgcccaggctggagtgctagtggcacgatctcagcttactgcaacctctgcctcccaggttcaagcgattctcctgccttagcctcccaagtagctgggattacaggctcccaccaccacacttagctggatttttgtatttttagtagaaacggggtttcaccatgttggccaggctggtcttgaactcctgacctcaggtgatccacccaccttggcctcccaaagtgctgggattacaggcttgagcctccgcgcctggccgtcattagtctttttattgatgagtggaagagttctttattctggatacaagctgtccttatcagataaatgatttgcaaatattttctcccattgtgtgggttgtcttttcactttacctgatcttcgtggtttattgaattaaatccattcttttggtcattatttttaaaaccctatctgtgcactcctttttaaaattccctgtgtgtgcagtcttattttcattcacaacagtaatttagttttttgctaggctagtctcttttctgttagctttcattccaggtccaatccgtgtttatttctgttctcctgcccataatctacctcgctctctctctgcctttgcaaatttctagccattccctctcttaagaccatcccctgttgtttcacttcatactgatattcctctctactttactcatttcatacgtacatggtggttgtcccactaacatgatttatggcatttaattatgtgatgactttcattgttgcttgataacataaacgtgtgaatcgtgtgaattcatgtatggagatacatgaatctcctgatctcctgcttagaggtcaggaactttgtccttcttttttgtttctctcagtgcctacatgataacttccagtgcacacatgagctgtaatataaacccacacttgaaaatgggtatatccattttctcattttagctgaaacgtatttgaaagaaccatttttctcattttaatcgaaattcagaaaaagcagacgacctggattttgtcctgtaggaccacatgaagcaaattgtctttaattctcaaagccgcattctctgctaggagtcggggccataattacaatggattagctacttttggttccctgtctaaatggcttttactatttgctttaaaataccctgtaaagaaatcattaaatccagaatattgagagagcaaaatcagtgggctccagatattgcaagcagaggggaggatatcttcaaaagtgttttgtccagtacttttatgaagaagttcagactgatatttttgttgttttttacagccaaaacaaatttcaagaaaacattgagttgtttgggttagtttttatagtatcacttctcagtaaggaaatatgattcatctgttgagtcctaaaactatcccaaattttagattattgagtcaaaagactctagatggaagattgatatttatatctcatagcaaaaagaaaaaatagcaatctgcgaagtcagatttcccatctctgattataaaactatatattttaataacccttaactgtttatggtaatacctgcagtttcttgacttcatattgcagttgctattcatctgaattgtgtttgttcatccgttaaatacttactaagctcctgctctctatgccaggaacacacaaataaataaatgtaagactatctctgccctaacagaactcctagcttcatggaggagacaaatgagtcaggagagaaatcctagctgcattcttttttatatatcataacataaaattgtattttatattatactattggttacaaatatattttataaattaggatatacttcagacagcattttgatattgtcttgaaatgcaaattttaagtgcagactgttggtaatttatttatttatttatttattttgagacagagttttgctctgtcgcccagggtggagtacagtggcatgatctcagcttacagcaatctccacctccaaggttcaagtgattctcctgcctcagtctcccaagtagctgggattacaggtgcccaccaccacgcccagccaatttttgtatttttaggagagatggggtttcaccacgttggccaggctggtttcgaacccctgacctcaagtgatctgcctgcctcggcctcccaaagtgctgggattataggtgtgagccgtcatgcctggcctgttgccaataattttaaatgcaaaataacattgtctatatttataattgggtatttcttacatatgctcacatcaacctgaagaaaattaaagtcaaggtttttctacaaaaagttatgcagtctgtatgttcagagtgcatttagaattgacatctatctctctcttatttttcctcttttcagggttattatattatgcaggacatggttatgaaaattttgggaacagcttcatggtccccgttgatgctccaaatccatataggtctgaaaattgtctgtgtgtacaaaatatactgaaattgatgcaagaaaaagaaactggacttaatgtgttcttattggatatgtgtaggaaaaggtaagttttctaatctttattaaagaattgttggagttaaatatcgaccatgacaaactagagaaacctgtgaaatgctaaaagccatttgcgtttgtgaattttagtttatacattgaaactggaagaacaaaactagaggaaaatacatttactccatgtatatctaattattttaactcttcatatttgctatagaacacaaatgaagaactaaagggcatgggcatttactcacactacaggggattcaactctccagaatgcctttagatgactttaataatcactatagttattccctcaggaattaacaaaaccaacacccatggagttgggatctctgctcactagtcagtcctggtcttccagacatggaatgagtagccgaagcagatgtttggaggtttggatcccatttgtctgccattgcctttctaaggagtagaaccaatgactgttcctctagatttactatttttttgcttgctcagcatttaccaatcaaaatccaatgccagagttcaaatgcaactctagttttaaagctaacaaggagttagtgggttattttgggtagatatgtagctacctagatgaaaaattttgaatctataattttaaattatgtattctaaaaaactgttgtattttctcattatttatacccttttaagaatgctctttaacttttcatatttctatctgccctcctccgcctcccttaaatagaaatgactacgatgataccattccaatcttggatgcactaaaagtcaccgccaatattgtgtttggatatgccacgtaagaacatttgatgtttacgttgaagtttcctttattgtttgatgtctttttgtttttgctttttaggagcaggggtcttaactctgtcacccaggctggagtgcagaggcgccatcatagctcactgctcctgggctcaagcgatcctcctgcctcagccttctgagtcgctgggattacaggcatgtgccactgtgcctggcccctgagggttttttgattatagattagaggcctagaaaatacctatagacatgtaggcataaatttacctccttgatattctgcgtagaaaattttaaatgatcgactttagcattccatatcatggtatcttaattattaagcccaaattgggcatgtaattcctgcttaaagattaactctttaattatcaatgtcatgtgagaggcagaagagaaaatgaagcttattggtgtatacagaagtcccatgtggcaagtgtttgcttttctaacattttctttttaaaaaattatttttattggatattgacaagttataattgtatgtatttatgggatacaaagatatgctatgatgtacgtattcaatgtggaatgattgaatcaagataattcacatatcacctcaaatacttatcttttttcctaactgaaacattgtaccctgtgactaacagtccccacgctgtccccacccccccccagcctctggtaaccaccattctgctgggtgcttctctgagttcatttttattagcatccacatataagtgagaacatacagtatttgcctttctgtgcctggcttaacttctttttctatttttaaggtgtcaaggagcagaagcttttgaaatccagcattctggattggcaaatggaatctttatgaaatttttaaaagacagattattagaagataagaaaatcactgtgttactggatgaagttgcagaaggtaaaataaaaaataaagagaaaagtactcagaaaaaggagagcaggggagacacacctattcagggttccctctctggtgattgttttattcttattatgtgggtttggaattagtacctactttataaaacaatttttatattaatataacgttcagcaacacttctgctatttaatgtcatctttccttcccttttgacctagctctccaccatctgtgcagcattactcagactacaaggctaagcctcggcacagtcattaataaagttgaattctcagagctctactttgcttctatgcccagtgccttggtactggcaaatctccctatttgagggtgggtgggtggcatggaggggtggtggggaattgtccagtgagcagtctctcccaggatgggagagagaaaactttacagaaatttttagacactgctgggaaaagctgagttcatttttttccctgatgaacttagtagtttttaaatcctgatttaaggatgtgatcctagggggtctaatgccacatcttccatttctatctgttctccctgcctgctggtataatgctgtgcatatgtcagatgctgaacaagtacctattatttcagtagattgcactgtgttttttgaaaaaacattttataagccatagcaaaaagaaggtaacttggccaggtatggtggctcaagcctgtaatcccagcactttgggaagctgaggcaggaggatcacttaaggccaagagttcaagaccagcctaggcaacatagcgagaccctgtcttcaaaataaaaaataaaaataaaaaagaagaaattattttacaaactagcaccactagaaaatggagtttcatggatgttccagtgatggcagtttgggtataaggtgtttgaccaactgtcagccatatttattttcatgtttttatctgtgtagctattttagatcacttgacttagccacttttccatttaacataaccagccagggctttggacttcctgccaccctcccgcttcatccagagaagttccacttttatttgttttctacattaggcttcttctgaagcttacatttgaaggaaaggctctgctgctttaaaaaaaaaaaaagaaagaaagaaaacctttggattatgtcagttatattcaaactgagatccagtaaggtgctccagaaactctacagtgttttatttcaatttcgtttttaagtccattttaactattttaaaacttaataaaaagcaccatgctcactcacatatgatatttaccaaattgtcatagcaatgaatggcatcccgatatgtgctgtgaggatatttgaacttcttataaacatcttagacagttttgcttttcgctgatctttttcagtcctaccatgtctgcttaaccagaattgcccaggcaggaagaccctgtagtgtacatggagcacactcagctcagtgccgtgcacattgtgcccttcgtgggtaacggcccactcattgtacaaaataagtaaaggcctaatagtatcatgataaataatacagttaaatctagcccttattttgagttttggatgctttgtgtctgacccctgtcttagtagtaaagagcaaaagtagttgtatgaaatttttcacaagtcatccaattttgaaacaaaactttgctgtttctccctttggatcttccagattacttaattgaaactcattccatggctgggcatggtggctcacacctgtaatcccagcactttgggaggctgaggtaggaggattgcttgagcccaggaattcaagaccagtctgggcaacacagcaagaccccatctcaatttaaaaaaaaaattatttggggccaggtacagtggctcatgcctgtaatcccagcatttggggaggctgaggcaggagaatcacttgaacacagaagtttgagaccaacctaggcaacattgtcagaccccccatctctataaaaatttaaaaaattagccaggcattatggtgtgcacctgcagtgccagctactcgcgagacttaggtgggaggattgctcgagcctggcagtttgagactgtagtaagtatgaccacaccactgctctccagcatgtgtgacagagcaagccccatctcaaaaaaaaaaaaaaagaaaattccagagggagaaaagtattcacagattataagccaagcagttgaaggggaaaataaacatgttaccaatttctttttttaattttttggtttctttgtgtgagactacagagtctctgtcgcgcaggctagagtgcagtggcatgatcttggcttactgcaacgtccacctcccaggttcaagtgatcctcttgccgcagcctcccaagtagctgggactaaaggcacacaccaccacgtccggctaatttttgtatttttggtagagatagggtttcgccatgttggccaggcctgtctcgaactcctggcctcaagtgatccaccggcctcagcctcccaaagttctgggattacagacgtgagccaccacgcccggcccaccttaccaatttcaactgtgtgcaaggaaaacaaaatatgaggtaaattggttgttataatgctacagccatcaatctgtaacgtgacttttatttttgtactattcaggacagcattattattagaagtgttgaacatactactgaaggttttcattgtgagtagatgttcgatatgaatataggaccttgaagtaacctacatctaattataggacccctcttctcccttcccccactccatgataactaccattctaaacttattcctttttcgttttacatagttttattgagtttatatatacccaaaaaagtatgcgtagttttgtttttaacttcataaaaaggtattatgctctatgtagtcttttgggactagatttttttggttaatattatgttgctaagattgatccctattgttgcatgactgtagtttttaactgctacgtaatattctgttatgcaaacatactacagtttttttcaactactctcctgtgttggtgagcatttgagttagttgtaggtttttgctatgttaacagtgctatcattaacagtcttgtgtatgtctcctggaatatgtatgcatgaatttctttgcagtataattctacaacttggaattgctgggtcatagggtgtgacagtattccattttgagagagaatgccagacagttttgtaaagtggttgccgagtctacacttaaccctactccccacggccagcaagggataatgtgaatctgtactctctccatcacttgatagtcagacttttttatttttgccaaatgttaaatagtatctcatgtgatattgaacattgttcatatttttaatagctatatgtatatcttatgtgaaacatctttttatgtcatttgtgcattcttctgtgtgtgtgtgtgtgtgtgtgttttggcttattgatttagaggaatgttgtatgtgttcttgatataatactagcgaggaccgctaagacacaattgaataggtagttgtgggcatccttgtcttgtttctgactttaaaggaaatactgctaatgtcttcacatttagaataatattgtaagtttttttattaacactttatcaggttaaggaagttctcttaatttttttgaaaatttttattatgaataaatgaacaagattaaatggtttttctgcagctatgaagaagaaaataggatgtttcttttctttcaatttcttaatatggtgagttaaatttatagatagtctaacattaatccaacttgagataaatcactttcattgggatgtatatttttaatacactactagatttaatttgccatcattctgtttagaattttcatatctatattcatatgggaaatgggcctgtaattttactttcttatagtatttggtttaattttatgagaaaataaaattagtatttagtggtatcagtgttatcagtatcagtggcatacagagtatcagtgttatctgatagaatgtagcgtaggccttgtggaatgagatggaggacaaccaagatggttgattttatgtcaacttttgccaggcctcagtgccaagatatttagtccagcattattcaagatgtttctaggtgatggatccaacattattctggataagattaaagtttaaattgatggactttcagtaaagtagattgctctccataatgtgaatgggcctcattcagttagctgaaggccttaatggagcaaagactgacctcccacaagcatggagtttgctagcagcccgcctctggggctcaaactacaactctcctctgcatccccagcctgcctgcctgcaggtttcagacttgcaccgccacaattcataaaccaataccttaagtcagtcccttcttctcactgtccctctatgtacacacatacacacacacacacacacacacgtgtacgtgtacacatgcgcccatcttgttggtactgcttctctggagaactctaatacagaagaagtacaccctgttgtttactgggaacttttgtataaattatgatctgttccctaatgtttatggtagaacttgcctataaaccaacctgggattggtatttttttggtagaagatttttaaccactggttcagtatcttgaatatttcttgtaccatataggcttttcatttcttgagtcaattttgataagttatattttcctaggaatttgggcagttttcaaattcgttgtcatttagttgctcatatttctaatagtattctttaatctctgccttatccatagttatatatccgttttcatcagtattacttgtacttactttccttttttatttattgccagcttttgccaattgtgctatttcattttgaagaaccaatctttgactctgttgatttcttctactttttcattgttttctacatcattaacttctgctgtttatttatgtcttgccttgcatttattatttctttttctaacatcatcgtagttattcacttttagcctattttttccaatttaagtttctaaggctttacatttctcttaaaacatcactttcatcacacatcctataagtttagggattttttttagttgactttttttttctttgacctttaagttatataatattatctttaattttcaaatatggcaggaattttcatttcactttttgctttttatttctaccttaattgctttgtgatcgaataatagtctgtctaattgctatgctttgaaatttgtggaggttttcattatggccaagtaaaagatgaaattttgtaaattttgcatgtgtacttgagaaaaatggatatttttgtagtaactggttgcagaactctatgtatgcccattaggtttggcgtattaatttttattgttttgttcagttctatatttctgctgattgtctctttgatcaataattgagatgttgaaatctctcaatttaccaaattttcttgtagttctagcactttttacttcatatatagtgactattttcgtgttttaaatgtttatattttcttattgaacctttatcattatgtagtgatgcctccatttcaaatgcttcttctctttttgtatcatactaacagagccacaccaacttcctttttgttgacctaatatgctattttttacacttttactttcctactcttaacccctaggctagcctgcttctctacacttttactttcaaacatttcatgtcattctgctttgctgtagcttttggaggcaccatataacagattgtttaaaatccaatctgataatcttggtcttttaatgagaaaatttagttaatttacatttgttattttttgtacctgttttaaccatctaattttttgatttggctcattttcttatcttttttaaaaaaattgtatttatatcttttcttctctaacaaataataattttaatgtactcctacaatacttggtatctccttttaactcccaacatgttgatttaacttagacttagttctggatcactatataattttgtctctttttttaaaaaaaagaaccttactattgttaatttataacatagtagacagaagtaggataaactataacttaaataatatacttctaaatttaaattgatgtgtatccatatacattagtctatctaaaacatgttgaatgaaaatggtacattacaaagacatacatagaacatttttgttgaattcaaaaacctaaaacattggcatatactatttatgaacacttacacacatgagtaaaaattaaaacatgcctgatatgtctggcacataataggtgctcaggaaatatttgttgagtgaataaatgatactgagaatataacctgataatgtaggatagttcttagcctaaatatttaaaacataagaattggtggtcttaaaaataatatttattttcatatcttttagatatgggtaagtgtcaccttaccaaaggcaaacaggctctagagattcgaagtagtttatctgagaagagagcacttactgatccaatacagggaacagaatattctgctgaatctcttgtgcggaatctacagtgggccaaggctcatggtacggtaaagcccattttttgttagatctacaatatacttaacgttaaatcataaagtttcttctgaataaataactttcctcccagttttacagtgaaaatattttggcctactaggcaaatctcaaaccaaacaaatatttcaattatggatattacactggcttatttgatttagaaatatcaaattatttagcccattattgtcactattggtaaaatttaaatgaccatttaaaaatttttctatttttaaaataggttaagtttccatttgtctaatacacaatcctttagattctcctatattgtgacctgtcgaaaatcatggattgggttctgatccagtctctaccactctatgaacatgttatctataacatgtaaataagaaatggtacctgcttcaggctgggtgtggtcgctcacgcctgtaatcctagcactttgggaggccaaggcaggtggatcacctgaggtcaggagttagacaccagcctggacaacatggcaaaacctcgtctctactaaaaatacaaaaagttagcggggtgtggtggcacgtgcctgtaatcccaactactagggtggctgaggcaagagaatctcttgaacctgagaggtggaggttgcagtgcagtgagcagagattgtcccactgcactccagtctgggcgacagagcgagactctgtctcgaaaagaaaaagaaatagtacctgcctcataggttattgggattgaatgagtgcataggtagaaatgagcatggcactcgacaagtcctctgtacttttgattattcgtataactgagcatcctctcttggacacttgatcagtaagttgagtgatcagcagagaagatgacgtgaaaatcaatctgtagcttaattaccttttggtaattgtgtatggtttaatgaaaaaataagtttaaattaccaattgaaataattttggattttctgagtccaagtatctagtctgtgagtctcttatagataattgaaaaataattgtatttaatgaacttctataaaatatctttattttcataaataataatttttgttcttggccaggtgtggtggctcacacctgtaatcccagcactttgggaggccaaggtgggtagatcacctgaggtcaggggttcaagaccagcctggccaacatggtgaaactccatctctactaaaaatacaaaaaattagctggtcatggtggcaggtgcctgtaatcccagctactctggaggctgagccaggagaatcacttgaacctgggagtcggagtttgcagtaagctgaggtcacgccattgcactccagcctgggcaacaagagcaaaactcagtctcaaaaaaagaatttattctctaatacatatttttagtaaattaacatattaaagcacattaaaatgtaaaatgctataaatatctcaccattccagataactggataagtaattgaatgtcttttctctaaaaaagatctaaacaacaaatagcaaaattacggtggtaaagatcaacaataaacgaaacttcataaaacaaaatgaaaaggtcatatagaaaatatttgtaacaaataagagaaaaaaaattaagaccctcctcagtaaacaagcaaatgatacaaattcaacaatccacactgctggaagtatagagaaaaattttttaaatggctaatgtaagtaattaaggaataattaaaactgatggtatctttctgctttttaataccatcaagtagacaaatgttttaaaaattaatactctgttttggacatgttatgctgaaactttatattccatgcaaattgaaaataatttgtcccatatgtaaaggaacaatcacatagctttatctatcttaaagcattacgtatatataaatattaactatgatagaaaaacaataaaacccagaggtattataaatattcaagagttaacagaatggttaaaggtaacaaactataatgtggctgttcagtgacattgtgctttattaaaaattctggtcatataaattgaggcaacagtgaaaatttatctacaattgtatgcatatttttgattgccacaataaaaattatatatacagttggataagaactataaacaaatggtaaatgaaagactttgtttggccagcagaatagtgagcattattttttaaattgtatgtgtttaaacaatgtaaatcatgtttttaagcaaaagaaatgctaactatattctcctccataaatatttgcctcttatcatcagaaaacctaccaaagttgttcttattgttctttttcagaacttccagaaagtatgtgtcttaagtttgactgtggtgttcagattcaattaggatttgcagctgagttttccaatgtcatgatcatctatacaagtatagtttacaaaccaccggagataataatgtgtgatgcctacgttactgattttccacttgtgagtctcttcttttatttaaaatacagtgatatattctcacttattaaagactaaattttttaaaacttaaagttgatggtaaatataaaggaaatatatatatttatatatgtgtatatatttatagtttagtaacactgatcataatatttactaattgccaaaataccttaagtttatgagatttagaaatgtctaaagttcactcaggaaggatgcctctaatttcttatatcctaaacacgagagccaatgtgaaggaataaaatgtgctataaatatgtcaagaataatttccttttaaacagttataacttatattggaaacagtagtttttaagtcttgttaaggtatggtcatatgctggaataatagaaatctagttctgctcttttcaaacatttaggtttgatagttattttacgttggtctaaagaagccagtaaatagtacccctctttcctacatgagtgtgacaaactgagaagcaagcaaggagtaagacaagcagaaacccaaaatatcactttgattactgatagaggctttgtggaggatattgcttcatgtcagagtaaatggtctagcaccaaaccccagaattgagtggccaccccacacctccagtctcagcagtacggagcccagataggcttcctgaggtactgagcaagctgggggcctgtgggcttctcactggagcagcagaacccttactcttggccattgggttggctctaaaagaagaaaaaggaaaaggctgtttatttatccttcttaaatattctaatcatataaatttccctgcaccttcccaaaagtgatgattaagaggagagaatccaggagtcaaacactaatggggctctctctgcttaagaggaaacttgagtagctcaagaagcatttctaggaatcatttgaaaggaagctctttcagagctcactttactttttagatggcttagtacagaattgagaattcctattataaccatagattgttgttttcattgtttagtcctggataattttgggattaccaaaattcacgagaggccagaattcacgagaggatagtatcagttaagatgtcttatgtactagattatattgtggctttcattgatttcattattaacagtccctaatttttttttttacaggatctagatattgatccaaaagatgcaaataaaggcacacctgaagaaactggcagctacttggtatcaaaggatcttcccaagcattgcctctataccagactcagttcactgcaaaaattaaaggttactaccttttctgtttatagctactaatggaaaactttatgaaactggaaacttattttggcatagaccatagatatgctgccttattattaaagtagagataaccagtctacagaaggtcctatcagtgaccctttttatattctgtttccgatggtgaccagaggactttatgtgtgcttaccctccagaatgctaaaaaattagtaacattagagtatattcttttttctttttttagagacagagtcttaactctgtcacccaggctggagtgcagtggcatgaacatgacctactataacctcaaactcctcagtgcatatgatcctgccacctcagcttcccaagtatctgagtctacaggcacatgccactacacccagctaattttttaaaactttttgtggagaagggatctcactatattgcccaggccaatctcaaactcctggcctcaagaatcctcccttcttggtctcccaaagcactcggagtacaggtgtgagcttccactcccagctccatattctacttttaaatatgttcagattttcaagtaatcatttcctagttctatgactagacatatagcaaattagaattttttttccatttttttatttctagttgacttacaaatgagaagctagttctgcacattgagtgttctaatgaaagcttttaatttgttcacaactacatgaccatagaatgtatcagctaaaactcagggaatggaatgggcatgattgagaattacacacataaacctgttgtcatcctgttcggagctcatctacttaaaatcctttcttctcttaaaaagttagcccattatctgattcagttatattttccacctacgattatggattactataatattttaaaaacagcttaagctttttttataaaactggtataaaaccaggtttttttttttgttttgagatggtgtctctctctgtcgcctaggttggaatgcagtggcgcgatctcagctcactgcaacctccacctcccagactcaagtgattcttgtgcctcagcctcccgagtagccaggactacaggcgcacaccaccatgcccagttaattttttgtatttttagtagagacaggtttcaccacgttggccagactggtcttgaactcctaacttcaagtgatccatctgcgtcatcctcccaaagtgctgggattataggcgtgagccaccacgccgggcccagatcattttttaattaaaagttaataccccatctctaataatagggaagggtaagtttcctaagctgcactgcttggaaaatgttttccctgttcatctagagtgtaagaaagatctctttgactttgactactaacagtagtaagaactagaaattctaaatgggttgtaagtattgcatgaaggaaaaggaagataatgatagctggcgtttctcagtttcagggagatataaaggatgccttgaggatttggaacctgggaaaggagagtgagtggatttttgggggtgggggtgtgtatgtgtgaatattttcagattgatatatattcactgttgatgccaataataaaccagatttttttccttttcaggaacatctagtcttcacagtatgtttatcatatcagtactcaggattggaagatactgtagaggacaagcaggaagtgaatgttgggaaacctctcattgctaaattagacatgcatcgaggtttgggaaggaagacttgctttcaaacttgtcttatgtctaatggtccttaccagagttctgcagccacctcaggaggagcagggcattatcactcattgcaagacccattccatggtgtttaccattcacatcctggtaatccaagtaatgttacaccagcagatagctgtcattgcagccggactccagatgcatttatttcaagtttcgctcaccatgcttcatgtcattttagtagaagtaatgtgccagtagagacaactgatgaaataccatttagtttctctgacaggctcagaatttctgaaaaatgacctccttgtttttgaaagttagcataattttagatgcctgtgaaatagtactgcacttacataaagtgagacattgtgaaaaggcaaatttgtatatgtagagaaagaatagtagtaactgtttcatagcaaacttcaggactttgagatgttgaaattacattatttaattacagacttcctctttctaagattttgtgaattggttgaatagttctatacaaatgaagtatggaggtgtgtatgtttatatgtatataacaaaatattttcattgtgaccactctgaagtaagagcaatgggaatggcattattgtagaataagtcattgtatttttaacaccagaaagaaccttgccgatcaccaggcataacctaattttatccatggaagaaacacagaaaggcatctaagttagagctggcaccagaactgagacctccagaaatctattccagtattttttccactacacaactgccttcctgacaggttctgagataagtgttatgtttgtagatagagtgaaatatatttatatatatataaatatatacagatacatatctgtgtattatctcaaggaatgtacaaactttagtttttgattataaggacttcactgcaagttttagttaagaggtttgtatataaatct

SEQ ID NO: 15678 - DNA, 37782 bp, Homo sapiens
cataatggttcgtaaaaagaaatttttcttaaaagtactttttgtgttttctacttggaagactactcctgtccccttccctaaagaatatcatttatctctaacattaaaatgtacaattctttgttaagagactgctttgctattatcagactctgccctgtccctgccccagagtccagcagagcaggattgagagtagtcctggtctacacatgcggctgaggatgttcactggctccgctgattagggaaaggccatcagtacgcaacctagacagttggctctctcttagggagaagcatcaggctggatcatggaaaaaataaaaaaatacatacataaaatctctgacatggttaatataactggagagttatagcccttttctcctgaagaagcaagggcctcatcaaggagaagaagcaaagaataataatgcttcacatatttttcctgtttatattctcacccacccttagaaggtgagtactgttgcctcattttacagattaggaaactgaggcctagagaggttaaataacttgcttaaggtcacaagattagtaagtggtagagctgggattcaaatccagatgcttctgacttgaatgctcatatcttaagtcatattgacttatggactcaatgtccttgcatctgtcctgtttcttttatagttctggtaatgttgtttttaaccacatatgatgttagaatgcatcctcttcattagtaaagttactttacatttgcttgggaaaatagcttttcatgaaggaaaattacttaccttcttaattttagcgccactcttagttatttcatttctatgccttgtttataatcatgtgactaatggccattttttacattattccacaagtctaaaaacaaatgtctgcctaattatttaggtcattcatagatttatcaaacagtaccatcatctgagtaatcttagctgtttttaccagtttcctatactgcctttaatattactaccattagtatcattgtggagactgttcagcattgaccaggacagcttgcttgcttgctttctatcagttgtcagtaaataattgaacgtccgtgaagtaaagagtaaaagaactaacttgttaattgataaaattacaaagcacttttattactccaaattacagatcttaaactacaagatctataaaataaataccactttggaaatacgtacaaagagtttgcatcattctttgggtaaatacattcttccccccttcctctcattttcaattgtaggtactcgaccaccactgataaaaaatttacctaagcccattgagagcctgatgactcgttgttggtctaaagatccttcccagcgcccttcaatggaggaaattgtgaaaataatgactcacttgatgcgggtataatccttcttttgaggggctttggatttaggggaatttaatatgtgctgagttttaatggaattttaaaagggatgttattactatattctgctttatatattgctatgttttctaagtgagaatgggcatttattactcatagtcagaagaggaaacatttcgagagggaaaatctagttctttatcactggaaagatggctagactaggtttctagacttgcttttttctttttgcttacattagtggacaagtatgtttgtctctgggcctgttgcctcatttgtaatgtgggagaaactgaaatagatagtctctaaagccatcacaggacttggatatattaatattatgacttcaatacatgataaactaaattttacatttttctgataccaattttcatcaagcatttagtcatttatgcaaggcaataggttgcattctcagacacatttatttgagtgacttttactatttggcctattttcaggtttttatatcccagtaaaaagttaaactttcttctatttagaagaacccttttaaatgattatcaaattttcctagtctgtgaatcaagcgcctttagaattatttggaatattttacgcctctggtttttggtacattaacaaaaactgtgaagtggtatcttggctttaaaaagttcaaatatctatgaaagtgcctgaattttgaaacagtttgttcagtagaagaatcttacaatctccttaaatatagactaagtaatttcctaaatggtaaaacgttgtttattcaatctattgaaaatttcttacgcaaagcagcttgaactaatctactaaaagtttaccatcgtatttggataccagtcatatatagaagcctaggccttaaaggtgtgtgcataagaaaacaacttagtctctgtagtcagattacttaaaactttaggatatataagttattgcagttgtaattttgcttctctgttccttgtctaatttgaggagaatacgtttcctttttttctctaaattctaacatttttgtccagcagatactttgagtattatgcctccagtttgtagaaagacattcataatctatcctcttaatatttaaaatgttctaacaattattctatggtatactagtctcagtcttcagactaacagtcactggaagtttacatcactactgtaagaacatgagtatgttttacataattatgagaaatgatactattttatttcatatgtttctctagagaaatatttgctgttttcttcaagactatctagactccaatgtaagctagattcttaggtaggtgcatggcattgatcaaagttgaaatccaagagtacattattgtaatctttgtaaaataaaaaacttaggcacctacaaatttagtatataacttagggaaaataaaacattaatcaggatttaatttgtattaaggaaattttaagctgtggtttacttttttatatatagtactttccaggagcagatgagccattacagtatccttgtcagtattcagatgaaggacagagcaactctgccaccagtacaggtaaatggatagattggaagagtattgacttgatttttctttcatctctattcccatgaaattataatcaagaagtaatgaataatgtccccatttgcattttaattccttcatttcatatgattgactgcaatttgagtttacaggtgcgtcattcttcatgtaggtaccctgattaaagagttattgaagacctgcttccaagtcttagaattcctacataattatgaataaaaagatggcatattgtattacagtgaatgtcattcttaacttgaaaaatcacttttacatgcatactactagatcaagtagtattagaaattattgtaaatgtatttaaacatttcttcatcacgaacaccctagtttttgttctcttctacagaggctctgatttaagaagctatgttaaaagttccttagttttccgaaatgtgaagtagtagtgggacatgtaatttgtggtcatcaaaaagatagtagaaataatactgtaacttagaaatattgtacttctcaaaatatagtggcattataagcatttcattattaattgaaacttaaagatatgtgtgtgtctatatgcacatgtatttaccctgcatttattgaaaaatacttttactgatctatttctcccacctcaagaatagttttatttattttaagatggttactgcttggctagttattctcaaattccagttttactgaaaatattttgagttgctctgaattctaaaatgtacttctctaaaattctatcatttgtgtctcccacgtcctctaaactctctcttcatttccttactgtgaccttgaattttttgagcctcccaccttttcactggtcctcagtcctcttaggtccttttttctttctccctccacttaattccaatcaactattataattcttttgggaataattttcatctttctagcctctctctcaagcttgcttggctaaaccacaagcctaatgaaagctgacactcggcttactccttgcctgtaccaatgcagctgagtgtggctggagatagcacaggtttactatcctcacgtgcatgtttagtgctattggacagttgtactgtattgtagttcatctctttcctcctatatgtcttaattttatactgtagcctctcctcagacttcaaacacctcctcgccactcctcactctcagctgatcttgtttgctctttctctgagaaaattggagtaatcggaagacagcttccacaacatctgtgcccatctactctgctttcttctgttactctggctaaactatccatacttctggccaaaggtgtacctttctgcctgtgcattatatcccatctgctcctctgagcaattctcccctgtctcttgcatcatcagttttagctttctactggatcattcctaaaacatacgtagtctgtatttgcattcactagcttctcttttccccttctttcttgagctgactccattcagacgtattatgccagtacttcagaattgttcttgtcaaggtcactagttatctctacatcactacatttaaggaatcattttcatttctcatcttgactctcagtagcacttgacctaattcattactttctccttcttacagacagcactttcttcagttggcctccgagataccatactagcctagattccatcttacatctctggccgtctgttctcagttttctttgctggttattcctcatctccccaacctagaaatgttggagtgcccagggcctgctcatttggcttcttcacttatctgtctgcactcatttccttggtaacctcattcattattatggccttatataccatctgttggctcataatgttttccatcttatacctgaactctatactcatatatccaactatttcctttacatctactagaaactcaaacttaatattttccaaactgagttcctgatacttccttcaaactcactcttcctttagtctttccgcatctcaattaatagccctcagttcttctactagctcaggttaaaaaccttaagttattcttgactattagaagactatttaggcatcttggttccttttttgtgctatccttaagtttctcttaaaatgggtttgtttggatatcttcattagcttgaaaagtcttattttatttctgttcctgcctggctagtttataaaagaatgtaagttacataataccaagtgaagcatttgtattatttccagccattagtcataaatgtttctgcttttcctaggctcattcatggacattgcttctacaaatacgagtaacaaaagtgacactaatatggagcaagttcctgccacaaatgatactattaagcgcttagaatcaaaattgttgaaaaatcaggcaaagcaacaggtttgttatgttattacaagtaaaactggtaaccttaccagtagtcacaatattatactaactgaaattaattatttaccatcttctattttataaatcctgaattttcttcctgaaacatgcaaaagagcttacaaatagagacacgtaatgagattctcctaccatttattaccaaatggtttttccttctaatgattgctacctttgccaattctaaatccctatctataataatccctaaatgtaatggttgatggttaaaaatgtaaaatgggtatattttggctgcgctgcccagttagaggagttgttctaagtctatcatttcatgctgttcagatttattatatttttgccattgttgatttttaaaaatatttcaaggagtgagtttattcattttgcctgaggcatttaggttaacgaataattggggcttttagctcccagttctagtgactgccttttcataaagacagtatctgcagcttgctttcccttacccctgtagctccctctcgtacaaacttccctctcctttcagagcagaacaggatctatcagaatcccatttgccatcttcctccttttaggttgcctaagattgctaaatctaaagaacttcagtaattcagattgacctgtaattttaacagagtgaatctggacgtttaagcttgggagcctcccgtgggagcagtgtggagagcttgcccccaacctctgagggcaagaggatgagtgctgacatgtctgaaatagaagctaggatcgccgcaaccacaggtaaaaaggaactacaagtctgaagagtgaaaatgtatataagcctttttggccatggtagtttcagttgtcaaaggttttttgtgtgtgtcttatatttttttttaaataggaagtaggtttacaatatatttttctaagttactagcaatagtttatgcatttatctcaaattccaaataaggaaggtatgacttgtaaaattatttggatgagaaagtatgccttcctcatttacagattttatcaaatgtaattctttctgctcaaacatgagttgaaagtctaagtgagaaattgaaattctgccaaaaccagaatattttggggattttcagtgatactactagatttttgtgctgaactcaaataatagcaaatattttgtttcaaatttaacagaaaaatgtattccagatccatgtatgatttgaccttctatctgcttcttcattccagtgacaaaataatagctaagctggttgtggttaatttttttaattgtaaaataaaatatcataattttattagatcttgaaaaagctagcatttaaattccattgttcagttcttaaaattattaatcatggaagaactggtcagcacaaaaacaattacatgttttgttacttaagtaaactgacaacctaattctgtgaccaggtttcattttagtaatgctggtttaatttggacgtttttggttttttgctgattctttccagggatcagggggagctgattttaaaagtaaacacgtttctgttgtggaaaatgtggaaatgtaaacaagccaaaaaaacttacataattaccccactcagagataaacacttaacatttttgtgtatttaccccatcttttaactatgtatgtgtataaatgtatatattcatgtgtatttgcatcttttttaacttagctaaccaattttttaggtctttttttcacttatttggtttttttctaaatagaatattctcattgtgtgtggagctcttttcagaaagaagttgtcaagatggaccatcatactatacttgtcttcaactaatcatgatcattgattttatcagctactattagaatccattagatataacagaatatccgaaataacagtgtctataacacataagcattatttttcacatataaacaagtctggaggtagtgggctctgtgatcttgaagtaactggtctcctatttctgtgctgtaatccctactgtatagcttccattctcaaagttatcctgtgctccaaaatggctgttgaagttccatttcatcacttctacattccaggcaataggaaggaagacatgggggcagggcaaatagacatccaagttctttgaaggaacattcccagatgcctctcttaacaacatccacacatcattggtcaaagtaacatggtcgaatggctacacgtagctccaagggaagaggagatctgccctcttttatctgatgacttttctgtcctaaataaaatcagagtactattgctaaaacagaagggaagagtggaaactggcagaagatagctgtgtctgccacagatgggtcttcagaaactatcaagttgagtagaagtcaccagccactgacaagcccatgagtctccatgagtcacaagtatttctttggagcagggttgtctcactgtagtgtcagatgaaccctactcaccgggacataccctcatgctttgaggaacccttttcacttcagggatgttgttcaggatagatctgccacatactaattgctgtctcaaaactgaaaattgttataataatggtttcatgtcttcgctagtatcatatttctagtcaagcactggttttttattattatttacagaaatgactttgctagaaggataaccacacacattaaaattttgcctaagtgtagaacaaatgctattgtacatcccttgagttttacacaatttaaattttttcatgaattgtcttacttggaaagagtcatactttccagccttttgacagactttgtgtttactgtgaatgtaccctaaactttggaaaatataataaatatttggtactagaaatatgtataagtatgactacaaaagcatatacatttcacactttgattcaataattattatttaatcattggattttactttatagcacacttcaagaaacacctaacttgaacatgtattcctgtgtttgtgtaattaaaacaaatacgacaacttactttttaacgcctttcttcctctcctccttcgttcccccacccccatcacagatcagtgatttcacttaggtagactgtttctatgaatatatttgaaattttgcttcctcattaccctgcagctttgtctctgttctttttatttttttctgctaattaaaaccagtgtgtaaaacatcttgtatttggtagttgtttgctctttaatctcgccttttctgagcatggatgaaaagttaggtagttctgcatgccattctgcatgaaatgttattaacatgaactatttgaaaatgagtctatttttgtagttaatcattttccgtgttactgtttgtggttgtttgcatgtatactgtatatatgtgtttttgcagcctattccaagcctaaacggggccaccgtaaaactgcttcatttggcaacattctggatgtccctgagatcgtcatatcaggtatcatagaccacctgagttggtctaatagctgtggaaccggaataatgatccctggtacttgtaaaatgcttcttgctccaatttttacaagacatgaaaatggataccttgcatgcagtaattagggagacagattgaaaaactacatttattctgaagcagtcttgaaaagatacctctgatctacaataagtgaggataaaatagaagagaaagtaaacctttttggagaagggagaacaccaacccagaattctaccaacttcctctctacttttaagtgagcacatgagctaaacccagaccttttttgcacccaacagaaagaggaaacaactaattaaaatttgttattttccttggctcctttccttcctcagttactgctttttgggtcccctctagactttctgtcctaacctctttctgttggtagcaagtgaatgtgaagttgagagaagagagttgctaaatagcattttgccttaacctggaaaacaaaaagtaaagctaaatgagatgtgctgttttgcagggtatcttgccaaagaatcatgtaaaatagttggtcaattctgatttttgtgtattatcaggagaatctcataaattacatgtttttatacctaacttacacatggtactttagtgtctaaaattggtaaactgctttatttcttatggtgatcatttcatagaggaatatgttaccatttttaatagaaacttaaatggcatattgaccttcagtattgattaatgtattatcaaaattatcatttatttatccctttaggcttttctctacctctttacccaaaatcttgataaggaaatacatattttccacacacgttcatgagtgcgagttggatgaattcttcagcatgctgtcctttgcctgtgattgtgtttttagcagtgttgataattctagttgaatacctaatggttattttctcctctactaaactgaaaactatgtaaggatagaatccatatctttgtgcattattttgttgttgttgcttattattgattgtatcagcagttgctggctcagtgcttcacatattaagcatattaacatagtgtttaataaatacatttattaaataaatgaacagacctattgagcatctcccctggtgagaaactagcatacaaaaatatgaattatactattcttaggtgccattttgtctgtataaaactatcttatattaattttcccctggttatcaaagtggtttcttattttacaacatcattactattgctattcaaagagtagagttaacccatttttcacatggtaatttttatttattgaatctggactgcttcagaaattaacaaagagatcattttacatggagatcagtttacctccatgcggaaaggtactgtgtataagggacgtactttaaagaggtggaagcatttaaacttacataccgctgaactgtgcttcccttaaatgtttgagggaatcaggaaaatttagacagatggcagtgtaatcttatgactaagcattaagaataaatttatatatggcagcgtagcccacgctatacaagataatgggggagggaaaaataaggaaagaataatagtttataactgtcaggtactactggcatctagtgggcagagaccagggatgctgctaaacatcctgatgtgtaccaggcagtcttctccaacaaagaatgatccagcccaaaatggcagcagtgctgaggctgaaaacccctgattagatgttctttgtgccctacaaagtagcttaaagtacatcttattttacctttatacaatcttacaactaggttatcggatgaaattatagctgtttaacagacgaagaacttagatctgatgatgtttagtggtttttccagaatcatatagccaggaccccaacccagatcttctgactccaagtcacatccattttttgttcttttgtttaagtcagagaagctagagtaatttcttcttgctttctcttagtgttcacattaaggagagctcttcagccagggagatcctcttttatgacattgggcctttatggaatcaggtaaccttaattctcttaattgccagagcagcagtgctattcatatgaaaatattattcagtaataccttttattaaatattctttttaggcttttcccccctcagatatcaaacattaacttactcaggtgcactttctttaatagaagaatacaagctgtagaattgacactagtggacataaaagccaatcatgaatgtgctcataggtaatgtttttaaattaaatataaaaataccgcccatcctttgggaatatctcaaatttcctacatgacattttaattgtaaagaagggtgatacttaatttccaaaatttcttaatactttctagaaattgttttgttctaagtggatttcccacaagctttatggtattagcaaatacttcttgatatattcaaactgtttaattagcattaaaacccaattgcaaggattctttttaaatatagctttttaaagatcttatttacatggataagagtttcgttaatacttccctttggccaagtgcaatgtactgagtctaatgtacttcttggaatgaactacctctcttaataagagcaatccttcaagcatcacaaaaaaggttttgtatatatatctttaaagtcactaaaatgtctaacctagtcataggtaaagaaatgcaaagaccctaatcttgtaatcttgttttttgctcgctcttcaaaatgtgtatactatgccatcagtcaaatgtggaagaaaaagcaacttagcaaaacagcactatttatcaatttagtagtctctcagatcatacagaaattaacctttaataccttaggactccctgtgggtcagactgtacaattttttatacctcttctaccatattactggctctgaagaactgacaaacttttgtacggtaacccttccttctttccactgtccatctgcccttaaaagagtgagctttatagattagcctggctcctttttaccaaggaagacacgcagctaagagcaaattaccagtagagtgtgtgacattttgctgactcttcctttgtagagaaggtcctgccaagtagcagtgtgctacctaagcaaagtaaatgtaaatgtggaagtttcttgcccagtatttagaccatatgaactacagttttctaatgcatttgcttgctggtaagttggaagggacttcgagaaaagaaatagattttcttaaatgttttttattaaaacttgagttttaaaaaccatatcctttctcctttcagccagtacatctaatttgttacatttatatttgaagaaaagggaataggtagcagattattggattctttgaagtttttctagattttttttgttctaggactttaataagggcagtaagaacacagatcattgttttgcatggattttctttactttttcccatattttctttttgtcactatctaagcttccaagaatctatttttcacccaccttcatctcaagtacacaaatgaaatagattattgggattgtgaaactatgtaagacattctaatgcagttcatctgatgttagaagaatacctaaattttacatttcttttaaaaatccaaatgtcaaagaggaacaggtagaatgcctaaatattacaaaaaaagaggaacaacctttttcagtttaacatgtagagtaagagaataagtagttaagaaagcgaattatttttcatgcttgtagcatcagtaatggaagatgggttgttctgctctggagcctttgtgtgagtagttatagcatttaaggaaataaactgtaattataatgcattctaaaatctactggaaaaaaatactgtcatatacatatatacttaccacctataaaagatttaattaaacattagtcttctgcacttctactctgatataaaatttgttgtacatggttcataccggcttgattgcttttataaagtgaaatgagtttcccaaatgtgatatgcaaaagtaaaattttctaaattacagacatttttaatgctattatatcatcatagataaatttatttcttagttcagattagattataatgcttgatttcaagtacttgaaaaccatccattctatagatgaacattgccttgaagtgcttcaatttgagaaccttgaacagtgttgctttagtgtaccttttgttatttctaagcctaaaataatatggcataacattcgagagcaataaaatgccttgaccaaagaggattttctgtcttacatactgttcttaaggatatgcaaaagaagattgaatatacaaatgtttttgagtcagatcttactgaaatagataagatttttgcctagtttcctgaagaacctgaacttaattgatatttattgtttgttatatcattcttaaagctaaaaagaaaccttaggtgtccttatgatttcagccgcatttagatctcttaactgaataaaaaacgcgtattcgcttttaatttcagtcaaggacgtttagctctattgtatattggttttttactaacagtatgataagtagtaaattggagtaagtagaatgtagagaggcccaaacattttaactgaaaaatagatgagtagttaggcttctaatacttgtatcttgttgccctccttcagaagtttcaaatgtcaggtattggcaaataaattatctaggtggggagggctttatagaatgcttaaacaactggaagcagagatgcttttcaaggacacctgagcactattttgctttctccaccaggatgaaaatatcacttttttaatagtatatttggttcaagagccggtcggtaactaatgtttgtaaacctttctttaactggaagcatgtaagttattaaatatttcctccagactactgcagcaccaatatgaagaggcaaagagagaaagaattgagtttttctagatctggcaagttctcacctagcacagatagtgtcattagcagatgtaagcctttgatagggatcctagggctaaggggtgctatactaagatgtactgtactagtttctgtgtatagccacctcactttcaataaaattctctatttgtggcatattaaatagggaagttaatctaactttataatgaatatttaggtggcctttctgccatattgtatagtctaccaagatcactttttgtaatctaaaaaattcaactctaagctaataaagctggtttattggaaagcaaataaaccacctgacggacctttccagtgaaagagccagaatttgttaaaattagtaaagaaatacgaaactttggcagcctaaattagaacatatattttaaaattacatgttcagtttaccatgaagcagtaatgtaatgctagtgtatcatgctatgcatttttttaaatcttgggtattttacacatgaagagaatggtgtcccataatgtgtaatattcaaaactcgtgaatctcaaaatttctaacatttaggttaagagaagtctccaggaaaatgtagtgttgattcttacatgaagacagtcttcaggaagttttaaagtagaaaataagagtagtgtaagtcaaggaaaactatgagcttaactgataagaaaaattacaggagtggctgtctgggacctaagccagcagtctctggaagaaacccgggataacttttaaataccagctcaggaaatcagttgtacttaaaagagcagcttttttgaagaggggctctgttttaatgacattactgtaaaaagaatggaactgacccctaagttgctttctatttgcggtgggcaggagtgcagatttagtatgcactggcaatgtgatgtattcttagaagtcattctaaaaagtggaatttgttctctattataagacatgaacgttccagaattcattacagaatgaaatactcaggatagcatatgcaggtttcagattccttgatcaggcatctgtttacatcatgctgtcctcatttctactactttttccatttacactaccatgtataatataggtatgtacatatcaaaggaccaaaaaaggtaaaatgagtgaatgtctaaattagtattcagttgcaaaaaacttcagaatcaattcaaatttactgagaacacacccagtaattttcatttgaagtaataggaggttgatttttcttacattcatatttctaaattatgacttaaaatttaatattggagcaacaagtatttgttgattgcaatcctgttttgctttgtctgaactatctgccagatggtttctgccatggttgtgctaattaaaatgcattgcctaatactgcttgctttgattcatgcagtagcttaaagatttctcattttatggcatttgttaactgtcagctcttctttaccttacttccttaaaaggttttacttcccttttctcctatccttccacctaaatttaagttcagtttttgttgttattgcaatggtgatgtaatggtttatagacacatgtgtcgggtggttcctcagattaacaaatgttgctgtgttgctaatctgaaaagagaattccagacacttttacaagcctgtctcatcaccgctaattttagaatgaatgtgttgaatgaaatgtgcctaaaattgcttattagtcacggttgtggggatcctttttgtccttgggaaacaggggtagttgaaagtattcagaaaagtaatctagtggatctaattcaataaatgcacagttttgttgttttagtttgtaatgaaaagttgaaatttttggaataaaatgaaatttgaagtaaatgtgaattcagataatgcaaagaattataaaacgtagcttaaaatggaaaaaaactgatgatgtcttacatttgcaagaggagttacaaatttgagtttttatattcactacacatattattctattaaacattcttattccattgtaaggtccttttagtttatctgcagcataataatggggtcatgtgggttaaggtgctaaattatattgctgattggttttaaaaggatgtctctacgaaagattctggaagtctaaaattttaagaatgaattctgtctactaatcgggaaactacaattagagtgagtacatgttctaagtgttgcccactagttgagaaattacgtaatacagatttcagagtcaaaagaattttgagtattgtatcagctgttactcagtattttggtgtttccttttagacagctgatctctcacgttagaagatactgcataaacagctttattcccaaataaaagtgctgagtgaagccattgctcaattcattgttttgctgaggacttatatgtgtagaattctctcataaattgatttttaattaaattaattataaacatagaagtttctaaagcagaattaacacaatagcccatttcaacaagctgtatatttgagaacagagtgacagttattaacatccagtaggaaattaagagttgttgttcacaaataataaattactagattctgacaaagactaatggggattaagtaagcgtgactcaatataacaaatttaagcctaagcatcttctaggccctgaaatgaacaaggtattgctgccagttaaagtcagttgtgtcttacaacctgctagctgtcttgctgtaaaaactgtaacgtaaggcccttgaaatagatgccgtcatcagccccagcccccaagcattcatctatttaaacacatgacagaagatggtggaagagagttcagcagctattcatgtggtagaagtggttattgtattaggacatactctgttgtaggccagcaacttttgagttaaaacaccgcagctgtttctcttcctttctttacatctttctcttcttttttttttttcttagcaataaactcacttttttttccccacaaacattttgtgtagatccaaggagcaacaaattccaactttctgctgtagcaattacacgctttttgtctgtttgactagattttagtattttactttttttcttctttttaaaggcaacggacagccaagacgtagatccatccaagacttgactgtaactggaacagaacctggtcaggtaagacaacattcaaattttctatctttgaagaatactaggcagaaaacaagaattaactgtattctactctgcaaaattagttttatgagttgacctaaagttgtgatagagaaattcattgcacctgaacttaaatacttaggggggaaaaaaacataggtgccattgttaatttaacttgaaagataatttattaaagtaggtttattaaactccatggaaaagtaaattgttcattagcgctgtatatatgttatatggttttatgtatgttttaataagtattcaattttataatttaacaatttatcattaaagtgtcctttaaagtgaatcattaatatgtctcctttttactaataagggtagtaaacatttccccaataagttgctactcctctagcgccacgtagggcattacatggagaactctaacgtcttttaacttggcatatccactggattaatatttttttcaaatatccttaagataacatttactaagcaaatgtgtaaactctcgaaaggcttctattccagtggttaagatttcattgtttatatttctggatcctcctctaaactctccttgtctctttatcactgctgctttgcagatgatgcagacagtgttataatttaagccattactgattagtgcagagttttaacccaccaggtatataaaagtagctcagtcattgttttttctgtgttactcagattaatacacttgacatatataatttattatatactatattctgtaaaatgaatgaagattaattataaggtgtttgttttcagctgtacaagaataagttttatgagagcagcataaaagtaatgaaattaagtaatgaaattgttacatattaagaagtattaagtattaaattattaagtattaagtaatgaaattattacatcgtgacccatatttttgtaaaattttagcgtttatatattataaacaatctgttgtaatttatgataatatgtattagtacttgtcatcctaaaaaggtattttattattatatcatttgtataatatacttaaaatttgggagatcctttgtagtcattaataaaaaagtcttttatacccatcaaccaacttaccaaaaaccacttcaaatatttaagtggtgaatatccttgatcttcatttatatctggaaatatgtttatttcacaaaatgcttataaacacatatataaataaaatctatatagacacattaatttattatgttttgtgatactagtgactctaaatcttgatttcattatttagtgatagtttttttcagtgcatctgtttttgtaagaccccagaacttttggctgaagtttcccgttttctccccctcagatacttaaaagttttaatcagcccatttagtaacagatagtttgacatctgctatttgctttgattctttggaggtttgatgagctcagccttttaaactctgtttactattgccactgatattccagttatgagaacttctagccaactgtttgactaggaatgagaagcttgtcctaagacatgtcaggagcagctactagtttgaaagcttttctgtagactctagaataaaagtgttgccataattcaggactgatcttcccacaccaagtcttacttatttcttcacaagttccacattatttgagattttcgttgttacccttttaattcacaataccttcaggtagtaaaacgctggaactgaggccaactatgggtgtgggacagtcatttgtggaattgtcatagaccactctgaaagatttggggtgagggagagtttgatatgggtgagggagagtttgatatggcagtaaaacctgttctgaaacaggtgatgtatgaccattgtgtagccacattttaaaactgatccactctttcaaaattatttgtgttatagccttaaaatgcctaatgttcagcttggcatgagagtggcaaatactaatcctaatgtactatgaaaacatttctcccaaaaaatgtatgataagtgaccattaaatcttttaaattactcacaaagatgatattcatttgaggaagaaaagtattcacaatatgtgttttcaaaattggaaggtgccatcctttttgaagtctggctaagcgtgattccatcttgcagaggaaagtaaacttattgtactgtggctcttgactcaaaacataatcttagtaaaaccacttagaatttccatctgtaaactaaaattaaattggttgtttttctgctgccatccatttgagaggaacagtaaatgaagcaagcttcttaattaaaagtaatgatataagtataggtgtaaaagattgcattcttacaacatacaactcactttcaaacatggttttttcattaattcaggaagctttttaaacactcaatagatgtgacttcctagaagctttgaaaagatactgagaaagaaaaaagcagtccctgacatccaggaactggtttgacactgtggcctcactgttgttagtagctagccttattctcaacggctggctgtcacagctagagcatgttactgtcttattggacataatctctcagaacaccaatatcagacaagataatgctgagaccgtgataaaaggagacaaaacaagactacttcggaatgttttctaagcacagacaaaaacaaggtcactgtgccacccacaaaatacctaacattgtcctctcccagctattaagagtgactgctgcttctttaccaattacagcttggtcctcactctggactgccctccctgtggaattgcccttgctttctgacagcggccaatctggaacgaacccctccttcctttgagtttccccaaaatcactcaaccaaagcctaaatcctataatactttctttttctaaaaccctcttactgagacaccccatgctgccccatggtaagcattctccttcactgcaataaatattaaacccaactctttccactattggtgtgttcctggcagtctttggctagagggctttgacaataccaataaagcctattccgcaaggacctcatttggagagatcagacttatgcccaaatcaattagaaaactaaagtaataacagcttccatttgttgtgcactgactttgtgccagataggctcttagtatacattatcagaatgttaatcctgttatcaggatcttagtcctgtgaagttggtactttttcacctaatttgcagccaggtaaagtgaggatgagagaaactgacctaagtctcttacttccttatactgccagtaattcctataaccaggttttgaatccagacctgattgcaaagcacacaaactctatactttaatcattctaacttgcatgtgaaactagatgtgatgcatgctgttatagccctagatctcttacatttaggtattttggcttctaatagtctgcattgtcattaattatttaaacagttgttaagtgatgatgaattgtagctgtatcatatcattgaacaaggttaacctatcttgataataaatttctaccaatgactgcacaaatttatgttttatacacctgggtgagccattctgtgtttcactaaaacaatatacattcttataaatgcctgaataccccttctggaattgtattcagtatagatctatattcaagaattctcttagaggaggctgcagtcagtgaaaattacgactgcaagatgatacagttatgattatttagagaagtgggcatattacatttccatatggactttataatctacttttactagtcaaatatgtgactttgggcaagttccttaatttccctgagcttctgcacccttatctgcaaatagggaccataacacccacctcccagagttcttaacagatgtgaaagtgccagggcacacagtagatactaatccatgttgtatgccagcctctccacagtgtgcctcaccgggctcttgatatcacttccttgctctcatgatagtgagaaataaaaagaaaatagcacttggaaagaagtaaaatccaccagcgttctttctgtatcataaggaaaccttgtgtcaaggatcatggaaagtatttgctttaaaggtctcttatcgcatattgagtgatattaatatacattgttattatttatttaagggatgtgatttattatactacttttttccatcttcattctgcacctccttttgtgtaaacaaatgttctggtaaactctaaatcagaaacttatgtaatagttttgaataattccttcttcatagtatacctttctattggagaatagacacgtttcttcttttttttttttttttccgagacacagtccccgctgtcagccaggctggagtgcagtagtgtgatctccgctcattgcaacctctgcctcctgagttcaagtgattcttccacctcagcctcccgagtagctgggattacaggcatgtgccaccacacctggctaatttttgttttatttttagtggaggcagggtttcaccctgttgcccaggctggtctcgaacttctggcctcaagcgatctgcccgcctcagcctcccaaagtgctaggattacagtcgtgagccactatgcctggcctctgttggagaacagacacctttctattgtagaagaccatgtaagaataataaaattctgaaatttccttatgaaaaactgtagtgaagccaaaatagatcaagcctacagacctttagattagaaagaatattttcagtacaaccttcatgtatagatttaattatctgtaactaccataataagtacccatgtaaatccacattaccaacttatacccattttaaaaatatttatattattgagatgttactttagcaagaatatcatagaagtcatcatttaatctctgtgttttgtgcttgtataattttagctactaagatttctgagggtattaaatagcttttaaatgtcagtctaaataataacactgggtgtaaattcctgacttatgaaaatattttcccagtctttcaggtaagatattaaaagctgagctttatttttgtctgtaaaataacttccaattcctttttataaatatagggataaatttctggtcaaaggccaattctggttcatgtctactgatggtaatctgcccctgaggtttaaatttggcttagtattcttttgctgccttaaattgctgtgtcacgtttctatactcttgtgactttcatatccagttcttttggtaagtcaagtttgcctatatctcttaaactttgcaattaatgtggggatagaataagtaattttaaatgtcttagaggaaggagcaacttaaatgagttttaatagtttgagagcatttgtgaccctcagaattttaccagtgattttaaaaaataagtactgtaaaaacttcttcagtagttggttacaagcagtaacataaattcagccacaaactagtttgagttttttcattgattgtcagatgttatgtgttcctcttatttatgccttgtattattcacatactcaaaaactacagttatgccttgtttttaaatatttccttagtttttttatacaaacatattagcatatttttatttattgagatacacatttcttaaaatataaagatttatttattagttaatggatttaaatctaactgtgctggtctaaaaacagttttgaaacttgcattaaaagtgcaagccttatatttcttagtttcatagctgttggaaattacaagtgggacaaacaagcatgcacagaaggtgctaagagtttcttggaaagtagaaggtgaaaagaaaggtgtagcaaagaatcattttgcaaaagatttaagcttaaggagtactataaaattcctattaggtccaacttatttgttttaatattgcagatgttcagtgacctcttttttaaatatactaaatccattctcattttaaaaacctaattattacttctactgtattttgttgatttctcacaactgatactgattcttacatgtcacaaacatgtgtttctctttttaaaatgtgcattagcattacactgactctgaaaccctggtctgccaccactttgaaggaaaaatgcctttgatttataatagcagttataactatgggcatatttgtgtacttgctttcagtcaaagaaagttaaaaagactcaggaataatttcataatgtctatacttgctttgtcaagggtaaaagtatcctaaaagtaagagtgaaacatttcatcactggttttctttggtgtatgtcgttgttattcttatatactaaaggtaaataagcttaagcaccaatcttgtatctgagtgctaatagcttgtgttctcattttattcaatgagtatctattatgtgtttattatatattcagcaatttcccagatcctgggaagtacaatataaaaagtacgcatggtctctgcccttaagaggttataatacttttgaagaggagtaaaactttgagactactataatttcgggcacaagttgaagtaggaactgactatacagccaaaattcaaagaagaaaaaaatctcgtgtgaagacatttcatgtacatcatttcatttaatttttataaccttatagatagataatactgtccttattttcctattgagtcttagaggttaaataagttacccaaagctgtactagttagaaatggcagagcacagtcaaactctgggctgtcttgtctccaacacccaacttcttactgctactactttttctcattcacacttcatcaatgagaaacctaagtctcagagaggctaagttacttacacaggttcacacagctgtaagtggcagaatggagacataaccccaggtctccaaagtattagactgaaacatgtgaagttgctgagttttcaactacaaaaacaccagttttatctggttcagttttatgcatgccctgtgcactacgccgtattatctttaggtgaatatgaggtcaggattaaaaactgcaagggaaacaggggcatgaggaattttaagaggagagaaaatccagatgggcaaggtaaacctgctgatggagagtcatgaatgccagagtgagaatttcagaattgattcagtaacaatcagtaaacgaacattttgcctgcagtacactgttaggcactccatgtcctcaaacacaaggtctggccttgtacacaaacaaccagagaagtggcaagaatcaccacataatgtagaagaaaacctgagctgggccttacagggtggggaaggattaacaaggagaagaaaagaacagaatgagcaatcttatatggagttaaaaattggttatggtgtagaaaagctttttggaatttctgaagcaatttcagtgggtacccaaaatgaaagtcatatttcatcagtttttcttcaaagttaatttatgatttttttctctgaaattgttaggaaagtacctttcactaaaagtataattagattgtttgtaacacaaaggataaatgcttgagggaatgggtaccccatttttcatgatgtgattattatgcattgcatgcctgtgtcaaaacatctcatgtgccccataaatatgtacctactatgtacacacaaaaattaaaaattatttttaaaaaaacagaaatgagaggaaaacaaagtacctgtcactgtttattatcctgaatccattgtggcttttcaagacctaaaatcatataattttagcactatatggaacacttctcatcacattcttaacccagccccaacccctctccagataaagagaggttgaagtgatctgaagcagacattacagcataattagaactcacatacgatggattctactcaaaggtacttttgtattgcatttcattttacttgttgcagtcttgaatttgagtgtttgtatatatgttgaagctagatataagattcttcatgaatttattttaagttttattttctataactccatgttcttttttaagtctcttctttggtactcagtaacacatcaagaaaaaaaaggtgctttttaaaaagtccttatgaggccgggcgcggtggctcacgcctgtaatcccagcactttgggaggccgaggcgggcggatcacgaggtcaggagatcgagaccattctggctaacacggtgaaaccccgtctctactaaaaatacaaaaaattagccgggcgtggtagcgggcgcctgtagtcccagctactcgggaggctgaggcaggagaatggcgtgaacccgggaggcggagcttgcagtgagccgagatcgcgccactgcactccagcctgggcgacagagcgagactccgtctcaaaaaaaaaaaaaaaaaaaaaaaaaaaaaagtccttatgaaacccattttagtttctgtgtcctttgaaaggctttaatatatgaaatataaatatgtagacaagaatgtatataatgtataagttatgaaaataaaatgagcacttgtgaacccaccacccagcttaaggaatggaacattagcaatcccagtgggggttggtccctgtgtgttcctcgcctgtggccttccctgtcatttccccaccaaccctcagtgccatgttctgtcatatgtcatgtttccagatatcataaataccttttatctgattaagaagtcctcttcccactgggcacaggggctcacacctataatcccagcacgttaggaggctgaggcaggaggatcgcttgagcccaggagttcaagaccagcctgcacaacacgggcgagaccccgtctctacacaaattttttttaaaattagccatgcatggtgccgtgagcatgtggttccagctactgaggaggctgaggtgggaggattacttgagcccaggaggtcaaagctgcagtgagctgtgttggtgccattgcacaccagcctgggcaagagaacaagaccctgtctcaaaaaaaaaagaaagaaagaaaaagaaattctcttctcatacatggaatttaagtttgttaaatgtcttttttataagtagatgttaaatgttgtcaaatgctttttctgcatctgttgaggttttgtcctttaatctgttgatgtgattaattttattaatggaatttcctaatgtcagatgagtgacctttgcagtcatttgcaaagttggataaactaaactttttaaatggtttttattgcttctacactgccacattatatttgctaatataatttttagaaattttgacttttgtgtctttttatttttattttatttttttggaagtgaggttcagttgtaactttctttctcacactgtccttacatattgatttttactgccttcacagaatgggtcagaaagtttcttctttctttgtttaggataatttaagattggaaaaatccttatcttgaatgtttgatagaacttacctgtaaaaccctcctctgtgcttggtattttctataatgtataggaatttttgaaacttttttttaaagaatgtgttcatttttatagtattgtctccgatttcaaaatactatcttttactatttttcattttgggaggcaaattcttttttttaactaagttagatctctagcttataaattgtcagtgtttctggttttttcatatatatatttagaattaaatattttcctttaaatgctcttatagtcacatccccaagtattagcatgattcacgttaaaagtcagttcaagtactttctaatgtcccttttgttttcttctttgaccaatgagttatttagaagtgtttttcaaaacaaaagatttttaaaggttttgaaatcagtataaaaagtaattaagttatgatactgaaattttttttaactttgagatttgctttatagcttagtacataatcagttttcattagtgtcccatgaatgcttaaaaagaatgtgtattcttcatttgctaggcgtaaagtcacttatgtttagattaagcttgttttttatggagttcaagttttactgtgtgtgttttgttttgtttttttggtctccttttatataatttacagaagaatattaaaatatattactgtggggctgggcacagttgctcacacctgtaatcccagcactttgggaggccaaggtgggaggatttcttgaagccattaggtcagcctgggcaacataacaagatcccatctctacaaaaagtttaaaaattagccaagtgcaatatcatgtaactgtagtcccagctactcaggaggctactcaaggaggatcacttgagcccaggagtttgacgatacctccttgagcttttttactttatgtgtttatatgtacagcatataaattttgaattgttggccaggcacagtggcttatacctgcaatcccagtgctttgggaaactgtggagggaggatcacttgaggccaagaggtagagaccagcctgggaacgtagcaagaccctggctctacaaaatattttaaaattaactgggcatagttgtgtgtgcctgtagtcccagttactcgggaggctgagatggaaggatcgcttgagcccaggagtttgagggtacagtgagccatgatggtaccactgcactccagcctgggcaacagagcaagaccctgtctttaaaaacaaatctcactgtgatggtggatatgtcctttttccttgcagttttttgatttatctatttgtatgtacagcatataaattttgaatcgttggccaggcacagtggctcatgcctgtaatcccagcacttagggagactgaggcaagagggtcacttggggccaggagattgagagaagcctggtcaacatagtaagacccatttctacaaaaaaaaattagtttttaaaaaataaattttgaattgttgtattctgaattgaaccacttatcatattatctctttctctagtaattttttggaccctaaaatacattctctctgatattaatataggtaccttatttggggtagtttttgcctggttttctttttttatcctttaactttctgttttctctgtctctgtaaattagatatgtctcttataaatagcatttaattcatcctgacaatctgatttttttttaaatatcttaactggagagtaattcatttacatttattgtggttactgataagtttgctctcttatgttttatttctctttcttttctttcaagttttgagttgaataaatttattcttcattttattattttctttctggtttgggagttatatattaattactacttttagtaaatacctttgaaattttaacattcatgcccaacctagtaaagatctgtaccctcatcctgaacaatatttaaaacaaggagttttaagtcagtgcttttcatgcttgtgctattgttattataattttagtgccatcttgtttgtttgataattctataaattcactgtttctgtcactgaatgttttcagtgtgtagatttatttccctgtttatcactattccttattgcatcttgatccttctatcaagtaaaatttttcttcttccaaaaatacatgcttgaaaaacttatgtggtaagaatgtatggaaggtaaactcagtttttgcccatctaagaatgttattttggcctctatcttcaaattttgttggctagacaattctagactggcagttatttttcagcactttgaagatattgttctgctttcttctggctgctttttctgtctcctgttgattgtttcctagaatttgaatgtatacgttccatgttgaactcaatttgtgagcttcctcctatttcttatgctggggatttgttgtggttggaatttgttgtaacctgcatccaatctggaaattttttgtggattcacagttaatacatttctcccttccacccagagccactaacccaagagagacaaatttgtttcctgtctgcttttgtaggtcagattttttttttcctagttgagtgaccttttctctgagagtgaagcctttgctgagttttagctttaagcagaggtttctccagtcttacttccatcctacaaaggcccaaggctttatggtccattcctctgagtgcagcagcctgtgaaaacagtagctctaggccattggtgtttagttgaaattccgagggctgtcagcttaagcacttactagtttcctgatattgttttgtttctaatctcagagtatttcttagtttcttgcaagctcatcagtttttaataggtatcatgcgtgagtgaatataaatttttacatatatataagagaggatttattttgttgtttacaagagttttggggggatctctaagtctcttcttgccttttaatggaaacgttctcgtcattttttttaatcaaaaaatcacattttgtttctcctgtgacttcttcctgtaggtgagcagtaggtcatccagtcccagtgtcagaatgattactacctcaggaccaacctcagaaaagccaactcgaagtcatccatggacccctgatgattccacaggtgaccagtctgtttcttcatacttatgaagttgaatcagtcatgtttatattcatttggccatgtcattactctaatgtttacaaaggcaggcattatactgttgtttagatttttatattaaataaactatttagtaatacatgttaaaataccattttgaatacagagacagagactgccttgccttctgtattttttttaatccagatactaaacatgtattttaaagattgtctgtttggggtttttttccagttgcgaagcgtattgaattcttgatacttcagcctgtgattttcctactagattcatcctactagatgatagtagtaaagtcattttttcagtaaccaaaatcggagaatggtaaaaatcatccccatcatcttcatctcaatcttttaaggacacgagatgtcatgtaccttaagttgaaaaaaattctgaccattgaccttttgaattgtttttaactgataagagacaccattttcagttatacaaatattctattagacctttagaaacctgtgatgagttattaaagctccccaacatgaataactaactgttcacaatattagtattaatgtctacctgcctaaaggtagtgacggcatcgtttcattatgggcaaacaggaaatgatgtgccatagtagaattaacttttccctaactttaagagaataccttgataaatgcttttaagtgtacttatgaaattttttatttatattatattaagtcacgaagggaaagatgatctcttagcccttggaaaattaaagcatttgatattttatataagatcgactatgttattaatagtaacaattagattgaagtttaaaagccagctttctgtctttacaaactaaaatacaactcaagtatttatagttatctgatgtggtttggtcaagtttataatttaatttaaaaaattaactgggtggtttttctgtgtgtcatgtaagatagaactatgtttagccagggtgtactctctagttttagtaagtttaaatttagtggcggcaaaaactcctgtttcacccctagcacagcccaacctaggactgtccagagcattcaccactacgcagcacatgtgtagaattcattatagacttgctcctccccagtggtagacagggcaatgctcttgcccagttttatcattaacattcaggtgatagcagctctttttgatttctgaaccccctggcaagggagtacgttctctgacattacagcatttgcccgggtctggtactcaactcagcagagccttctgtcttcagtctacactaatctgtatatgccagtcaatagtgtggcagattgtgacttcatgggggtaaaataaaaaatgtttaaggctctctctcacataactgctacatttctgcctcatatgttgcttctaccttccaactcccgtcccattgttttctttttctgtacctagaaacaccacaaaataccaattgctagaaataatttgcaatatcagctgaattttgtctttgccttgaaatatattgcacatgtgtggctataattttgaatacattttaaaaatggatgctctggtttaagtttataattaattcagctgtgcagtatttgtaagaaaaatattgataaccaagctaatagaataaattagggaacagataggtaaagtctttttctttgaaggcccactgaccaaggaaaaaattaagagtgtaaatgtaagttaaagtgacctaattaaatttttttaatttgagaggtttttgtatattttcagagaaagctaaagagcataacaatttaataatcatagccgataataagcgctcttcagttcctatttataatataatgggtattcaaaaagacacacatactgagaggatctagtgagagagagatctagacgcagtagagggagccgcagagggggaaactcactaaagaattttcacctttgcttagtactttgcaaacatgtattaatataaagtgtaagacatggcccattccttgcagtctggttagagtcataatactgacacattaaaagtaaacttatactatataataacttactaaatttatagtacaagctgagtgttttgatagttgtaagagaaatcagttcaacaagacttggcatagtctctggccttttcataaaatgatgagacttttctttagccataaagcagaaaggagaaggcagcattccactgaagggaatgcatactcaaagaatatgagatagtaacaagtgttgtgtttgaggggtcagaaaagagagtttgccttaatttaaccaaaccaacatgagctttgacattcaggagaagcaattagatttgattagcaattgaaacacacacacacacacacacacacacacacgcaaaaaactttcattaaataatcttccgatctgtgaccaattattgctagtagagattggaagttcaatatcaatttagtgtaaagtgagaaagtgaaatcccacttctttttttagagagaagatgaaattcaatgaaggaccttaagttccccaccatacaagggctttaattatttgaataacacaatccttggactttttttctgctcccagaataccacgcaacactgatgtattaagcttaattctaaaatacatatcagatacagggtgctgatataatgagatatataatgtatcagtgatttaagaaagaataataggaatggaaatcttaaattgaaactttttcaagacacttaaatttttctagtaaatcaggaggaaatcagtcatttttaatcagttttagttttgtggaaagcagtgtttatgtgggagcgtagtttgaaaccactgttggggtgggagaagagttggtcagagaaataacaaattaagtatatttcttgtttagccacttcagaaaaacacacatttatgttagtactgtatatgagccttaagggtaagggtaagtgccttaagtctctactgtttttctgtattgccctgcaatatttaataaacattactttttcaatatggaattcatactatactattttaaattgttctttctaattctccatttagtatgaataataatgataactaccgtcatgtattgagtgcttaatatacgccaggatttgcatggtgttcctcacatgcactggctcatttggtctgatttcgctaattagcttttggagtttcttgagagcacgttctcagtggctttaaaaaaacaaaaacaaaagcaaaaagaaaaaaaaacacctggattatcagttgacaataaattagaagattactgagccagcaacccttcttgagtttttttggattgcatacagtgcgtctgctgtcttcctgacttgcctttatccacaccactccttcaaggagttattcgtcagaaaaaggctgaagagctcactcatttagctctttttttgtctactaacagtgggaaagcaactacttctgaagtagaaaagtctgtattgcttcagagttactctgtttacttctggaactgttctacataaccataaatgttgagaagagactgtcccacgcatctcagtcaagttgtatggcagttttacctcttttgaaatataaacaaaagcattctattcaaataattttataaaattgactgattgtttgaattaatcaacttaactgttttcggcatgacattgagccacaggtttcaacctcattttggttccttactgttcgtatttgtaatatactctcatcaccaacatctcgttttctgcagtgattcttactgggaagggcaggatgagtggtggaggtcacattataatctatataaattgaaaatgatccactggaagagaatgtgtctctgctttctccctttccctgttaaggaacattgatattagcggagttgatatagccttctataaaataaacttagcatgataaagaaaagagatggggagtttgattagatagggtcaattaagactgaatttaaaatataaaggtctcatcactgtttttgtttttaattaagagcttagaagctctaatatattgtgttctattcagtttatagccaacttaaattataggtatgagaatataattgcattctaatatctgataattgaatatcctttttttaacctttagaattcagaaatagactcttcaattaccaatagctgtaacttttaatttacatattatttactttagggaaaaaaagcatttcattcatgctttcttgctgttcgtttataattatttgtgacagaaaatcaataaaatacatgcttgaattccagataccaatggatcagataactccatcccaatggcttatcttacactggatcaccaactacaggtaaaggagtactttcttattgaaagttgacttttttcttcttagagagtttaagttgacaattgtgttgctacctgtcattgtatagtcactccttaatttatccttttagttggcctccttaaactttttagaatcaaatcaaaataattcttttggttaagttaatcaaactttaaattggcagaatcatattcttatcttttcagtcatcttaaaatcctccagtatctttctttagtactgctaagcattacattttcactctttaattttagtgcattaaaacaaaactcataagcttatttctatttaatacatttgtgatacattctcatgttcatagtgactgaaaatgtaaataatatacttcagtgccccctcatgagtatgagggctataaacatcatttagtttgagcctgtttgcagcctgaaatgtcataccagagactacaactccaacaatcatgattctctgtaacagactgttaaaacagcaagaatagatttaaatgctgagttaattctgacaaaaggacactgagattttctagggcatggtttaacacttatttttaaaagatcattgctttagtgctataaaaatatatcacagtctctgtcttgactctcatcttagctagatattgaaatttgatttaattatgttttaacattcctgattattttcagcctctagcaccgtgcccaaactccaaagaatctatggcagtgtttgaacagcattgtaaaatggcacaagaatatatgaaagttcaaacagaaattgcattgttattacagagaaagtaagttattttttatgaataaaaataaaaatacattagtattttgagtttaaaatatgataaggtgcaatgaaaacgtagtttttagaattagtcattaagtatactttcaacttgtttaagctttaagcacccttttactaaaaattttttatgcaaaactcaatccttttgactatcatattagtgctatggaaaataaactggtgctttatacttgttgttttatgttctcagagctgtttagacttattattataaagatttattgttttcttgtaaatagataaaataatttgatttattaacattcagttgtgccttatcttagaaacatttttgtagatacattttttccaggtgtatgtttagaattggattacttattaaaagactgtatttcataactgagtgtttttctgaggagttatagaaactgccttcctccctttttaaagaaacacagcctaatttccttactactgcattcacagttcttaaatatgtatgtatcttcagttttcttaagcatgacctccatgaaattttatacttaggtaactgaattgttggtggtaactaaaatgaagtgataaggaaaaaattttggcaactttatatatgtatgataataggattcccttcattaattttaatctaaataaatgaaagttgtttttttctgaatttgcgaaaagctttctgtatgtacttcaaaaaaaagagagaaaaaattgttttatcataatttattgatacagtgatttaaatggaaccaacctggtatttgaaaggtaagcctaaataggaaattaaatactacagtttggaaatcgtagaagtaattatcaaactgctggcacttttatgttgaaaaagcttgatttcttatttcacttatttaacctatacttttgccatactttaatcatttgaaagaagtattctatgctggaaaaaacaaatggtggattagggtgttggctgtgaaaactatgacagttttaatcaattttaaatactttcagaagtagtattagttagttattttgcttgaggactttttattaattattcatttatatccagtaacctcactttaggaaatgcctaaagatgcatctttttcgggaatacttaatagttcccaaataagagggacttaaataagtttatcagactataaaagaatgagggtctttcctgaaagtgcttgcaaatgtaagtgttttaaaagaagtggtactttgtcatttttctcactgctttaaaatgggaaaaagctttaaattggatagcatttattttaattagattgcaaatttgctattagcttaccactctctgctatagttaagtaggattgtgacttcagaatgtgaatcagtataaaagtagaatgtgaaggataaaaacttcatgatattttcccatagccacatagaacccttcccagccttttttcatccttcctacacaaaaagaggatagaaaatgaaattttctgaaacttttattttaccattttatctgcttcgctaattatccaagtacagttacttaataaaaggattatgttatttgtatgattacactagaagtagatgagagttccatcccagcccataattatatttgattagtgtacctaagatgcaaaatgataaaccaagaataaaaattctcattaattgagcttccatcatcagctactaaggtatgaatttttccatcatgtgtaatattatgtggtatttgtttgtaggcaagaactagttgcagaactggaccaggatgaaaaggaccagcaaaatacatctcgcctggtacaggaacataaaaagcttttagatgaaaacaaaagcctttctacttactaccagcaatgcaaaaaacaactagaggtcatcagaagtcagcagcagaaacgacaaggcacttcatgattctctgggaccgttacattttgaaatatgcaaagaaagactttttttttaaggaaaggaaaaccttataatgacgattcatgagtgttagctttttggcgtgttctgaatgccaactgcctatatttgctgcatttttttcattgtttattttccttttctcatggtggacatacaattttactgtttcattgcataacatggtagcatctgtgacttgaatgagcagcactttgcaacttcaaaacagatgcagtgaactgtggctgtatatgcatgctcattgtgtgaaggctagcctaacagaacaggaggtatcaaactagctgctatgtgcaaacagcgtccattttttcatattagaggtggaacctcaagaatgactttattcttgtatctcatctcaaaatattaataatttttttcccaaaagatggtatataccaagttaaagacagggtattataaatttagagtgattggtggtatattacggaaatacggaacctttagggatagttccgtgtaagggctttgatgccagcatccttggatcagtactgaactcagttccatccgtaaaatatgtaaaggtaagtggcagctgctctatttaatgaaagcagttttaccggattttgttagactaaaatttgattgtgatacattgaacaaaatggaactcatttttttttaaggagtaaagatttttaattctgtgattgtgtgtatgtgtgttgaaactgtaaagcttttatgactctaatattaatctcttaaatgaaattaaaaggcaaaagaacatgattgagcttaaa

SEQ ID NO: 15679 - DNA, 73311 bp, Homo sapiens
atgtctacagcctctgccgcctcctcctcctcctcgtcttcggccggtgagatgatcgaagccccttcccaggtcctcaactttgaagagatcgactacaaggagatcgaggtggaagaggtgagcgaggcccggcatggagacgccggtcccggcctgccccgcccccgcctctgcctggtgccggctctgaaggtgcctcccggggcccctctaattcgcgggaccctgcggggtccacccgggagaccccacagccctcagtaacgtgggagtgggggttactctctgagctcaactgctcgggagtagctgccttttttcctctcttgggtactcttgattttggatttgatattccggtgataaacaggagaatgaactggtgagatagtgtggtccaccagttctcgtatctgtaagtagtagtttcagcgaagatcgtagccgttctggagtttcagtccgctggacgtaatgttcttttttttttttttttttttttgagacggagtctcgctctgtcgcccaggccggactgcggactgcagtggcgcaatctcggctcactgcaagctccgcttcccgggttcacgccattctcctgcctcagcctcccgagtagctgggactacaggcgcccgccaccgcgcctggctaattttttgtatttttagtagagacggggtttcaccttgttagccaggatggtctcgatctcctgacctcatgatccacccgcctcggcctcccaaagtgctgggattacaggcgtgagccaccgggcccggccggacgtaatgttcttaatggccaaagattgtattatattcgacttctacttcagtacctggcatgtaggggatgctcaataaatgcttgttaaattagtagatcatcaagtctaataaagtgtttcccttagcaccgaatggttctcaatttctccgataccgcacagcaatactcgtaatgtttaaatgctcggctttcagttgggctaatgtaggtgaatttcaccataagtaacatagactggtctacgatcaaaagatgtttcaagtagcatattctgaagagataacgaatgatttcggtgacaatcagaatataatattagactagaaatcgctatcagaaaacccatatcctttctttattctgcagtaatttattttagaacaagatatttcaaagtgactttaaagcgtcgtttttcaaattaacaggtaaattgggttctaatgactataaaatttagaaaagtaaaaactgcatatatattttttaaagacactttagaacttgttaaaaactttggttgaaaatactatctcttaccatttatttgccattttttaaatttattaagcactttgcgttatatagtccatgaaaaacctagtgaaatattatagattgtcaacgagttatgtctactttaaaattctaaaattatttttaagtgtcagcaagttcaaagtagtgagataacgttcaacaaataaattttttttcctgtgcatgttttggaagagtaatggattactgaattatatatgttttatcacataaagtaactttagagattattgagaatatcctcattttacaagataatatggtggaaagagcaaggtctttggagttagaggaaagttcagtgtatcagatatgccatttattagctgtgtgatttggggcaagtttcctaacccctttgaattttagtttactctaagaaagggctaataaattctgtttcattttatctgcataacagatcttagtagacattatatgcaaaacacctaccacagggcctgacacatattaggaaacctagttccagagaggaaatgtgacctgctttaaggtcatatggctaaaagaagacctgtattttgaaaagagggggaaatgtttttagtttctttttttttacattgaggctatgataaattccttttccagaagtggatagttgatgcagctttcatggctaatattcttttttaagaataaaaattcagtgagtcagtatacaagaattgcagtttttaaataagcgtttacgtctgctctgtggtgaattgctatgcttgtagactacaaattgttatataataataacttgtgctttatggtctactaaatgctttcacaaacttacttcatttggttcttacaaccttagtttttgaatgctactttctaaagctttttacattcttgattcagggaaaaacaaattactaaggaggtagttatcattttgatgttcttcccctaaagctatttcgcttctggttaggtttctgtgtttccaagacccttctctcagtttagataatgtttcaatctttgtgtgtatgtgggtgtgtgtgtgtttaggaaatttctgggagtaggtttttgtttttagatgaaaatttgtttctaatatcaggcagtcatttgggttttttgtttgttttattccctttcatgtttaatacttagttcatttttgcattaaagattgaatttggacctttctgatattgaaagcattacataatttccatcatcttcttcatttgcatacattaaaccagtgttacacaatccagggtgaaccatgaacacttattagctatttgtcaacttagattacacttccagttcaattgtaagataaacagaggaagatgaccagaaacaaaaactattttatgttgcttccaatattttatattgtatgagaatattaccttctaaattaagaaaatcatgtatttctcaatgtaattgaattgtattatatcaatataattagaaactgtaaaaaaaataataattcaactacaggccaaatatgcagccatttagtagatacatatttctaagacattagctgatcttgcatttctaatattgtaactcagtagtattagtttggcacatcttagattcaattcaattcagtcaaattaggtaaggtctcagcctcagaaatctgcctaggtactttttaaacatcatttagtgtttaccatctagaactggctgtagagaatgttggaataaaagaggggatgggttgcaagaagtgttacacagggtagtatagtggaaagtgttctggactgaaaaagaaaatttagatgctgtactgattctgccataatatatttttgtaactttgaggaagtcaccacatttttctgggcctgtggttactcatgtaaactgactgaacaagatcatttaaggtcttttccagttctaaaatgaaaacacattcatgttttccagtatttaactgttttctatagtaagcttagcagttctttaaagactgatcatggtctcctatagaattcagttggtgaccaactaatcctgggttgacagggcaaatgatatcccattgtacagatattgacaagcagtcatagagtttgacttgccagaagccgcatgcctaagtaaatggtaaagctgggaattgaatatgagacttctcacttgtgagtcagttgccctttccactggatttacagtgtcactcagtactttctgaagtactctataaccaaacctaatatgggaaaggggaaacaaaatactgatttcctttttagtgtagttggtcctgagcatttaatgaacattctcatctgtgcgtaatactctgaggtactataaaagataaatagggcttggtgcggtggctcacacctgtaatccgagcactttggagggccagtgcgggcagatcacttgaagccaggagttcaagaccaccctggccaacacggagaaaccccgtcactactgaaagtacaaaaattagctgggtgtggtggcacaggcctgtaatcccagctacttgagtggctgaggcatgagaatcgtttgaacccaggaggcagaggttgcagtgagctgagatcatgccaccgcaccctagcctggacaacagagggagactctgtctcaaaaaaaaaaaaaaaaaaaagatgatagaagaatcctaggattacctccttaaaatgtctgacttagtatgatatcagactggagtaaacacagaacagttaactatagaccacaaatttaaaactgaatatagtgtaaattaaacacttaagccataatttgaaaatagagttaatcacagaaggttccattgagtagggacaagtttaaaactaggttttgaataaagtgaccatcgtgggttgggaaagtcactaagatgaattttctttgtagttgttcctctgcctaaagcgctgttcccccataacttaagatgactgactcctcaccagtcaagtcccacctcaaatgttattaacacttccttagagaagcattccctgaacaacctagatcttttgtcatttctattatctttcatggtacttaccagtaactgaaattgtgtctctccttcagcaaaatgtaaggcgctttattcacttttgtaaccccaatgcctagaacctagaaggttctctatacatatttgttcaatgagtacatgaaagtatcacagcataatcataagaattaaatgcccatcttgttctcttatattacatgtgataaaataggagctgagttatgcgatttggctaaggcaacacgttagaaatgagatccgagtcttgttttaatgtcgactctattatagttagcagatacttttgtttagcagggataaaaaatgctgtaaagggccagatgctatgagtaagccacgtatggtaggtctttactacagagtgctaaaaagacactatttacaatggttgcttttgaaaagggagacccataatgctgacctcaactatagtgtaggaacaaagctatagtattggacacataaaattactgcagcatttgtatatattcttcagctttgttaaggagacacacaaaagttttgttttaaaagctaaaatatgctacaaagaggagatatagatagaacttaaacagttatatgtactttgtaggtttaagttataaatatatggggaattggtattagagaaaaacctaatttatagtggtctaaacaaactgagtacatagatttgttagtcactatttaattatggatacctaaaataatcaatacattctttcatgtgaaagtgaccactgatttcagtagaaatctggaattactatagttaagaggtagctacagagataatttttgcattgtacacgtgtagcttaaaagatagcatgagcatattatttgaaataaaagcctagaaaatgggtgagatgtactgtggcaggtattaaaagactgcatgaaacattcagaagaaagtttgaataatcaaagctttacttttatgttatcaaatccatcttgtcagcagatggcagttccactctgccacagtttattaatagatattgaagttctaacatagttggaggctccaagtcctaactaataaatgtatgatctatgcttgttctgtcttgttccgcatttccagccagaacaatgccagcatcaccaggggtccattcagatagttcatagaacagggccaaatgaaactgacagctgtagtcactgaactaaaaataacatgaattcagaacaattaaaagaattatttaataataaattaagagcacaaaggcatacatccttttccatttaggttaggtgtgtgtttggttgttttctttaacatgacttgtctgaaggaatggagtcatcttacatcataaagaaattaatttttaaaggaatttctttaaaaataacacacaaacacacaaaacctgatttttgtttttgtgcctttcaatagtagttgcatggaaatgttctatataccatctcatattcttctgtattttttattaagaaattaaatttaaatctacttaattgtatgagactaaagttgtagacccaaaacaaagaggtttcaaccatagggggagaaatgcttatcataaagtaattaatcaaaaacattttgatttagaaaacattcataaatttagaaggaaatatttccaaattgacctcccttttaaaaccaaagtcctttttgcattcctctgttttttacaaatgaaggattatgaagaatatctgaaatatttatttgtatgtcaccattttagttggatgtgtgtgatggggaaatacttgtaacttgatatgttctcttttttactcttgatgaaaattcatctttggggaaaaaacagtcatttaaaataatgttgggctaggtacggtggctcacacctgtaatcccaacactttgggaggccaaggtgggagattgtatgaggccaggagtttgagacgagtctgggcaacatagtgagaccctgtctctataaaaaattttaaaaaacaaaaaacctaattgttaattacagtgtgtcaaataaactgtattattcagaaaagaatacggttcagaaagcacgtttgatttgtgaacttggactagaaatttggtagtaaataaaaagtggccttctttcagtggtttacaacttgaatattaagttttttcattgtttacctcagttgccagtatgtctcaagagtggccatctatgccactttttttctgttgatctaccatatgtcaagaaaaatatcaaatttgctttctgtagtttgtaacattggctcattccttatctaataatgtacataatctccttatgtgtttttaggcttggcctttgcagtccagacatactattattctacatctgatcttctccacgattttatgttcttgattaatacaataaggaaatttgttaccaagatatttgcatttgaaacattttcttagaaatatgtgatatattttttaaaaatctatacacatgtaagattttccccagtcagtggagtgctgttttacatagcctgagaggtggagtgcagacagtaatgaactttcttaaccagcgtttcctgttggagcggtggtgtccacaattttttgtttgtctgtctcccactggtaaaacaaaacactttctattttgtatactcagttttcagtgtgtatgtatgaagtcggtatttttaaacaatgggagatgaaaggtttcatactatcatttgatcatggctcaagttgcaataagtactttctaaataaaacctttctaaaatgtgagaattgacttaattaaaatgagataatatctgtaaatctacttaactaaggtcaagtaaactacaatatacacaagtgagggactgataatggagtcagtatttgacatattgaacttaataagcctgtaggaccccttagtctcaaaggcagttttaaatatatcttgagcttgggcaaaaaacctggatgggagagatttgagagtatgaatccatgagattagagaacagattcagaaacaaaagggccaaggacagaaccctggaaagtagcaacatctaaggtttggacagaggaaggaagaatcagtgaaggaggctaaaatagaactcttaagcagagacaggcagagaagggattgttgacagccatctttggagactgccataagccctttatacacaagccttctattaacccaacttcactcttttcttaaaggagattagggctttttaaaacccccttctaaacagctaaaatctgattcgaatataatcttttgaaaagttaattgttgttagttatcatacttgctgcctttgagtagcatttttctctgtaccaggcactggaccaaatcctggcaggcctctgttttgttggcaccatgaaacatacctgaaagctgactctgatttactaattacatgatccttgaataggtaacttcagttcttggagccttggttttcttctctctaaggtaggaataaaaaatcctatatattcatgggtttatggtgacactcaaactccatcatatttgtaagaaagagctttacaagttgtaatatattgttaaatataaggttgcattatcgttatacagataataaaattgcatttctttaaaatgttatttcttgaagaaaggaatgagaagtatattggaatgccctgggaagctttttttatgctacgtagcaccttctgccacctctaattcccattcagacttctcccttagagagctaatatcagaatggggggaaggagagcaaaatataccaggaaacaactttatccattgtatatatcatctgattattctatcttctactcttatggatatatgcttatactcttttttgtttaaagcacaaaactcctgtctctggccaggtgcagtggttcacgcctgtaatcccagcactttggaaggccaacccaggcagatcgcctgagctcaggagttcaagaccagcctggacaagatggcaaaaccccgactctactaaaaatacaaaaattagctgggtgtggtggcacaagcctgtaatcccagctactttggggtggctgaggcaggagaatcacttcagccagagaggcagaggctgcagtgagctgagatcgcgccactgcactccagcatgggcaacagagtgagaccctgtctcaaaaaaacaaacaaaacaaaacaaaacaaactcctgtcctcctgccggtatttcttacttgtttttaaaagttaagaaatgtaactatttttctataaactactgtttaattatgagtcattcctcttttcaactcagtagagaaaagcatttaatcttgccacaacaaggataatttccatgtaatacttacctcttttatgtatctttgtactcagaaatttcaagattaattcggttatttcaaaattcagtcttcccccataaggattttccttttccctttctcctgcccaagatgacatatgggtgctgtggaaagcttccacaaataatataaacagcaagggagagctctctggtctgtgtgatggcttccactgaaatatcttgccttattatctgttgttaatggattagccttgaatgcagtgattttcaaacattgaaactacctggagggcttggtaaaacatggattgcttggccttaccgtcagactctataattctgggttgcaccctgagaatttatatttctaataaatatccaggtgatgttgatactgctgaaccggagaccacacttttagagccactggcatatgctttcactgtccttatatctgctttccttctggaacgtctttttcttttggcttctctgactctctcctagtttgcctgctaccatattgactgttccttcctgttccttgcccattccttctcctctcttgtgatctaaatgttgaactgcttcaaagctcagttcctctactccactatctccatattatttttggttacctcttccaactgattgactagaaaaactgactacatgctaatgactcccaagtttgtatctctttgtctgacttctccatagatcctctcactcacgtttctaccttcttacttgatatctcctcttggatatccagtaggcatcttaaacttcatatgactaaaaccaaactctgagttattaaaaaaaaatctgcatcattcttatccctcagtaaactgttgtccagtctaggtgttttccttgattcagctcttttcctctacacctgtcctgcctggatgcagagcatcagcaaaccctattgactctacttctaaaacatttcccagatctgcccagtttctgcactaccattgaccttgccctcgtagctattgttgcttgtttggactgctgtaatggcttcctaatgggtctctatttacatatcctagcttccctacaatcctttctttaagagctataatgattttgtttaatgtcacataccatccttacttccttgaattttttcagttccttcacattgcacttagactgaaattcaaactcctttttatggtaggtagagccgttcaggatccaacctctgcctgtccctccagccttaccttacaatcactcttcccttcctccactatacaccagccacaccaaacactcccaagtatttctctaaatcatcactaaaatgtcacctttctcagtgaggccttgagtgattaccttgtctaaaattggagtgaggcagagtgcatacatgtgtgtatacacacacaattatactccttttcttcttagcacacaactcccttcctttttatttgtctttttccacaagaatataaacaatgagaacaaggattttgatttggtttgttcactcttgtatcatcagtgcctaaaatagcgcatagcccttagattgggctcacatattggagtaaataaggtagtgaggtttttcttttcccttagggcaaagctttatattagttgtttcttctgtgtgtgtgtgtgtgtgtgtgtgtgtgtgtgtgtgtgtgtgtgtgtgtgtgacagagtctagctctgttgcccaggctggagttcagtggcgcgatctcggctcactgcaacctcggcctctcaggttcacgccattctcctgcctcagcctccccagtagctgggattacaggtgcctgccaccacgccccgttaattttttgtatttttagtagagatggggtttcaccgtgttagccaggatggtctcaatctcctgacctcgtgatccgcctgcctcagcctcccaaagtgctgggattggtgccttgtgtcatccaaatgtcagattcgtaacctctttatatggccttttcaaactgcccagcctggagctgccactagtctcttggtcatagcatcctattttttgttgttgtcgttgttctatgtggcatttttttaaagtctgatttttttcttactcatcttttgtttgtatatcgattttcttttctcctcccctcccttcacatacgctagaaagtacatttgtgtagatcagagcctttgtcttatttctttctgtatttctgatgtcccaaacagtagctggatgtagtacacactaaagaaatattggtttaaggagtaaacaaacgaagttcattattctttcaacatcaagcctcacttgcatcctttgaaggcagaagacctaacccagttctccctgcttgctgaccaggccttccccttggctttcattaatcctctgaaacccagctgtgttcttcattaagtatttgagctagctaccatcccacagacctctaatgtaggtcccaacactctgccctaccgcagcctccttcctgcaatcagaagactccttacttctcagttagcttgctttttgcttcacaagagcttttctttatcccttacgtgttctactggggctgagggaacccgggttagggcctcccttggtctgtcttccttgccacaatccttactcctttgaagcttctggtgtttgcagagcacatgctgtgaggatgcctgctcttagggatctaagtgagaagagaagggtatgagtcttttttgctgttgaatccctaccctaaccctatcctgaaaagggggagggaggagtttattagccttcatcattagcccttacctttggctctcttcagctggtaagtgtttaaaagtttttaagtactattatttagtcttaaatttcttctctaccgcactttcattccatgaaggcaggggtccattctttatatatattttttcttctcatccccagtgtatctacctttatgctatttttaaaaatgggaagtcatttttgatacacacaaacttaattctttaagtattgactgtgcttataatctcactcctttgaattcacagcagttattatttctatcctgtatttcaggtcagtacaaccttggacatcttcacctttctttattataactttagatcctgtcatttcactgtgcatgtgaaatatctcgtggccctaataagaatggaggcttcttaagcccatgggctcatcttacaggaatgtgcctgttttgtatttcagggtgttctagaaaattgctttcttgagcaaaaaggagaaagtttttcatgtcctcatttgaccacattttgttcccatggctttaagttgaaagctcagaatcagctctactctcatcactaggtggcacttgtgaattacaaatagtcaaatgaatttttatgacaaacatgtgattcacaaatatagataatgtttggaatccctgcatggacgttcctcaaaatggaagaaatgaaagaaggggattcctagtaagtaccagttgctgtgatgtatttataaatacatggttgaagaataaattacttcataatcatttcgtatttaatagtaatatcaataggtaaagtctggtctccatgcctgtgttcttaaactaatgttgccacaaagttgaaatttttttaggacctgcttgctattcatcttagttaattgcaagagaagtgagtactacaggtcaggtgcagtggctcacacctgtaatcccagcactttgggaggctgaggcagggcgattacttgagttcagggattcaggaccaacctgggcaacatagtgggatcccatctctacccaaaagaaaaaagaaagaaaagaaatgagtactacagccctttacactgattcatacccaattccaagcacttactgttctttgtagtatttgaggaaatacctggttttaacttacgaatcctgtagatattcatgaaggaaaatgtcagcacttctattttactgctgagaaaacagaaactcaaacttgtccaccattaagagataataggtagacagagccctacattcaaactcaagtctgttggatttcagagcctgggtgtgctctttcatttattctaatggtaccaggtagccagtaccctctattcacaataaagtaactgaatggcaagtacaaatgtctgatgagaattgtgaaggagaacaagaacctaaaccacagaacactgagtgcccagggctaggacgagtgaaatgggaagtcaacaaaacaaagactagctaccagagaagttggcctactttgaaattttgcctagaggcagccccatttcctttaagccactgatgaacagaagctgaatatagagtatgttcatcattaggtgctctaggcttcaaattctggcttctctgaatattttctgaccatccaatcttgggcaagttacaaccatgtgactccatttgcctcccttttaaatggaagaggattaaatgtgttaatgtatgagaagcacatagaatagtacctggcacatagtaaacattcaataaatgttaaccatttgagtagctttagacattgaacaacatggtaaatgttcattctgccttattgatacatgaagtggaatttaagctatggctagagtggtcatacacatcgcagtttacaactagtgtcctaatattattattattaatgccctttttttgatctccaaagtgccctcagttagataataactcatttgatcaacctagttatagtcaactttgttatagaagagttttgtgccaggaatttgttcatgtaagtctaaagtaaaagttcctccaagggaagatactaacttctacttcccgacatggggctttatatatgttacaaattaggactggtaacattcccgtgttagactacctggcatcagactgcactttaacacttgctagctatatagccttgggcaagttttacttctttaaagctaggcacttcaactgtaaaatgaggacagcattagtaccttcctctaggcctgtgtaaatgaggtaatgtatataaagcattagttaagtgcctgctgcatagaaagtacatataaatatggttaagagatgcagattttttgctaaagaaaaaggccttgatacaaagtgcttaggttcattggaagctgagagattggagtaggtggtgcttaactaaggtcctttcacaatgataaaatctaatgattttattctaacaagtatcaaaagctatttttgttttctttttttatattatgaaaaatgtcaaatatttgtaaaaataggactccatgagagagcaatgaacccatgcagtattcatcagttggcttcaacaatagtatgatacatgtctgatctttatttttatgacttttgaaaaataactgtaatgagatctattttacacatcataaaattcacccatttgaagtgtacaatttggtgggttttgcaaatttaccaggttgtcagccaccaccataaattaggtttttggttttttttttttaataatttcatcactttgtcaggataccagctactcatttactgttaattctaattttcaccctcggacccaggtatctatctatagatttgccttttctgaacattttgtataaatggaatcatacaatatgtggtctctggtgtctgacttctttgacttagcataatgtttttggagttcatatcgtaagtaacatatatcaatagtttttcttgcggaataaaattccatggaataaataatactatattttgtctgtccttcatagccggtcttttaacatctatatttatatcgtttctcctccattccctatccctgttgaattattcaaaggctatttttaatttcttaaatatgatagctgaaaatatttattatatgttcctgctttttgtttttccatatcatcttctgtcttctcattcatcttgtctgttttagtttttttttctccatttaacaaatcactttactttgttcctccatgtgtcttttttggttttacttgagaatgaaagggtgtacagatcataaactttcaaagatagagacaagcatgcatttaattatcttctcactttaacaaaaattcatacttgttcagtggcaaatccagatactgttgatttccatgttttttttttttttaatttaaagtcttaaagattgactttagttttttatattgggctgatctatttgattccgattcttgtggtgttttttgtttgttttttgtttgtttgtttaactcaggttgttggaagaggagcctttggagttgtttgcaaagctaagtggagagcaaaagatgttgctattaaacaaatagaaagtgaatctgagaggaaagcgtttattgtagaggtaagttgagatttcatttcttttgtgtagttctgcacttaagatactctgtgaatttaatattatgaaaaagattggtttctcagatgtcatttctttgtatacatgaacatcagcaattcggtttaatcaaaggtactgccataggaacattttctcgttcatactcttaattctgattaaaaattaggggaaaagcgacttaactacataaatgaattcacccctgaattaaaacagtttcatccatggaattcagatctatttcaaggcgtaatattttaattttaaaatagaaaagaaatggtatgctttcccattatctaaaattaagaaattttatacacttactttaaatggaatgtttttagaaactcagattattttaaagaaaaattatttcaaatttgatttttctcatttagcatgaaaatttgcacctattcttttagaaatagattagattgaatgatgaaagaaaatccaataatcatgaaattagcatattatcaaatttatcctttactaactttgttattttgtattttggatcacattatttagttaaatcaatgtttttatcactattaaacctcattggccaatggataagtggcctgtaccttataagccttctgaatttatatctctgttttttcatttaatcataatttcaaaatatacttcatatttttaatgtataacatggaaaaatgaggacttaattgtgatatgagaaagtgatttgtaagtggctgaatgagttgagaaatgctgataagtgatttgatgtcagcatgaagaaagatgatttctagtaatatgttctaggagtctagcctcagctttgttttatgcaatatttttattacagtttagataaagctattgatcatttcctgttacattagcagtttcacaaagctgggtgaaatagcatatgtgttaaacattaggaatcacaagtcaaaaagatcgtaatagcgtgaagaaaattttttaaatccagatgagatgtgcatgtaatgtaaaaaatcaaatggttctccaaaaattcttagtaaaaaagacttcagtctcctgtacctcctccaatctaattttctgcttcccaaagacaactactttgagctcattccttcatgtttggtgtccccagtccagatgctgtttattaccccttctctaaagaatcaacctctagtcttctgctgggatgataagagatagtcattgagctgtttgaagtcaaggaaggaatctttgagtcttttacactgtcccctgccctatcctttgattagctcatttgcataggtacctcattctgctgccactccccaaccttttggaagctttgtgagataaatctggttgtttctccatttttctcattgccagtttatgatgcagctcttctaggtctgctctatcagttattgctagtcatttgctttccagcttccaaaaatgtatgctgtttgtgcactttgcattctcttcatccttctgaggttatgccttaaaatttttcaaatctttaccatcttagtgggaattagggagagaggaggaaaaaatgcttgtataatctgctatctgaatctcagtgctgaaccttagcaagatgaaatatagtaaatatattttcatatagtaaataaatataataaatagtgatactaattctattggacgaaaaatccacacatgttggctctagatagatagagctttttattagcatacagtatgaaggtttagagacattagtgtactgaatatgagccagcagcataatgtatgtaatagagaagaggaagaagagtggaaaaagggcagaaaagagaggagaagggagaaaagaatgagcaagaagcagtttgctgtggagcgggatgcattaatagaaagaagtttgaagacagacatgatggttcacatctgtaatcccagaactttgggaatggcagatgggttgcttgagcccaggagtttgagatcagtctggacaacatggcaaaaccccatctctacaaaaaatacaaaaattaaccaggcatggtggctgtgcacctgtagtcccagctactccagaggctgaggtaggattgcatgagtccaggaggcagaggttgcagtgacccaagattgtaccactgcactgcagcatgggtaacagagcaaaacctgtctcaaaagaaagaaagaaagaaagaagtttgagatctagaataagagaagtgagtatagccaaacccctcattgacctctgtatggatcattggatcagggatgattaaaactgaaagagggaaaccagctagtaggctataatgatcactgcagcagttcaggttgggattactaaggcaatggcagtgggaatggagaggagagaattaattcaagaaatgagaaatggaatggaggcaagtatacagagggagtgcacattttaagtcagatagactaaagttcacaccccacttcttagctatagaacaggtcattcaaccctctctgagacttgaggttaaaatctcatctttaaaatggaaatgataatacctaccttgcggagttgtgataattatacaatatctataaagtgcacattagggccccacgcagagtagctagactgttcaactatagctatgaagatgataacaatgatagcatgacgtctggtttggataatgcagctcagtaccatctctgggatcatatcctaacatttcttggcagagttcatctcttcttattctatatactcatcgtgccttgttcataactcctgttatagcactttgcacattgatttaattatttgtttagatgtctatctctccagctaaactgtatgagctggagaacagggattctgtgccattctgggcagtcacttggtattttcagtgactatgattgcaatgcctgttacatagtaaatagtgattgttgaatgatttaaacaaatgttttgtacaacagtaagattttaatgatactgtgaaatcagtacttcaaaagttatcactttttaaaagaaaccttaatttcttaacagcttcggcagttatcccgtgtgaaccatcctaatattgtaaagctttatggagcctgcttgaatccagtaagtttgttactttttcatggtcacctgtgagaaatgacatggcagatgtgtgtgtgtagtttatgtagctatttttgggtttttttgttttttttaagtttttcaaaaatattatattttttcaagataaaaaggtacctccaatactttaaaatatcagcagtgatcccaatagttcaaggactatatgagtacatgtggctattatacacgcacaatatgtcaccaacacactctaaatagtgagaatacagcaccgtggcattgctcccatattattatttttttctttctctttatgtatttattgagttacttacttgtttttgatatctttttttattatactttaagttctaggttacatgtgcacaacgtgcaggtttgttacgtatgtatacatttgccatgttggtgtgctgcacccattaactcgtcatttacattaggtatttctcctaatgcttatccctcccacctctccccaccccacaacaggacccagtgtgtgatgttccccttcctgtgtccaagtgttctcattgttcagttcccatctatgagtgagaacatgtggtgtttggttttctgtccttgcaatagtttgctcagaataatggtttccagcttcatccatgtccctacaaaggacatgaactcatccttttttatggctgcatagtattccatggtgtatatgtgccacaatttcttaatccagtctatcattgatggacatttgggttggttccaagtctttgctattgtgaatagtgccacagtaaacatacgtgtccatgtgtctttatagcagcatgatttataatcctttgggtatatacccagtagtgggatggctgagtcaaatggtatttctactctagatccttgaggaattgccacactgtcttccacaatggctgaactagtttacagtcccaccaacggtgtaaaagtgttcctatttctccacatcctctccagcacctgttgtttcctgactttttaatggtcaccattctaactggtgtgagatggtatctcattgtggttttgatttacatttttctgatggccagtgatgatgagcattttttcatgtgtcttttggctgcataaacatcttcttttgagaagtgtctgttcatatcctttgcccactttttgatggggttgtttgattttttcttgtaaatttgtttaagttctttgtagattctggatattagccctttgtcagatgcgtagattgcaaaaattttctcccattctgtaggttgcgtgttcactctgatgatagtttcttttgctgtgcagaagctcgttagtttaattagatcccatttgtcaattttggcttttgttgccattgcttttggtgttttagtcctgaagtccttgcccatgcctatgtcctgaatggtattgcctaggttttcttctagggtttttatggttttaggtctaacatttaagtctttaatccatcttgaattaatttttgtataaggtataaggaagggatccagtttcagctttctacataaggctagccagttttcccagcaccatttattaaatggggaatcctttccccatttcttgtttttgtcaggtttgtcaaagatcagatggttgtagatgtatggtattatttctgagggctctgttctgttccattggtctatatctctgttttggtaccagtaccgtgctgttttggttactgtagccttgtagtatagtttgaagtcaggtagcgtgatgcctccagctttgttcttttggcttaggattgtcttggcaatgtgggctcttttttggttccatatgaactttaaagtaattttttccaattctgtgaagaaagtcattggtagcttgatggggatggcattgaatctataaattaccttgggcagtatgaccattttcacgatattgattcttcctatccatgagcatggaatgttcttccatttatttgtgtcttcttttattccaatgagcagtggtttgtagttctccttgaagaggtccttcacatcccttgtaagttggattcctaggtattttattctctttgaagcaattgtgaatgggagttcactcatgatttggctctctgtttgtctgttattagtgtataggaatgcttgtgatttttgcacattaattttgtatcctgagactttgctgaagttgcttatcagcttaaggagattttgggctgagacaatggggttttctaaatatacaatgatgtcatctgcaaacggacaatttgacttcctcttttcctaattgaataccctttatttctttctcctgtctgattgccctggccagaacttccaacactatgttgaataggagtggtgagtgagggcatccttgtcttgtgccagttttcaaagagaatgcttccagtttttgtctattcaggatgatattggctgtgggtttgtcataaatagctcttattattttgagatacgtcccatcagtacctagtttattgagagtttttagcatgaagggctgttgaattttgtcaaagcccttttctgcatctattgagataattatgtggtttttgtcattggttctgtttatatgatggattatgtctattgatatgtgtatgttgaaccagccttgcaacccagggatgaggccaacttgatcgtggtggataagctttttgatgggctgctggattcggtttgccagtattttattgaggatttttgcatcgatgttcatcagggatattggtctaaaactctctttttttgttgtttttatgccaggctttggtatcagaatgatgctggcctcataaaatgagttagggaggattccctctttttctatcgattggaatagtttcagaaggaatggtaccagctcctctttgtacctctggtagaattcggctgtgaatccatctggtcctggactttttttgtttggtaggctattcattattgcctcaatttcagagcctgttattggtctattcagggattcaacttcttcctggtttagtcttgggagggtgtatgtgtccagtaatttatccatttcttctagattttgtagtttattttcatagaggtgtttatagtattctctgatggtagtttgtatttctgtaaaattggtggtgatatccccattatcattttttatcgtgtctatttgattcttctctcttttcttctttattagtcttgctagtggtctatcagttttgctgatcttttcaaaaaaccagctcctggattcattgattttttttttgaagggtttgttgtgtctctgtctccttcagttctgctccgatcttagttatttcttgccttctgccaacttttgaatgtgtttgctcttgcttctctagttcttttaattgtgatgttagggtgtcaattttagatctttcctgctttctcttgtgggcatttagtgctataaatttccctctacacactgctttaaatgtgtcccagagattctggtatgttgtgtctttcttctcattggtttcaaagaacatctttatttctgccttcatttcgttacgtacccagtagtccattgttcagtttccatgtagttgagtggttttgagtgagtttcttaatcctgagtctagtttgattccactgtggtcagagagacagtttgttgtaatttctgttcttttacatttgctgaggagtgttttacttgcaactatgtggtcaattttggaataagtgcaatgtggtgctgagaagaatgtgtattctgttgatttgggatggagagttctatagatgtctattaggtccacttggtgcagagctgagttcaattcgtggatatccttgttaactttctgtctcgttaatttgtctaacattgacagtggggtgttaaagcctcccaatattattgtatgggagtctaagtctctttgtaggtctctaaggacttgctttatgaatctgggtgctcctgtattgggtgcatatatatttaggatagttagctcttcttgttgaattgatccctttaccattatgtaatggccttctttgtctcttttgatctttgttggtttaaagtctgttttatcagagactaggattgcaacccctgccttttttttgttttccatttgcttggtagatcttcctccatccctttattttgagcctatgtgtgtctctgcccgtgagatgagtctcctgaatacagcacacttactggtcttgactctctatccaatttgccagtctgtgtctttcatttggagcatttagcccatttacatttaaggtgaatattgttatgtgtgaatttgatcctgtcattatgatgttagctggttattttgcttgttagttgatgcagtttcttcctggcatcaatggtctttacaatttggcatgtttttgcaatggctggtaccggttgttcctttccatgtttagtgcttccttcaggagctcttgttcagcaggcctggtagtgacaaaatctgtcagcatttgtttgtctgtaaaggattttatttctccctcacctatgaagcttagtttggctggatatgaaattctgggttgaaaattcttttctttaagaatgttgactattggcccccactctcttctggcttatagagtttctgctgagagatccactgttagtctgatgggcttccctttgtgggtaacccgacctttctctctggctgcccttaacattttttccttcatttcaactttggtgaatctgacgattatgtatcttggagttgctcttctcgaggagtatctttgtggcgttctctgtatttcctgaatttgaatgttggcctgcgttgctaggttggggaagttctcctggattatcctgaagagggttttccaacttggttccattctctccatcactttcaggtacactaatgagatgtagatttggtcttttcacatagtcccatatttcttggagtctttgtttctttttactcttttttctctaaacttctcttcttgcttcatttcattcatttgatcttcaatcactgataccctttcttccacttgatcaaatcagctactgaagcttgtgcatgtgtcacgtagttcttgtgccatggttttcagctccatcaggtcatttaaggtcttctctatgctgtttattctagttagccattcagctaatctcttttcaaggtatttagcttgtttgtgatgggttcaaacatcctcctttcgcttggagaagtttgttattaccgattgtctgaagccttcttctctcaactcatcaaagtcattctccatccagctttgttccgttgctggcaaggagctttggaggagaagaggtgctctgatttttagaattttcagcttttctgctctggtttctccccatttttgtggtttttatctacctttggtctttgatgatggtgacatacagatggggttttgatgtggatgtcctttctgtttattagttttccttctaacagtcaggacctcagctgcaggtttgttggagtttgctggaggtccactccagaccgtgtttgtctgggtatcatcagcagaggctgcagaacagcaaatactgcagaacagcaaatgttgctgcttgatccttcctctggaagcttcgtctcagaggggcacctggctgtatgaggtgtcaatctgcccctactggaaggtgtctcccagttaggctactcaggggtcagggacccacttgagaaggcagtctgtccgttctcagatctcaaactccatgctgggagaatcactgctctcttcaaagctgtcagacagggatgtttaagtctgcagaagtttctgctgccttttgttcagctatgccctgcccccagaggtggagtctacagaggcgggcaggcctccttgagctgtggtgggctccacccagttcgaacttcctggctgctttgtttacctactcaagcctcagcaatggtagacgcccctctcccagcgtcgctgccgccttgcagttggatctcagactgctgtgctagcagtgagtgaggcaccgtgggcatgggaccctccgagccaggtgcaggatataatctcctggtgtggtgtttgctaagaccgttggaaaagcacagtgttagggtgggagtgttccaattttccaggtaccatctgtcacagcttcccttgtctaggaaagtgaattccccaaccccttgtgcttcccgggtgaggcgacgccctgccctgcttcgactcacactccatgggctgcacccactgtctgacaagccccagtgagatgaaccctgtacctcagttggaaatgcagaaatcacctatcttctgcgtcgcttacgctggtagctgtagactggagcttttcctatttggccatcttggaacctcctatgtagctattttgatctgctatcttagatgtatttctgaaagaacagttatagtttgttcatttgacttgtttctagtcttttagcaaaactgtatcggaagagttcttttaggtgattttgtccaataacctcatcttcttatgaggcttttgatgtcctgtggcagcacctacttactggcactggagaaagtccccagaatatcctgtgattgtattttacatacatcttcactgttagtggactcctagaagacagtcttagtcttaggtcatagataccttttccttccctagtactattcacatagtaggggccaaaagaatgatttttaatatatctataaaatcaggggagtgaattaaattctctctcaaaggccctaagatgatggagcttcttggttaatgcttctgatatatgtttcctttaggtgtgtcttgtgatggaatatgctgaagggggctctttatataatggtgagtgtcattagacctgtctttatctagtggattaaaataatttgaaaaattttaatataaaccctaagttgtttaacattcttcacaatttgccgtcagagtcccaaaagggcataatttttaaaaatctgctaagaataaaaatggaaagataagattctataacattagtatgtgaaatttagaggtctatcaattttttaagtagatggtactttgcatttcattaaaagcatttaagtaaaagtttactttttaaatagattttaaaatatcttcagatttttttctttttgccctctcataactttgagcctcctcattttagaattctttaaccatatttcgatttcactctgctttattttttcttttttttcaaaaaaaaatgtgaaaactcacttcacacaaccttttatttgtagtaatgaaaaaaaactttgtgtagttacattggagaacagagttcttttaccctaaaaataccaaccatatgcagaaatgtattgtctcttgtagcaccagttatataaaacaaattgttacattttattttttaattagtattattttatgtaaacttttacttatatttactgcccatgtgttcatcattgtgatggatatctaataccccattgtcttatttgattgaactacttctggtttttagccattacagaaaatacaggtgcaaacatcttgatatacattgttttgtttctttctgtactgttctctgcctctctcttgtagtagtgtgccataagactgctcataatttatattactttataaaagtctttatctgtttgaaaaaatgtggtaatgtatattgattttacttcaatgtaggaataacatttaatagatgtactattaaatgttaatatcatggcaattatccactcaaaattagtagatattttcatcctttttatttagaagaaaaattaaaaggccaggcatggtggctcactcctgtaatcccagcactttgggaggccaaggcaggcagatcatgaggtcaagagatcaagaccatcctggccaacatggtgataccctatctctactaaaaatacaaaaattagctgggcgtggtggcacacgcctgtagtcccagctactcgggaggctgagccaggagaatcgcttgaacccaggaggtggagtttacagtgagccaagatcgcaccactgcactccagcctggcgacaaagtgagagtccgtctcaaaaaacaaaaagaaaaaagaaagtaaaaaattaaaagcaggactgatggagcatatgtatatgtagaaaaatacccagtcatgtgttctgatagtgcttgcattcacattgtgtcttttgttatatgcaataaagttctttttagtttgtgcctttctttcgcagtgctgcatggtgctgaaccattgccatattatactgctgcccacgcaatgagttggtgtttacagtgttcccaaggagtggcttatcttcacagcatgcaacccaaagcgctaattcacagggacctgaaaccaccaaagtaagttataataatgtgacacccctcagcctcttcctccttctctctcactctcaccaccccgaacccactctctaattcaagctcattattgtacaggagtttctcttttctctatttggcttactcagtgtttacttttaactcaccttcatcatttagtcatttatctaagcttgtattttagatgttgtctttagtgggatttttatttttggtaacctctaccttagattagcatacttctagaatctgttagcctataaaaatctcattttgtgcctgcagtatataatgttgctgttagacaattccttgggggcagagataggtctgacgtttttcttgctgtgtccctaacacctagcacataaacattctacagaaatttgcagagttgttattacttgctctttcagaggaaagtaaaagggcatttcttggcatctgggtagaaattgaaaatattctggattcttcataatgtgaatacttgggactttaaaaaacttataaattccttagataagtattttaaaagactaaaactttgggggttttgtttgtataggtattcagttaaagaaaacatacacataaaacatattgtttccttttctctctttttttttcttttatgcacctgtgacacagtaaaaatagtctccacgtatcttctttaccctccccccaagctcccaccccagcacattagtctttacagaagaggtttcccttaggaaatcagtatagtcttcagttattccattctcttgatactggttaaagcattaaaacatcccttctgggtgcaacttgtcactctcaggtctaatctgatatactctacataggttccaactcttagaatcactgttcttgctatgtatcttatctctactcccaaacttaaactgatttctgtttccccaggtcactgataaaataatgtttaagcttttatttttcctgaggctattatcttagttacctgccttaactaatgaaaaaatcacttagcctttttttcttcattgtgaatattcagtcatcctttttccactatattaacagagttgaattattaaagcaaacttatgagaatcacagctcttaaccagcaacaaattgacaaatgatccaaaggatataggcaagcatcagatacagccaaagcattcttttcctaaaagagtctgaacgcatctgatgcaacacccaaaagtatcccttttctcctcgttacagtatgttttggctttggaataaatgattagttattgaacaatatatggagaaatatcttacaaaaggaagtcatttccattttctaacatcttttacattgcactaattacatggtttaaatgactatccctaatcttcatccaactacaccccatgaattttaggtttatttaatcaacctagttagaccagatatatccttctaaaatcatttgtagatagagattctccttttgctagtaaataccattaacatatttacagaaggtctggtctaggtcatttattccaggcctctccatgattggattcatcttgcaaatcgtctttggagcccctggtatacaagttggactttagaatcagaattgattctagttcagaaagtactgggtaaaagaaattctttggaatggctatgattttatatataattggacatacatgaatacctgctatatctttattttttaattatttttattattattattattttttattttgagacacagtctcgctctgtcgcccaggctggagtgcagtggcgcaatctcagctcactacaacctccacctcccgggttcaagcaattctcctgcctcagcctcccaagtagctgggactacaggcatgtgccaccatgcctggctaattttttgtatttttagtagagacagggtttcactgtgttagccaggatggtttcaatctcctgacctcgtgatctgcccgcctcagcctcccaaagtgctgggattacaggcctgagccactgcacccggccaatacctgctatatcttattgtcagtggaaaacctacagattctgtggtcaggaagagttcctcaaaatggtatctaaagaaggtacctgatgatctagggaggtgttttatacactatcaagttgtgcttgtgcttgtattttatcttttgcaagtttattcacatttacattagaaattaaaatgtgtttttaatcttaacagtgtgaaagtaagcctacaaagataatttaagttcagatttcagtgagccctgaatttcctgttcaaggctggtgaacttttgaagtcgagtaaaggagtactaacataaaactcattcaggaaaattatcttgaatcatcagaaattatcttgatatcttgaatataccagtataaaacaaggaaactagttacagagttcttataattttcttgggtaaaaagtgtaagagtttgaacaagaacattgagatgcgggaaaaaagctttgttgaagtacatatagaggtatactggatttagcattcttttcactggaatgattatgagagtctttttggtattatggaactgtgaatagtagtttatctgacttattttagtcacattggactaaaagagaagaaatttccaaatagtctctccagatgtaaaaagtttataaaacttgtaattaaaatgaattcctatgtactgctattggatattactacaatgtgatggtgcaaattatattacccatttctatttctctttgtcatgaaaagcaaaaccttgtaagtaagagtatgctacttggtgactgtagttgggtaatagtacacctaggaaagtccgaatcttaagttcagaaaattttccagaaatctctcattaggtcattttagctataatagatttgtattcctcccacacattcatagtctaagcacaaaaatggttttgggattgaacatttttagaagtatcttcaaaataaagacattaaattacagaccatttttttccttctatattggattattttctttatatagtgttactattttttaagtaatacatatttatgattaaactcccatttcaggataccgtaatgttgacctaacagaagttttttaaaccccacgttttattttggccagatagaagtatgatcaggaaagattttggagctagagatgaagacatcagaatgtgagtctagcagccttccaaagagagctaggttatggttaattaatttttgcttattatttctctgaactattaggcttttatagtgaccaagtaaattagtcatttcacagaagttgaatgataacattcattttgcttaaccttttccatttccacaaatgtctcttcttttattgtagaataaaatgttggccttgtaacttttgatgttttttgtttttttttaaacagcttactgctggttgcaggggggacagttctaaaaatttgtgattttggtacagcctgtgacattcagacacacatgaccaataacaaggggagtgctgcttggatggcacctgaagtttttgaaggtaaaatggcaaaagtatggtatgtttgataatctccctcactccttgtgaattcatatgtttttatagattttccccatttccatggttttatttctgcataatacataaagtatacaatgaaatctaaggggatattaaatatagtgttatatcctaaattttatagtaagatttaaatcttctatgcttctaagcatatgtacagttgatcctcattgttcaccaatttcttaattgcaaaattgcctatttgctaacatttatttgtaaccccaaaattaatactcatggtgctttcatggttatttgcagacagtgctttcatgtactcgcagacagtgtgcatgcgctgagcagtgcaaattttgagtcatctaacgcatgcttccagctgaggttgaacaagacaacgtttttccgtcttgtttcagctctcatgctgtaagcaggtgtccttttttgtgctgttcagagccctttttcatttttgtgatttttgttggtaattttgctacttaaaatggccctcaagcatagtactgcctaagtacaagaaggctatgatgtatcttaacagacaatatacatatgttaaattatcttcattcaggcatgagttacagaaatgttgactatgagttcaatggtaataaatcaacagtatatatgaataaggtgtctttaagcagaaatacgcatgaaacaaggctatatattgatcagttgacaaaaacatggtgaccagaggcacacaggaacctacccctgtattttccttaggagcagtgattcagtgttcactaattcagtgttctcagaaactttatagaacataaataccaggaataatgagaattaactgtgcttttgtattggtttcctagcaattaaaaattgagagccctaaagtttaaatgaggatgccttaaaaagaatgcaaatagctgggcgcggtggctcaggcctgtaatctcagcactttgggaggctgaggtgggcggatcatgaggtcaggagatcgagaccatcctgtataacacggtgaaaccccatctctactaaaactacaaaaaattcgccgggcgtggtggcgggcgcccgtagtcccagctactcgggaggctgaggcaggagaatggtgtgaacccgggaggcggagcatgcagtgagccgagatcgtgccactgcactccagcctgggtgacagagcaagactccatctcaaaaaaaaaaaagaatgcaagtaattggacagaaataagatactaagaattacaaataaatgtcaagcttatatgtttaccttcttttatacctccatatgtcactgaagttttaaaagagttgtctgtaaattatatgctaggtttctgtataaaaacatcaaattatcttttaaatgaaagaagttgaactgaaggtatgtgatttgtatgttaggaagtgtaaatgcccataaaattcagatacattcagttaatcagactctggttatagcttatttctttcagttttgatgactttaaagggttttctgtttgtttttagccaccccagaggaagagaaattgcaatgcaactagtcacctgagtggagctcttttgccctaaaattcaatttagtaataaatgaataatcaggtgttatattacacaagattaaataatgcctcctgtttcatatacagaatgtatacatttgacattgttttaaaattatttacttatttaatatacctttatgtgagttaaaatgacccaatgttactgtatgtggagagcaaaaagatttgtttatacaaaagattaattttattgctctagacaacccttaattgtctagagcaacaaaatgcagactgttaggctgtgtaagtttcttcatttctgaaagatgtcagtcaacctgtagcccaaattagactgtagcatggttgtagtgctatattacagtgtactgcttagcatgtaaagctatagctataataattgttcattcttacagtgagttgagtgtttgtttgtttttgggagattatgacgggtgcttattgtgctggctgattcaaccacctacttagtttgtaaattttgctgtgtaactcaggttatccataattttcgttacttacaacgtaatgtttaagtttataaattaagaatttcccttcaccatatattgaggaaaaaactgtaacactaaattagaaagttcttctgctttgatagcagagtagtgctgtctgtcagagtgggaagaaaatttaagattaaaatgtaacagaaaggaggccaggcacaatggctcatgcctgtgatcccagcgcctcgggaggccagagcaggaggatcagttgagcccaggagtttgagaccagcctgggcaacatggcaagaccccatctctacaaaaaatttaaaaaattaaccagttgtgccagcgcatgcctgtagccccagctactcaggaggatcacttgagcccaagagtttgaggctacactgagctccagcctggatgagagtgtgagatcctgtctcagaataaaataataataaacaacataaaggaatgtacagatgtttcatactctgccccagagaaagtatcagtctaaatacataaaagtcaagtcctgtgcctcttgatgaaaaaactgcctcttgatgaaaaaagatagaaaataactgagtttctgaagtagttttttagtgtattgttgatacttaattcatttaaaaatgtacttgttgaaaagacaaagtacttcagaaagagtagtttcttagttctacatgtgacagcctcatttttatccctgatacccattctcaaaatttaagccattgtttctgtaagtcatgtggaaaaatagtctttaggttatatactaccttttttttttctaggtagtaattacagtgaaaaatgtgacgtcttcagctggggtattattctttgggaagtgataacgcgtcggaaaccctttgatgagattggtggcccagctttccgaatcatgtgggctgttcataatggttcgtaaaaagaaatttttcttaaaagtactttttgtgttttctacttggaagactactcctgtccccttccctaaagaatatcatttatctctaacattaaaatgtacaattctttgttaagagactgctttgctattatcagactctgccctgtccctgccccagagtccagcagagcaggattgagagtagtcctggtctacacatgcggctgaggatgttcactggctccgctgattagggaaaggccatcagtacgcaacctagacagttggctctctcttagggagaagcatcaggctggatcatggaaaaaataaaaaaatacatacataaaatctctgacatggttaatataactggagagttatagcccttttctcctgaagaagcaagggcctcatcaaggagaagaagcaaagaataataatgcttcacatatttttcctgtttatattctcacccacccttagaaggtgagtactgttgcctcattttacagattaggaaactgaggcctagagaggttaaataacttgcttaaggtcacaagattagtaagtggtagagctgggattcaaatccagatgcttctgacttgaatgctcatatcttaagtcatattgacttatggactcaatgtccttgcatctgtcctgtttcttttatagttctggtaatgttgtttttaaccacatatgatgttagaatgcatcctcttcattagtaaagttactttacatttgcttgggaaaatagcttttcatgaaggaaaattacttaccttcttaattttagcgccactcttagttatttcatttctatgccttgtttataatcatgtgactaatggccattttttacattattccacaagtctaaaaacaaatgtctgcctaattatttaggtcattcatagatttatcaaacagtaccatcatctgagtaatcttagctgtttttaccagtttcctatactgcctttaatattactaccattagtatcattgtggagactgttcagcattgaccaggacagcttgcttgcttgctttctatcagttgtcagtaaataattgaacgtccgtgaagtaaagagtaaaagaactaacttgttaattgataaaattacaaagcacttttattactccaaattacagatcttaaactacaagatctataaaataaataccactttggaaatacgtacaaagagtttgcatcattctttgggtaaatacattcttccccccttcctctcattttcaattgtaggtactcgaccaccactgataaaaaatttacctaagcccattgagagcctgatgactcgttgttggtctaaagatccttcccagcgcccttcaatggaggaaattgtgaaaataatgactcacttgatgcgggtataatccttcttttgaggggctttggatttaggggaatttaatatgtgctgagttttaatggaattttaaaagggatgttattactatattctgctttatatattgctatgttttctaagtgagaatgggcatttattactcatagtcagaagaggaaacatttcgagagggaaaatctagttctttatcactggaaagatggctagactaggtttctagacttgcttttttctttttgcttacattagtggacaagtatgtttgtctctgggcctgttgcctcatttgtaatgtgggagaaactgaaatagatagtctctaaagccatcacaggacttggatatattaatattatgacttcaatacatgataaactaaattttacatttttctgataccaattttcatcaagcatttagtcatttatgcaaggcaataggttgcattctcagacacatttatttgagtgacttttactatttggcctattttcaggtttttatatcccagtaaaaagttaaactttcttctatttagaagaacccttttaaatgattatcaaattttcctagtctgtgaatcaagcgcctttagaattatttggaatattttacgcctctggtttttggtacattaacaaaaactgtgaagtggtatcttggctttaaaaagttcaaatatctatgaaagtgcctgaattttgaaacagtttgttcagtagaagaatcttacaatctccttaaatatagactaagtaatttcctaaatggtaaaacgttgtttattcaatctattgaaaatttcttacgcaaagcagcttgaactaatctactaaaagtttaccatcgtatttggataccagtcatatatagaagcctaggccttaaaggtgtgtgcataagaaaacaacttagtctctgtagtcagattacttaaaactttaggatatataagttattgcagttgtaattttgcttctctgttccttgtctaatttgaggagaatacgtttcctttttttctctaaattctaacatttttgtccagcagatactttgagtattatgcctccagtttgtagaaagacattcataatctatcctcttaatatttaaaatgttctaacaattattctatggtatactagtctcagtcttcagactaacagtcactggaagtttacatcactactgtaagaacatgagtatgttttacataattatgagaaatgatactattttatttcatatgtttctctagagaaatatttgctgttttcttcaagactatctagactccaatgtaagctagattcttaggtaggtgcatggcattgatcaaagttgaaatccaagagtacattattgtaatctttgtaaaataaaaaacttaggcacctacaaatttagtatataacttagggaaaataaaacattaatcaggatttaatttgtattaaggaaattttaagctgtggtttacttttttatatatagtactttccaggagcagatgagccattacagtatccttgtcagtattcagatgaaggacagagcaactctgccaccagtacaggtaaatggatagattggaagagtattgacttgatttttctttcatctctattcccatgaaattataatcaagaagtaatgaataatgtccccatttgcattttaattccttcatttcatatgattgactgcaatttgagtttacaggtgcgtcattcttcatgtaggtaccctgattaaagagttattgaagacctgcttccaagtcttagaattcctacataattatgaataaaaagatggcatattgtattacagtgaatgtcattcttaacttgaaaaatcacttttacatgcatactactagatcaagtagtattagaaattattgtaaatgtatttaaacatttcttcatcacgaacaccctagtttttgttctcttctacagaggctctgatttaagaagctatgttaaaagttccttagttttccgaaatgtgaagtagtagtgggacatgtaatttgtggtcatcaaaaagatagtagaaataatactgtaacttagaaatattgtacttctcaaaatatagtggcattataagcatttcattattaattgaaacttaaagatatgtgtgtgtctatatgcacatgtatttaccctgcatttattgaaaaatacttttactgatctatttctcccacctcaagaatagttttatttattttaagatggttactgcttggctagttattctcaaattccagttttactgaaaatattttgagttgctctgaattctaaaatgtacttctctaaaattctatcatttgtgtctcccacgtcctctaaactctctcttcatttccttactgtgaccttgaattttttgagcctcccaccttttcactggtcctcagtcctcttaggtccttttttctttctccctccacttaattccaatcaactattataattcttttgggaataattttcatctttctagcctctctctcaagcttgcttggctaaaccacaagcctaatgaaagctgacactcggcttactccttgcctgtaccaatgcagctgagtgtggctggagatagcacaggtttactatcctcacgtgcatgtttagtgctattggacagttgtactgtattgtagttcatctctttcctcctatatgtcttaattttatactgtagcctctcctcagacttcaaacacctcctcgccactcctcactctcagctgatcttgtttgctctttctctgagaaaattggagtaatcggaagacagcttccacaacatctgtgcccatctactctgctttcttctgttactctggctaaactatccatacttctggccaaaggtgtacctttctgcctgtgcattatatcccatctgctcctctgagcaattctcccctgtctcttgcatcatcagttttagctttctactggatcattcctaaaacatacgtagtctgtatttgcattcactagcttctcttttccccttctttcttgagctgactccattcagacgtattatgccagtacttcagaattgttcttgtcaaggtcactagttatctctacatcactacatttaaggaatcattttcatttctcatcttgactctcagtagcacttgacctaattcattactttctccttcttacagacagcactttcttcagttggcctccgagataccatactagcctagattccatcttacatctctggccgtctgttctcagttttctttgctggttattcctcatctccccaacctagaaatgttggagtgcccagggcctgctcatttggcttcttcacttatctgtctgcactcatttccttggtaacctcattcattattatggccttatataccatctgttggctcataatgttttccatcttatacctgaactctatactcatatatccaactatttcctttacatctactagaaactcaaacttaatattttccaaactgagttcctgatacttccttcaaactcactcttcctttagtctttccgcatctcaattaatagccctcagttcttctactagctcaggttaaaaaccttaagttattcttgactattagaagactatttaggcatcttggttccttttttgtgctatccttaagtttctcttaaaatgggtttgtttggatatcttcattagcttgaaaagtcttattttatttctgttcctgcctggctagtttataaaagaatgtaagttacataataccaagtgaagcatttgtattatttccagccattagtcataaatgtttctgcttttcctaggctcattcatggacattgcttctacaaatacgagtaacaaaagtgacactaatatggagcaagttcctgccacaaatgatactattaagcgcttagaatcaaaattgttgaaaaatcaggcaaagcaacaggtttgttatgttattacaagtaaaactggtaaccttaccagtagtcacaatattatactaactgaaattaattatttaccatcttctattttataaatcctgaattttcttcctgaaacatgcaaaagagcttacaaatagagacacgtaatgagattctcctaccatttattaccaaatggtttttccttctaatgattgctacctttgccaattctaaatccctatctataataatccctaaatgtaatggttgatggttaaaaatgtaaaatgggtatattttggctgcgctgcccagttagaggagttgttctaagtctatcatttcatgctgttcagatttattatatttttgccattgttgatttttaaaaatatttcaaggagtgagtttattcattttgcctgaggcatttaggttaacgaataattggggcttttagctcccagttctagtgactgccttttcataaagacagtatctgcagcttgctttcccttacccctgtagctccctctcgtacaaacttccctctcctttcagagcagaacaggatctatcagaatcccatttgccatcttcctccttttaggttgcctaagattgctaaatctaaagaacttcagtaattcagattgacctgtaattttaacagagtgaatctggacgtttaagcttgggagcctcccgtgggagcagtgtggagagcttgcccccaacctctgagggcaagaggatgagtgctgacatgtctgaaatagaagctaggatcgccgcaaccacaggtaaaaaggaactacaagtctgaagagtgaaaatgtatataagcctttttggccatggtagtttcagttgtcaaaggttttttgtgtgtgtcttatatttttttttaaataggaagtaggtttacaatatatttttctaagttactagcaatagtttatgcatttatctcaaattccaaataaggaaggtatgacttgtaaaattatttggatgagaaagtatgccttcctcatttacagattttatcaaatgtaattctttctgctcaaacatgagttgaaagtctaagtgagaaattgaaattctgccaaaaccagaatattttggggattttcagtgatactactagatttttgtgctgaactcaaataatagcaaatattttgtttcaaatttaacagaaaaatgtattccagatccatgtatgatttgaccttctatctgcttcttcattccagtgacaaaataatagctaagctggttgtggttaatttttttaattgtaaaataaaatatcataattttattagatcttgaaaaagctagcatttaaattccattgttcagttcttaaaattattaatcatggaagaactggtcagcacaaaaacaattacatgttttgttacttaagtaaactgacaacctaattctgtgaccaggtttcattttagtaatgctggtttaatttggacgtttttggttttttgctgattctttccagggatcagggggagctgattttaaaagtaaacacgtttctgttgtggaaaatgtggaaatgtaaacaagccaaaaaaacttacataattaccccactcagagataaacacttaacatttttgtgtatttaccccatcttttaactatgtatgtgtataaatgtatatattcatgtgtatttgcatcttttttaacttagctaaccaattttttaggtctttttttcacttatttggtttttttctaaatagaatattctcattgtgtgtggagctcttttcagaaagaagttgtcaagatggaccatcatactatacttgtcttcaactaatcatgatcattgattttatcagctactattagaatccattagatataacagaatatccgaaataacagtgtctataacacataagcattatttttcacatataaacaagtctggaggtagtgggctctgtgatcttgaagtaactggtctcctatttctgtgctgtaatccctactgtatagcttccattctcaaagttatcctgtgctccaaaatggctgttgaagttccatttcatcacttctacattccaggcaataggaaggaagacatgggggcagggcaaatagacatccaagttctttgaaggaacattcccagatgcctctcttaacaacatccacacatcattggtcaaagtaacatggtcgaatggctacacgtagctccaagggaagaggagatctgccctcttttatctgatgacttttctgtcctaaataaaatcagagtactattgctaaaacagaagggaagagtggaaactggcagaagatagctgtgtctgccacagatgggtcttcagaaactatcaagttgagtagaagtcaccagccactgacaagcccatgagtctccatgagtcacaagtatttctttggagcagggttgtctcactgtagtgtcagatgaaccctactcaccgggacataccctcatgctttgaggaacccttttcacttcagggatgttgttcaggatagatctgccacatactaattgctgtctcaaaactgaaaattgttataataatggtttcatgtcttcgctagtatcatatttctagtcaagcactggttttttattattatttacagaaatgactttgctagaaggataaccacacacattaaaattttgcctaagtgtagaacaaatgctattgtacatcccttgagttttacacaatttaaattttttcatgaattgtcttacttggaaagagtcatactttccagccttttgacagactttgtgtttactgtgaatgtaccctaaactttggaaaatataataaatatttggtactagaaatatgtataagtatgactacaaaagcatatacatttcacactttgattcaataattattatttaatcattggattttactttatagcacacttcaagaaacacctaacttgaacatgtattcctgtgtttgtgtaattaaaacaaatacgacaacttactttttaacgcctttcttcctctcctccttcgttcccccacccccatcacagatcagtgatttcacttaggtagactgtttctatgaatatatttgaaattttgcttcctcattaccctgcagctttgtctctgttctttttatttttttctgctaattaaaaccagtgtgtaaaacatcttgtatttggtagttgtttgctctttaatctcgccttttctgagcatggatgaaaagttaggtagttctgcatgccattctgcatgaaatgttattaacatgaactatttgaaaatgagtctatttttgtagttaatcattttccgtgttactgtttgtggttgtttgcatgtatactgtatatatgtgtttttgcagcctattccaagcctaaacggggccaccgtaaaactgcttcatttggcaacattctggatgtccctgagatcgtcatatcaggtatcatagaccacctgagttggtctaatagctgtggaaccggaataatgatccctggtacttgtaaaatgcttcttgctccaatttttacaagacatgaaaatggataccttgcatgcagtaattagggagacagattgaaaaactacatttattctgaagcagtcttgaaaagatacctctgatctacaataagtgaggataaaatagaagagaaagtaaacctttttggagaagggagaacaccaacccagaattctaccaacttcctctctacttttaagtgagcacatgagctaaacccagaccttttttgcacccaacagaaagaggaaacaactaattaaaatttgttattttccttggctcctttccttcctcagttactgctttttgggtcccctctagactttctgtcctaacctctttctgttggtagcaagtgaatgtgaagttgagagaagagagttgctaaatagcattttgccttaacctggaaaacaaaaagtaaagctaaatgagatgtgctgttttgcagggtatcttgccaaagaatcatgtaaaatagttggtcaattctgatttttgtgtattatcaggagaatctcataaattacatgtttttatacctaacttacacatggtactttagtgtctaaaattggtaaactgctttatttcttatggtgatcatttcatagaggaatatgttaccatttttaatagaaacttaaatggcatattgaccttcagtattgattaatgtattatcaaaattatcatttatttatccctttaggcttttctctacctctttacccaaaatcttgataaggaaatacatattttccacacacgttcatgagtgcgagttggatgaattcttcagcatgctgtcctttgcctgtgattgtgtttttagcagtgttgataattctagttgaatacctaatggttattttctcctctactaaactgaaaactatgtaaggatagaatccatatctttgtgcattattttgttgttgttgcttattattgattgtatcagcagttgctggctcagtgcttcacatattaagcatattaacatagtgtttaataaatacatttattaaataaatgaacagacctattgagcatctcccctggtgagaaactagcatacaaaaatatgaattatactattcttaggtgccattttgtctgtataaaactatcttatattaattttcccctggttatcaaagtggtttcttattttacaacatcattactattgctattcaaagagtagagttaacccatttttcacatggtaatttttatttattgaatctggactgcttcagaaattaacaaagagatcattttacatggagatcagtttacctccatgcggaaaggtactgtgtataagggacgtactttaaagaggtggaagcatttaaacttacataccgctgaactgtgcttcccttaaatgtttgagggaatcaggaaaatttagacagatggcagtgtaatcttatgactaagcattaagaataaatttatatatggcagcgtagcccacgctatacaagataatgggggagggaaaaataaggaaagaataatagtttataactgtcaggtactactggcatctagtgggcagagaccagggatgctgctaaacatcctgatgtgtaccaggcagtcttctccaacaaagaatgatccagcccaaaatggcagcagtgctgaggctgaaaacccctgattagatgttctttgtgccctacaaagtagcttaaagtacatcttattttacctttatacaatcttacaactaggttatcggatgaaattatagctgtttaacagacgaagaacttagatctgatgatgtttagtggtttttccagaatcatatagccaggaccccaacccagatcttctgactccaagtcacatccattttttgttcttttgtttaagtcagagaagctagagtaatttcttcttgctttctcttagtgttcacattaaggagagctcttcagccagggagatcctcttttatgacattgggcctttatggaatcaggtaaccttaattctcttaattgccagagcagcagtgctattcatatgaaaatattattcagtaataccttttattaaatattctttttaggcttttcccccctcagatatcaaacattaacttactcaggtgcactttctttaatagaagaatacaagctgtagaattgacactagtggacataaaagccaatcatgaatgtgctcataggtaatgtttttaaattaaatataaaaataccgcccatcctttgggaatatctcaaatttcctacatgacattttaattgtaaagaagggtgatacttaatttccaaaatttcttaatactttctagaaattgttttgttctaagtggatttcccacaagctttatggtattagcaaatacttcttgatatattcaaactgtttaattagcattaaaacccaattgcaaggattctttttaaatatagctttttaaagatcttatttacatggataagagtttcgttaatacttccctttggccaagtgcaatgtactgagtctaatgtacttcttggaatgaactacctctcttaataagagcaatccttcaagcatcacaaaaaaggttttgtatatatatctttaaagtcactaaaatgtctaacctagtcataggtaaagaaatgcaaagaccctaatcttgtaatcttgttttttgctcgctcttcaaaatgtgtatactatgccatcagtcaaatgtggaagaaaaagcaacttagcaaaacagcactatttatcaatttagtagtctctcagatcatacagaaattaacctttaataccttaggactccctgtgggtcagactgtacaattttttatacctcttctaccatattactggctctgaagaactgacaaacttttgtacggtaacccttccttctttccactgtccatctgcccttaaaagagtgagctttatagattagcctggctcctttttaccaaggaagacacgcagctaagagcaaattaccagtagagtgtgtgacattttgctgactcttcctttgtagagaaggtcctgccaagtagcagtgtgctacctaagcaaagtaaatgtaaatgtggaagtttcttgcccagtatttagaccatatgaactacagttttctaatgcatttgcttgctggtaagttggaagggacttcgagaaaagaaatagattttcttaaatgttttttattaaaacttgagttttaaaaaccatatcctttctcctttcagccagtacatctaatttgttacatttatatttgaagaaaagggaataggtagcagattattggattctttgaagtttttctagattttttttgttctaggactttaataagggcagtaagaacacagatcattgttttgcatggattttctttactttttcccatattttctttttgtcactatctaagcttccaagaatctatttttcacccaccttcatctcaagtacacaaatgaaatagattattgggattgtgaaactatgtaagacattctaatgcagttcatctgatgttagaagaatacctaaattttacatttcttttaaaaatccaaatgtcaaagaggaacaggtagaatgcctaaatattacaaaaaaagaggaacaacctttttcagtttaacatgtagagtaagagaataagtagttaagaaagcgaattatttttcatgcttgtagcatcagtaatggaagatgggttgttctgctctggagcctttgtgtgagtagttatagcatttaaggaaataaactgtaattataatgcattctaaaatctactggaaaaaaatactgtcatatacatatatacttaccacctataaaagatttaattaaacattagtcttctgcacttctactctgatataaaatttgttgtacatggttcataccggcttgattgcttttataaagtgaaatgagtttcccaaatgtgatatgcaaaagtaaaattttctaaattacagacatttttaatgctattatatcatcatagataaatttatttcttagttcagattagattataatgcttgatttcaagtacttgaaaaccatccattctatagatgaacattgccttgaagtgcttcaatttgagaaccttgaacagtgttgctttagtgtaccttttgttatttctaagcctaaaataatatggcataacattcgagagcaataaaatgccttgaccaaagaggattttctgtcttacatactgttcttaaggatatgcaaaagaagattgaatatacaaatgtttttgagtcagatcttactgaaatagataagatttttgcctagtttcctgaagaacctgaacttaattgatatttattgtttgttatatcattcttaaagctaaaaagaaaccttaggtgtccttatgatttcagccgcatttagatctcttaactgaataaaaaacgcgtattcgcttttaatttcagtcaaggacgtttagctctattgtatattggttttttactaacagtatgataagtagtaaattggagtaagtagaatgtagagaggcccaaacattttaactgaaaaatagatgagtagttaggcttctaatacttgtatcttgttgccctccttcagaagtttcaaatgtcaggtattggcaaataaattatctaggtggggagggctttatagaatgcttaaacaactggaagcagagatgcttttcaaggacacctgagcactattttgctttctccaccaggatgaaaatatcacttttttaatagtatatttggttcaagagccggtcggtaactaatgtttgtaaacctttctttaactggaagcatgtaagttattaaatatttcctccagactactgcagcaccaatatgaagaggcaaagagagaaagaattgagtttttctagatctggcaagttctcacctagcacagatagtgtcattagcagatgtaagcctttgatagggatcctagggctaaggggtgctatactaagatgtactgtactagtttctgtgtatagccacctcactttcaataaaattctctatttgtggcatattaaatagggaagttaatctaactttataatgaatatttaggtggcctttctgccatattgtatagtctaccaagatcactttttgtaatctaaaaaattcaactctaagctaataaagctggtttattggaaagcaaataaaccacctgacggacctttccagtgaaagagccagaatttgttaaaattagtaaagaaatacgaaactttggcagcctaaattagaacatatattttaaaattacatgttcagtttaccatgaagcagtaatgtaatgctagtgtatcatgctatgcatttttttaaatcttgggtattttacacatgaagagaatggtgtcccataatgtgtaatattcaaaactcgtgaatctcaaaatttctaacatttaggttaagagaagtctccaggaaaatgtagtgttgattcttacatgaagacagtcttcaggaagttttaaagtagaaaataagagtagtgtaagtcaaggaaaactatgagcttaactgataagaaaaattacaggagtggctgtctgggacctaagccagcagtctctggaagaaacccgggataacttttaaataccagctcaggaaatcagttgtacttaaaagagcagcttttttgaagaggggctctgttttaatgacattactgtaaaaagaatggaactgacccctaagttgctttctatttgcggtgggcaggagtgcagatttagtatgcactggcaatgtgatgtattcttagaagtcattctaaaaagtggaatttgttctctattataagacatgaacgttccagaattcattacagaatgaaatactcaggatagcatatgcaggtttcagattccttgatcaggcatctgtttacatcatgctgtcctcatttctactactttttccatttacactaccatgtataatataggtatgtacatatcaaaggaccaaaaaaggtaaaatgagtgaatgtctaaattagtattcagttgcaaaaaacttcagaatcaattcaaatttactgagaacacacccagtaattttcatttgaagtaataggaggttgatttttcttacattcatatttctaaattatgacttaaaatttaatattggagcaacaagtatttgttgattgcaatcctgttttgctttgtctgaactatctgccagatggtttctgccatggttgtgctaattaaaatgcattgcctaatactgcttgctttgattcatgcagtagcttaaagatttctcattttatggcatttgttaactgtcagctcttctttaccttacttccttaaaaggttttacttcccttttctcctatccttccacctaaatttaagttcagtttttgttgttattgcaatggtgatgtaatggtttatagacacatgtgtcgggtggttcctcagattaacaaatgttgctgtgttgctaatctgaaaagagaattccagacacttttacaagcctgtctcatcaccgctaattttagaatgaatgtgttgaatgaaatgtgcctaaaattgcttattagtcacggttgtggggatcctttttgtccttgggaaacaggggtagttgaaagtattcagaaaagtaatctagtggatctaattcaataaatgcacagttttgttgttttagtttgtaatgaaaagttgaaatttttggaataaaatgaaatttgaagtaaatgtgaattcagataatgcaaagaattataaaacgtagcttaaaatggaaaaaaactgatgatgtcttacatttgcaagaggagttacaaatttgagtttttatattcactacacatattattctattaaacattcttattccattgtaaggtccttttagtttatctgcagcataataatggggtcatgtgggttaaggtgctaaattatattgctgattggttttaaaaggatgtctctacgaaagattctggaagtctaaaattttaagaatgaattctgtctactaatcgggaaactacaattagagtgagtacatgttctaagtgttgcccactagttgagaaattacgtaatacagatttcagagtcaaaagaattttgagtattgtatcagctgttactcagtattttggtgtttccttttagacagctgatctctcacgttagaagatactgcataaacagctttattcccaaataaaagtgctgagtgaagccattgctcaattcattgttttgctgaggacttatatgtgtagaattctctcataaattgatttttaattaaattaattataaacatagaagtttctaaagcagaattaacacaatagcccatttcaacaagctgtatatttgagaacagagtgacagttattaacatccagtaggaaattaagagttgttgttcacaaataataaattactagattctgacaaagactaatggggattaagtaagcgtgactcaatataacaaatttaagcctaagcatcttctaggccctgaaatgaacaaggtattgctgccagttaaagtcagttgtgtcttacaacctgctagctgtcttgctgtaaaaactgtaacgtaaggcccttgaaatagatgccgtcatcagccccagcccccaagcattcatctatttaaacacatgacagaagatggtggaagagagttcagcagctattcatgtggtagaagtggttattgtattaggacatactctgttgtaggccagcaacttttgagttaaaacaccgcagctgtttctcttcctttctttacatctttctcttcttttttttttttcttagcaataaactcacttttttttccccacaaacattttgtgtagatccaaggagcaacaaattccaactttctgctgtagcaattacacgctttttgtctgtttgactagattttagtattttactttttttcttctttttaaaggcaacggacagccaagacgtagatccatccaagacttgactgtaactggaacagaacctggtcaggtaagacaacattcaaattttctatctttgaagaatactaggcagaaaacaagaattaactgtattctactctgcaaaattagttttatgagttgacctaaagttgtgatagagaaattcattgcacctgaacttaaatacttaggggggaaaaaaacataggtgccattgttaatttaacttgaaagataatttattaaagtaggtttattaaactccatggaaaagtaaattgttcattagcgctgtatatatgttatatggttttatgtatgttttaataagtattcaattttataatttaacaatttatcattaaagtgtcctttaaagtgaatcattaatatgtctcctttttactaataagggtagtaaacatttccccaataagttgctactcctctagcgccacgtagggcattacatggagaactctaacgtcttttaacttggcatatccactggattaatatttttttcaaatatccttaagataacatttactaagcaaatgtgtaaactctcgaaaggcttctattccagtggttaagatttcattgtttatatttctggatcctcctctaaactctccttgtctctttatcactgctgctttgcagatgatgcagacagtgttataatttaagccattactgattagtgcagagttttaacccaccaggtatataaaagtagctcagtcattgttttttctgtgttactcagattaatacacttgacatatataatttattatatactatattctgtaaaatgaatgaagattaattataaggtgtttgttttcagctgtacaagaataagttttatgagagcagcataaaagtaatgaaattaagtaatgaaattgttacatattaagaagtattaagtattaaattattaagtattaagtaatgaaattattacatcgtgacccatatttttgtaaaattttagcgtttatatattataaacaatctgttgtaatttatgataatatgtattagtacttgtcatcctaaaaaggtattttattattatatcatttgtataatatacttaaaatttgggagatcctttgtagtcattaataaaaaagtcttttatacccatcaaccaacttaccaaaaaccacttcaaatatttaagtggtgaatatccttgatcttcatttatatctggaaatatgtttatttcacaaaatgcttataaacacatatataaataaaatctatatagacacattaatttattatgttttgtgatactagtgactctaaatcttgatttcattatttagtgatagtttttttcagtgcatctgtttttgtaagaccccagaacttttggctgaagtttcccgttttctccccctcagatacttaaaagttttaatcagcccatttagtaacagatagtttgacatctgctatttgctttgattctttggaggtttgatgagctcagccttttaaactctgtttactattgccactgatattccagttatgagaacttctagccaactgtttgactaggaatgagaagcttgtcctaagacatgtcaggagcagctactagtttgaaagcttttctgtagactctagaataaaagtgttgccataattcaggactgatcttcccacaccaagtcttacttatttcttcacaagttccacattatttgagattttcgttgttacccttttaattcacaataccttcaggtagtaaaacgctggaactgaggccaactatgggtgtgggacagtcatttgtggaattgtcatagaccactctgaaagatttggggtgagggagagtttgatatgggtgagggagagtttgatatggcagtaaaacctgttctgaaacaggtgatgtatgaccattgtgtagccacattttaaaactgatccactctttcaaaattatttgtgttatagccttaaaatgcctaatgttcagcttggcatgagagtggcaaatactaatcctaatgtactatgaaaacatttctcccaaaaaatgtatgataagtgaccattaaatcttttaaattactcacaaagatgatattcatttgaggaagaaaagtattcacaatatgtgttttcaaaattggaaggtgccatcctttttgaagtctggctaagcgtgattccatcttgcagaggaaagtaaacttattgtactgtggctcttgactcaaaacataatcttagtaaaaccacttagaatttccatctgtaaactaaaattaaattggttgtttttctgctgccatccatttgagaggaacagtaaatgaagcaagcttcttaattaaaagtaatgatataagtataggtgtaaaagattgcattcttacaacatacaactcactttcaaacatggttttttcattaattcaggaagctttttaaacactcaatagatgtgacttcctagaagctttgaaaagatactgagaaagaaaaaagcagtccctgacatccaggaactggtttgacactgtggcctcactgttgttagtagctagccttattctcaacggctggctgtcacagctagagcatgttactgtcttattggacataatctctcagaacaccaatatcagacaagataatgctgagaccgtgataaaaggagacaaaacaagactacttcggaatgttttctaagcacagacaaaaacaaggtcactgtgccacccacaaaatacctaacattgtcctctcccagctattaagagtgactgctgcttctttaccaattacagcttggtcctcactctggactgccctccctgtggaattgcccttgctttctgacagcggccaatctggaacgaacccctccttcctttgagtttccccaaaatcactcaaccaaagcctaaatcctataatactttctttttctaaaaccctcttactgagacaccccatgctgccccatggtaagcattctccttcactgcaataaatattaaacccaactctttccactattggtgtgttcctggcagtctttggctagagggctttgacaataccaataaagcctattccgcaaggacctcatttggagagatcagacttatgcccaaatcaattagaaaactaaagtaataacagcttccatttgttgtgcactgactttgtgccagataggctcttagtatacattatcagaatgttaatcctgttatcaggatcttagtcctgtgaagttggtactttttcacctaatttgcagccaggtaaagtgaggatgagagaaactgacctaagtctcttacttccttatactgccagtaattcctataaccaggttttgaatccagacctgattgcaaagcacacaaactctatactttaatcattctaacttgcatgtgaaactagatgtgatgcatgctgttatagccctagatctcttacatttaggtattttggcttctaatagtctgcattgtcattaattatttaaacagttgttaagtgatgatgaattgtagctgtatcatatcattgaacaaggttaacctatcttgataataaatttctaccaatgactgcacaaatttatgttttatacacctgggtgagccattctgtgtttcactaaaacaatatacattcttataaatgcctgaataccccttctggaattgtattcagtatagatctatattcaagaattctcttagaggaggctgcagtcagtgaaaattacgactgcaagatgatacagttatgattatttagagaagtgggcatattacatttccatatggactttataatctacttttactagtcaaatatgtgactttgggcaagttccttaatttccctgagcttctgcacccttatctgcaaatagggaccataacacccacctcccagagttcttaacagatgtgaaagtgccagggcacacagtagatactaatccatgttgtatgccagcctctccacagtgtgcctcaccgggctcttgatatcacttccttgctctcatgatagtgagaaataaaaagaaaatagcacttggaaagaagtaaaatccaccagcgttctttctgtatcataaggaaaccttgtgtcaaggatcatggaaagtatttgctttaaaggtctcttatcgcatattgagtgatattaatatacattgttattatttatttaagggatgtgatttattatactacttttttccatcttcattctgcacctccttttgtgtaaacaaatgttctggtaaactctaaatcagaaacttatgtaatagttttgaataattccttcttcatagtatacctttctattggagaatagacacgtttcttcttttttttttttttttccgagacacagtccccgctgtcagccaggctggagtgcagtagtgtgatctccgctcattgcaacctctgcctcctgagttcaagtgattcttccacctcagcctcccgagtagctgggattacaggcatgtgccaccacacctggctaatttttgttttatttttagtggaggcagggtttcaccctgttgcccaggctggtctcgaacttctggcctcaagcgatctgcccgcctcagcctcccaaagtgctaggattacagtcgtgagccactatgcctggcctctgttggagaacagacacctttctattgtagaagaccatgtaagaataataaaattctgaaatttccttatgaaaaactgtagtgaagccaaaatagatcaagcctacagacctttagattagaaagaatattttcagtacaaccttcatgtatagatttaattatctgtaactaccataataagtacccatgtaaatccacattaccaacttatacccattttaaaaatatttatattattgagatgttactttagcaagaatatcatagaagtcatcatttaatctctgtgttttgtgcttgtataattttagctactaagatttctgagggtattaaatagcttttaaatgtcagtctaaataataacactgggtgtaaattcctgacttatgaaaatattttcccagtctttcaggtaagatattaaaagctgagctttatttttgtctgtaaaataacttccaattcctttttataaatatagggataaatttctggtcaaaggccaattctggttcatgtctactgatggtaatctgcccctgaggtttaaatttggcttagtattcttttgctgccttaaattgctgtgtcacgtttctatactcttgtgactttcatatccagttcttttggtaagtcaagtttgcctatatctcttaaactttgcaattaatgtggggatagaataagtaattttaaatgtcttagaggaaggagcaacttaaatgagttttaatagtttgagagcatttgtgaccctcagaattttaccagtgattttaaaaaataagtactgtaaaaacttcttcagtagttggttacaagcagtaacataaattcagccacaaactagtttgagttttttcattgattgtcagatgttatgtgttcctcttatttatgccttgtattattcacatactcaaaaactacagttatgccttgtttttaaatatttccttagtttttttatacaaacatattagcatatttttatttattgagatacacatttcttaaaatataaagatttatttattagttaatggatttaaatctaactgtgctggtctaaaaacagttttgaaacttgcattaaaagtgcaagccttatatttcttagtttcatagctgttggaaattacaagtgggacaaacaagcatgcacagaaggtgctaagagtttcttggaaagtagaaggtgaaaagaaaggtgtagcaaagaatcattttgcaaaagatttaagcttaaggagtactataaaattcctattaggtccaacttatttgttttaatattgcagatgttcagtgacctcttttttaaatatactaaatccattctcattttaaaaacctaattattacttctactgtattttgttgatttctcacaactgatactgattcttacatgtcacaaacatgtgtttctctttttaaaatgtgcattagcattacactgactctgaaaccctggtctgccaccactttgaaggaaaaatgcctttgatttataatagcagttataactatgggcatatttgtgtacttgctttcagtcaaagaaagttaaaaagactcaggaataatttcataatgtctatacttgctttgtcaagggtaaaagtatcctaaaagtaagagtgaaacatttcatcactggttttctttggtgtatgtcgttgttattcttatatactaaaggtaaataagcttaagcaccaatcttgtatctgagtgctaatagcttgtgttctcattttattcaatgagtatctattatgtgtttattatatattcagcaatttcccagatcctgggaagtacaatataaaaagtacgcatggtctctgcccttaagaggttataatacttttgaagaggagtaaaactttgagactactataatttcgggcacaagttgaagtaggaactgactatacagccaaaattcaaagaagaaaaaaatctcgtgtgaagacatttcatgtacatcatttcatttaatttttataaccttatagatagataatactgtccttattttcctattgagtcttagaggttaaataagttacccaaagctgtactagttagaaatggcagagcacagtcaaactctgggctgtcttgtctccaacacccaacttcttactgctactactttttctcattcacacttcatcaatgagaaacctaagtctcagagaggctaagttacttacacaggttcacacagctgtaagtggcagaatggagacataaccccaggtctccaaagtattagactgaaacatgtgaagttgctgagttttcaactacaaaaacaccagttttatctggttcagttttatgcatgccctgtgcactacgccgtattatctttaggtgaatatgaggtcaggattaaaaactgcaagggaaacaggggcatgaggaattttaagaggagagaaaatccagatgggcaaggtaaacctgctgatggagagtcatgaatgccagagtgagaatttcagaattgattcagtaacaatcagtaaacgaacattttgcctgcagtacactgttaggcactccatgtcctcaaacacaaggtctggccttgtacacaaacaaccagagaagtggcaagaatcaccacataatgtagaagaaaacctgagctgggccttacagggtggggaaggattaacaaggagaagaaaagaacagaatgagcaatcttatatggagttaaaaattggttatggtgtagaaaagctttttggaatttctgaagcaatttcagtgggtacccaaaatgaaagtcatatttcatcagtttttcttcaaagttaatttatgatttttttctctgaaattgttaggaaagtacctttcactaaaagtataattagattgtttgtaacacaaaggataaatgcttgagggaatgggtaccccatttttcatgatgtgattattatgcattgcatgcctgtgtcaaaacatctcatgtgccccataaatatgtacctactatgtacacacaaaaattaaaaattatttttaaaaaaacagaaatgagaggaaaacaaagtacctgtcactgtttattatcctgaatccattgtggcttttcaagacctaaaatcatataattttagcactatatggaacacttctcatcacattcttaacccagccccaacccctctccagataaagagaggttgaagtgatctgaagcagacattacagcataattagaactcacatacgatggattctactcaaaggtacttttgtattgcatttcattttacttgttgcagtcttgaatttgagtgtttgtatatatgttgaagctagatataagattcttcatgaatttattttaagttttattttctataactccatgttcttttttaagtctcttctttggtactcagtaacacatcaagaaaaaaaaggtgctttttaaaaagtccttatgaggccgggcgcggtggctcacgcctgtaatcccagcactttgggaggccgaggcgggcggatcacgaggtcaggagatcgagaccattctggctaacacggtgaaaccccgtctctactaaaaatacaaaaaattagccgggcgtggtagcgggcgcctgtagtcccagctactcgggaggctgaggcaggagaatggcgtgaacccgggaggcggagcttgcagtgagccgagatcgcgccactgcactccagcctgggcgacagagcgagactccgtctcaaaaaaaaaaaaaaaaaaaaaaaaaaaaaagtccttatgaaacccattttagtttctgtgtcctttgaaaggctttaatatatgaaatataaatatgtagacaagaatgtatataatgtataagttatgaaaataaaatgagcacttgtgaacccaccacccagcttaaggaatggaacattagcaatcccagtgggggttggtccctgtgtgttcctcgcctgtggccttccctgtcatttccccaccaaccctcagtgccatgttctgtcatatgtcatgtttccagatatcataaataccttttatctgattaagaagtcctcttcccactgggcacaggggctcacacctataatcccagcacgttaggaggctgaggcaggaggatcgcttgagcccaggagttcaagaccagcctgcacaacacgggcgagaccccgtctctacacaaattttttttaaaattagccatgcatggtgccgtgagcatgtggttccagctactgaggaggctgaggtgggaggattacttgagcccaggaggtcaaagctgcagtgagctgtgttggtgccattgcacaccagcctgggcaagagaacaagaccctgtctcaaaaaaaaaagaaagaaagaaaaagaaattctcttctcatacatggaatttaagtttgttaaatgtcttttttataagtagatgttaaatgttgtcaaatgctttttctgcatctgttgaggttttgtcctttaatctgttgatgtgattaattttattaatggaatttcctaatgtcagatgagtgacctttgcagtcatttgcaaagttggataaactaaactttttaaatggtttttattgcttctacactgccacattatatttgctaatataatttttagaaattttgacttttgtgtctttttatttttattttatttttttggaagtgaggttcagttgtaactttctttctcacactgtccttacatattgatttttactgccttcacagaatgggtcagaaagtttcttctttctttgtttaggataatttaagattggaaaaatccttatcttgaatgtttgatagaacttacctgtaaaaccctcctctgtgcttggtattttctataatgtataggaatttttgaaacttttttttaaagaatgtgttcatttttatagtattgtctccgatttcaaaatactatcttttactatttttcattttgggaggcaaattcttttttttaactaagttagatctctagcttataaattgtcagtgtttctggttttttcatatatatatttagaattaaatattttcctttaaatgctcttatagtcacatccccaagtattagcatgattcacgttaaaagtcagttcaagtactttctaatgtcccttttgttttcttctttgaccaatgagttatttagaagtgtttttcaaaacaaaagatttttaaaggttttgaaatcagtataaaaagtaattaagttatgatactgaaattttttttaactttgagatttgctttatagcttagtacataatcagttttcattagtgtcccatgaatgcttaaaaagaatgtgtattcttcatttgctaggcgtaaagtcacttatgtttagattaagcttgttttttatggagttcaagttttactgtgtgtgttttgttttgtttttttggtctccttttatataatttacagaagaatattaaaatatattactgtggggctgggcacagttgctcacacctgtaatcccagcactttgggaggccaaggtgggaggatttcttgaagccattaggtcagcctgggcaacataacaagatcccatctctacaaaaagtttaaaaattagccaagtgcaatatcatgtaactgtagtcccagctactcaggaggctactcaaggaggatcacttgagcccaggagtttgacgatacctccttgagcttttttactttatgtgtttatatgtacagcatataaattttgaattgttggccaggcacagtggcttatacctgcaatcccagtgctttgggaaactgtggagggaggatcacttgaggccaagaggtagagaccagcctgggaacgtagcaagaccctggctctacaaaatattttaaaattaactgggcatagttgtgtgtgcctgtagtcccagttactcgggaggctgagatggaaggatcgcttgagcccaggagtttgagggtacagtgagccatgatggtaccactgcactccagcctgggcaacagagcaagaccctgtctttaaaaacaaatctcactgtgatggtggatatgtcctttttccttgcagttttttgatttatctatttgtatgtacagcatataaattttgaatcgttggccaggcacagtggctcatgcctgtaatcccagcacttagggagactgaggcaagagggtcacttggggccaggagattgagagaagcctggtcaacatagtaagacccatttctacaaaaaaaaattagtttttaaaaaataaattttgaattgttgtattctgaattgaaccacttatcatattatctctttctctagtaattttttggaccctaaaatacattctctctgatattaatataggtaccttatttggggtagtttttgcctggttttctttttttatcctttaactttctgttttctctgtctctgtaaattagatatgtctcttataaatagcatttaattcatcctgacaatctgatttttttttaaatatcttaactggagagtaattcatttacatttattgtggttactgataagtttgctctcttatgttttatttctctttcttttctttcaagttttgagttgaataaatttattcttcattttattattttctttctggtttgggagttatatattaattactacttttagtaaatacctttgaaattttaacattcatgcccaacctagtaaagatctgtaccctcatcctgaacaatatttaaaacaaggagttttaagtcagtgcttttcatgcttgtgctattgttattataattttagtgccatcttgtttgtttgataattctataaattcactgtttctgtcactgaatgttttcagtgtgtagatttatttccctgtttatcactattccttattgcatcttgatccttctatcaagtaaaatttttcttcttccaaaaatacatgcttgaaaaacttatgtggtaagaatgtatggaaggtaaactcagtttttgcccatctaagaatgttattttggcctctatcttcaaattttgttggctagacaattctagactggcagttatttttcagcactttgaagatattgttctgctttcttctggctgctttttctgtctcctgttgattgtttcctagaatttgaatgtatacgttccatgttgaactcaatttgtgagcttcctcctatttcttatgctggggatttgttgtggttggaatttgttgtaacctgcatccaatctggaaattttttgtggattcacagttaatacatttctcccttccacccagagccactaacccaagagagacaaatttgtttcctgtctgcttttgtaggtcagattttttttttcctagttgagtgaccttttctctgagagtgaagcctttgctgagttttagctttaagcagaggtttctccagtcttacttccatcctacaaaggcccaaggctttatggtccattcctctgagtgcagcagcctgtgaaaacagtagctctaggccattggtgtttagttgaaattccgagggctgtcagcttaagcacttactagtttcctgatattgttttgtttctaatctcagagtatttcttagtttcttgcaagctcatcagtttttaataggtatcatgcgtgagtgaatataaatttttacatatatataagagaggatttattttgttgtttacaagagttttggggggatctctaagtctcttcttgccttttaatggaaacgttctcgtcattttttttaatcaaaaaatcacattttgtttctcctgtgacttcttcctgtaggtgagcagtaggtcatccagtcccagtgtcagaatgattactacctcaggaccaacctcagaaaagccaactcgaagtcatccatggacccctgatgattccacaggtgaccagtctgtttcttcatacttatgaagttgaatcagtcatgtttatattcatttggccatgtcattactctaatgtttacaaaggcaggcattatactgttgtttagatttttatattaaataaactatttagtaatacatgttaaaataccattttgaatacagagacagagactgccttgccttctgtattttttttaatccagatactaaacatgtattttaaagattgtctgtttggggtttttttccagttgcgaagcgtattgaattcttgatacttcagcctgtgattttcctactagattcatcctactagatgatagtagtaaagtcattttttcagtaaccaaaatcggagaatggtaaaaatcatccccatcatcttcatctcaatcttttaaggacacgagatgtcatgtaccttaagttgaaaaaaattctgaccattgaccttttgaattgtttttaactgataagagacaccattttcagttatacaaatattctattagacctttagaaacctgtgatgagttattaaagctccccaacatgaataactaactgttcacaatattagtattaatgtctacctgcctaaaggtagtgacggcatcgtttcattatgggcaaacaggaaatgatgtgccatagtagaattaacttttccctaactttaagagaataccttgataaatgcttttaagtgtacttatgaaattttttatttatattatattaagtcacgaagggaaagatgatctcttagcccttggaaaattaaagcatttgatattttatataagatcgactatgttattaatagtaacaattagattgaagtttaaaagccagctttctgtctttacaaactaaaatacaactcaagtatttatagttatctgatgtggtttggtcaagtttataatttaatttaaaaaattaactgggtggtttttctgtgtgtcatgtaagatagaactatgtttagccagggtgtactctctagttttagtaagtttaaatttagtggcggcaaaaactcctgtttcacccctagcacagcccaacctaggactgtccagagcattcaccactacgcagcacatgtgtagaattcattatagacttgctcctccccagtggtagacagggcaatgctcttgcccagttttatcattaacattcaggtgatagcagctctttttgatttctgaaccccctggcaagggagtacgttctctgacattacagcatttgcccgggtctggtactcaactcagcagagccttctgtcttcagtctacactaatctgtatatgccagtcaatagtgtggcagattgtgacttcatgggggtaaaataaaaaatgtttaaggctctctctcacataactgctacatttctgcctcatatgttgcttctaccttccaactcccgtcccattgttttctttttctgtacctagaaacaccacaaaataccaattgctagaaataatttgcaatatcagctgaattttgtctttgccttgaaatatattgcacatgtgtggctataattttgaatacattttaaaaatggatgctctggtttaagtttataattaattcagctgtgcagtatttgtaagaaaaatattgataaccaagctaatagaataaattagggaacagataggtaaagtctttttctttgaaggcccactgaccaaggaaaaaattaagagtgtaaatgtaagttaaagtgacctaattaaatttttttaatttgagaggtttttgtatattttcagagaaagctaaagagcataacaatttaataatcatagccgataataagcgctcttcagttcctatttataatataatgggtattcaaaaagacacacatactgagaggatctagtgagagagagatctagacgcagtagagggagccgcagagggggaaactcactaaagaattttcacctttgcttagtactttgcaaacatgtattaatataaagtgtaagacatggcccattccttgcagtctggttagagtcataatactgacacattaaaagtaaacttatactatataataacttactaaatttatagtacaagctgagtgttttgatagttgtaagagaaatcagttcaacaagacttggcatagtctctggccttttcataaaatgatgagacttttctttagccataaagcagaaaggagaaggcagcattccactgaagggaatgcatactcaaagaatatgagatagtaacaagtgttgtgtttgaggggtcagaaaagagagtttgccttaatttaaccaaaccaacatgagctttgacattcaggagaagcaattagatttgattagcaattgaaacacacacacacacacacacacacacacacgcaaaaaactttcattaaataatcttccgatctgtgaccaattattgctagtagagattggaagttcaatatcaatttagtgtaaagtgagaaagtgaaatcccacttctttttttagagagaagatgaaattcaatgaaggaccttaagttccccaccatacaagggctttaattatttgaataacacaatccttggactttttttctgctcccagaataccacgcaacactgatgtattaagcttaattctaaaatacatatcagatacagggtgctgatataatgagatatataatgtatcagtgatttaagaaagaataataggaatggaaatcttaaattgaaactttttcaagacacttaaatttttctagtaaatcaggaggaaatcagtcatttttaatcagttttagttttgtggaaagcagtgtttatgtgggagcgtagtttgaaaccactgttggggtgggagaagagttggtcagagaaataacaaattaagtatatttcttgtttagccacttcagaaaaacacacatttatgttagtactgtatatgagccttaagggtaagggtaagtgccttaagtctctactgtttttctgtattgccctgcaatatttaataaacattactttttcaatatggaattcatactatactattttaaattgttctttctaattctccatttagtatgaataataatgataactaccgtcatgtattgagtgcttaatatacgccaggatttgcatggtgttcctcacatgcactggctcatttggtctgatttcgctaattagcttttggagtttcttgagagcacgttctcagtggctttaaaaaaacaaaaacaaaagcaaaaagaaaaaaaaacacctggattatcagttgacaataaattagaagattactgagccagcaacccttcttgagtttttttggattgcatacagtgcgtctgctgtcttcctgacttgcctttatccacaccactccttcaaggagttattcgtcagaaaaaggctgaagagctcactcatttagctctttttttgtctactaacagtgggaaagcaactacttctgaagtagaaaagtctgtattgcttcagagttactctgtttacttctggaactgttctacataaccataaatgttgagaagagactgtcccacgcatctcagtcaagttgtatggcagttttacctcttttgaaatataaacaaaagcattctattcaaataattttataaaattgactgattgtttgaattaatcaacttaactgttttcggcatgacattgagccacaggtttcaacctcattttggttccttactgttcgtatttgtaatatactctcatcaccaacatctcgttttctgcagtgattcttactgggaagggcaggatgagtggtggaggtcacattataatctatataaattgaaaatgatccactggaagagaatgtgtctctgctttctccctttccctgttaaggaacattgatattagcggagttgatatagccttctataaaataaacttagcatgataaagaaaagagatggggagtttgattagatagggtcaattaagactgaatttaaaatataaaggtctcatcactgtttttgtttttaattaagagcttagaagctctaatatattgtgttctattcagtttatagccaacttaaattataggtatgagaatataattgcattctaatatctgataattgaatatcctttttttaacctttagaattcagaaatagactcttcaattaccaatagctgtaacttttaatttacatattatttactttagggaaaaaaagcatttcattcatgctttcttgctgttcgtttataattatttgtgacagaaaatcaataaaatacatgcttgaattccagataccaatggatcagataactccatcccaatggcttatcttacactggatcaccaactacaggtaaaggagtactttcttattgaaagttgacttttttcttcttagagagtttaagttgacaattgtgttgctacctgtcattgtatagtcactccttaatttatccttttagttggcctccttaaactttttagaatcaaatcaaaataattcttttggttaagttaatcaaactttaaattggcagaatcatattcttatcttttcagtcatcttaaaatcctccagtatctttctttagtactgctaagcattacattttcactctttaattttagtgcattaaaacaaaactcataagcttatttctatttaatacatttgtgatacattctcatgttcatagtgactgaaaatgtaaataatatacttcagtgccccctcatgagtatgagggctataaacatcatttagtttgagcctgtttgcagcctgaaatgtcataccagagactacaactccaacaatcatgattctctgtaacagactgttaaaacagcaagaatagatttaaatgctgagttaattctgacaaaaggacactgagattttctagggcatggtttaacacttatttttaaaagatcattgctttagtgctataaaaatatatcacagtctctgtcttgactctcatcttagctagatattgaaatttgatttaattatgttttaacattcctgattattttcagcctctagcaccgtgcccaaactccaaagaatctatggcagtgtttgaacagcattgtaaaatggcacaagaatatatgaaagttcaaacagaaattgcattgttattacagagaaagtaagttattttttatgaataaaaataaaaatacattagtattttgagtttaaaatatgataaggtgcaatgaaaacgtagtttttagaattagtcattaagtatactttcaacttgtttaagctttaagcacccttttactaaaaattttttatgcaaaactcaatccttttgactatcatattagtgctatggaaaataaactggtgctttatacttgttgttttatgttctcagagctgtttagacttattattataaagatttattgttttcttgtaaatagataaaataatttgatttattaacattcagttgtgccttatcttagaaacatttttgtagatacattttttccaggtgtatgtttagaattggattacttattaaaagactgtatttcataactgagtgtttttctgaggagttatagaaactgccttcctccctttttaaagaaacacagcctaatttccttactactgcattcacagttcttaaatatgtatgtatcttcagttttcttaagcatgacctccatgaaattttatacttaggtaactgaattgttggtggtaactaaaatgaagtgataaggaaaaaattttggcaactttatatatgtatgataataggattcccttcattaattttaatctaaataaatgaaagttgtttttttctgaatttgcgaaaagctttctgtatgtacttcaaaaaaaagagagaaaaaattgttttatcataatttattgatacagtgatttaaatggaaccaacctggtatttgaaaggtaagcctaaataggaaattaaatactacagtttggaaatcgtagaagtaattatcaaactgctggcacttttatgttgaaaaagcttgatttcttatttcacttatttaacctatacttttgccatactttaatcatttgaaagaagtattctatgctggaaaaaacaaatggtggattagggtgttggctgtgaaaactatgacagttttaatcaattttaaatactttcagaagtagtattagttagttattttgcttgaggactttttattaattattcatttatatccagtaacctcactttaggaaatgcctaaagatgcatctttttcgggaatacttaatagttcccaaataagagggacttaaataagtttatcagactataaaagaatgagggtctttcctgaaagtgcttgcaaatgtaagtgttttaaaagaagtggtactttgtcatttttctcactgctttaaaatgggaaaaagctttaaattggatagcatttattttaattagattgcaaatttgctattagcttaccactctctgctatagttaagtaggattgtgacttcagaatgtgaatcagtataaaagtagaatgtgaaggataaaaacttcatgatattttcccatagccacatagaacccttcccagccttttttcatccttcctacacaaaaagaggatagaaaatgaaattttctgaaacttttattttaccattttatctgcttcgctaattatccaagtacagttacttaataaaaggattatgttatttgtatgattacactagaagtagatgagagttccatcccagcccataattatatttgattagtgtacctaagatgcaaaatgataaaccaagaataaaaattctcattaattgagcttccatcatcagctactaaggtatgaatttttccatcatgtgtaatattatgtggtatttgtttgtaggcaagaactagttgcagaactggaccaggatgaaaaggaccagcaaaatacatctcgcctggtacaggaacataaaaagcttttagatgaaaacaaaagcctttctacttactaccagcaatgcaaaaaacaactagaggtcatcagaagtcagcagcagaaacgacaaggcacttcatgattctctgggaccgttacattttgaaatatgcaaagaaagactttttttttaaggaaaggaaaaccttataatgacgattcatgagtgttagctttttggcgtgttctgaatgccaactgcctatatttgctgcatttttttcattgtttattttccttttctcatggtggacatacaattttactgtttcattgcataacatggtagcatctgtgacttgaatgagcagcactttgcaacttcaaaacagatgcagtgaactgtggctgtatatgcatgctcattgtgtgaaggctagcctaacagaacaggaggtatcaaactagctgctatgtgcaaacagcgtccattttttcatattagaggtggaacctcaagaatgactttattcttgtatctcatctcaaaatattaataatttttttcccaaaagatggtatataccaagttaaagacagggtattataaatttagagtgattggtggtatattacggaaatacggaacctttagggatagttccgtgtaagggctttgatgccagcatccttggatcagtactgaactcagttccatccgtaaaatatgtaaaggtaagtggcagctgctctatttaatgaaagcagttttaccggattttgttagactaaaatttgattgtgatacattgaacaaaatggaactcatttttttttaaggagtaaagatttttaattctgtgattgtgtgtatgtgtgttgaaactgtaaagcttttatgactctaatattaatctcttaaatgaaattaaaaggcaaaagaacatgattgagcttaaatgatcatttcttcctgcagtgattcttggattgttttctcatgtatttgaaaaaaaaaaaatgaagaaaaataatggaaaatggaagtaattactccagctaaaaaaagcttggacttagatttctttttatgataccaaatgagaaataaaccaggcaaatcagaaggaagttaaagaagcaaatataaattcaacaagtgtcctaattatcctggatattggaatatttgattttccttacaatcccgttctagaatgcctgccgcctttcaacactttcaagagaatttcaacacttacagagtatttatattgttaacagtaattttgctaccaaaaccttcagaataactttaataataaaatgacactgaaataatagactatacaaactctatattttttcagttggtgttaaaataagtcacattttgataccagtacaagatgtcttttaaataaggatgtcatcagtctgatttttatagcattaatgttttatgaagaaaaagttcaaaatgaaagcattaattgctgtgattattagaattctatcatgactgtattgtagtttttgctctatttcagataagcaagatctaagaagttatcaaaactattctttaaaatgctaaagcaggtaactttttcttccattattttttcctcctaccactgagttttgtaatgaattccttgtgtatacaagcaatacaggtgaatactaaactgttatttttagcttcttcaaaagctattttagaaagcttcctggaaataaatgtcttctgtcatttaatttaaataaaaggagtgttaattgttcccaaatttgattacctagctgaaacagatattggattcagcatagtaatagtaaaataaaattggcagagaaaataactgtagactaggataaagcatgactcctccatagcattgttgcttgtatgtacatctgtcactccactgaaagggacctagtcactttaaagaggccttttatctcagcacgagatatccaagcgtgaatgctaaggcttgatgtttccattaggatttagcattcgagatttcagattttatttatagtcattgatgtgttttgctgtattataacacatttaagggaaattttattatggtttttacatgtagtcatttcataaaaatatccagataggtaaatggaagaaaatagtagattttagtcatggtaccaaatgcaagaggctgttgaacagttgcttgtttgtttacagtaagttccttgagattttcagtactgtagttgccctggacattgagtacagttcagccttactctgtttttaagtagttgtgttgtcaatttcatgcttttaagtcctgatgatccttggagatgggagaaaaagataccagggataattaaaatccacagccagtttcatcagtttcctcatccatcctgcaaataaaaatgttaacaaggagccaaacttattcgttctggttttacaatttattttgaccgttttttgggtgaaaattgcaaacagccaagcaagtggctggaatgccccagtctaagaaattcaaaaacaatcactgagtaagccctaattacattaattacattttactcttgactccaggaaaagaaagcaagcttttatctaatctagagggaagtattcgtgagcaataaaaatcacttttttgagttgaataataatcagttaagaatatttaccgcatagcaacacaacatataaagatttgttacaagttgtttacggatgtttgactatttttgctgaagtattttagagtattgaatgtcttctctcttcaagtttctttcatgttcctaatttcagctcctgtagccagagatcacaggtcttccctgtgaaactttggtttctttctataaatgtgtgtggttttcagcgctcaactcctgtcttcaaatggtagtaagttctacttctacttctgtcattcagaacattttatgtcaaatgatgtaatgcagaaattcttgtgcatatttgtaactgaaggaagctttttagatttatttttgtttttaataaaattcagattcctattctaaactggta

SEQ ID NO: 15680 - DNA, 73317 bp, Homo sapiens
gggatcatgtctacagcctctgccgcctcctcctcctcctcgtcttcggccggtgagatgatcgaagccccttcccaggtcctcaactttgaagagatcgactacaaggagatcgaggtggaagaggtgagcgaggcccggcatggagacgccggtcccggcctgccccgcccccgcctctgcctggtgccggctctgaaggtgcctcccggggcccctctaattcgcgggaccctgcggggtccacccgggagaccccacagccctcagtaacgtgggagtgggggttactctctgagctcaactgctcgggagtagctgccttttttcctctcttgggtactcttgattttggatttgatattccggtgataaacaggagaatgaactggtgagatagtgtggtccaccagttctcgtatctgtaagtagtagtttcagcgaagatcgtagccgttctggagtttcagtccgctggacgtaatgttcttttttttttttttttttttttgagacggagtctcgctctgtcgcccaggccggactgcggactgcagtggcgcaatctcggctcactgcaagctccgcttcccgggttcacgccattctcctgcctcagcctcccgagtagctgggactacaggcgcccgccaccgcgcctggctaattttttgtatttttagtagagacggggtttcaccttgttagccaggatggtctcgatctcctgacctcatgatccacccgcctcggcctcccaaagtgctgggattacaggcgtgagccaccgggcccggccggacgtaatgttcttaatggccaaagattgtattatattcgacttctacttcagtacctggcatgtaggggatgctcaataaatgcttgttaaattagtagatcatcaagtctaataaagtgtttcccttagcaccgaatggttctcaatttctccgataccgcacagcaatactcgtaatgtttaaatgctcggctttcagttgggctaatgtaggtgaatttcaccataagtaacatagactggtctacgatcaaaagatgtttcaagtagcatattctgaagagataacgaatgatttcggtgacaatcagaatataatattagactagaaatcgctatcagaaaacccatatcctttctttattctgcagtaatttattttagaacaagatatttcaaagtgactttaaagcgtcgtttttcaaattaacaggtaaattgggttctaatgactataaaatttagaaaagtaaaaactgcatatatattttttaaagacactttagaacttgttaaaaactttggttgaaaatactatctcttaccatttatttgccattttttaaatttattaagcactttgcgttatatagtccatgaaaaacctagtgaaatattatagattgtcaacgagttatgtctactttaaaattctaaaattatttttaagtgtcagcaagttcaaagtagtgagataacgttcaacaaataaattttttttcctgtgcatgttttggaagagtaatggattactgaattatatatgttttatcacataaagtaactttagagattattgagaatatcctcattttacaagataatatggtggaaagagcaaggtctttggagttagaggaaagttcagtgtatcagatatgccatttattagctgtgtgatttggggcaagtttcctaacccctttgaattttagtttactctaagaaagggctaataaattctgtttcattttatctgcataacagatcttagtagacattatatgcaaaacacctaccacagggcctgacacatattaggaaacctagttccagagaggaaatgtgacctgctttaaggtcatatggctaaaagaagacctgtattttgaaaagagggggaaatgtttttagtttctttttttttacattgaggctatgataaattccttttccagaagtggatagttgatgcagctttcatggctaatattcttttttaagaataaaaattcagtgagtcagtatacaagaattgcagtttttaaataagcgtttacgtctgctctgtggtgaattgctatgcttgtagactacaaattgttatataataataacttgtgctttatggtctactaaatgctttcacaaacttacttcatttggttcttacaaccttagtttttgaatgctactttctaaagctttttacattcttgattcagggaaaaacaaattactaaggaggtagttatcattttgatgttcttcccctaaagctatttcgcttctggttaggtttctgtgtttccaagacccttctctcagtttagataatgtttcaatctttgtgtgtatgtgggtgtgtgtgtgtttaggaaatttctgggagtaggtttttgtttttagatgaaaatttgtttctaatatcaggcagtcatttgggttttttgtttgttttattccctttcatgtttaatacttagttcatttttgcattaaagattgaatttggacctttctgatattgaaagcattacataatttccatcatcttcttcatttgcatacattaaaccagtgttacacaatccagggtgaaccatgaacacttattagctatttgtcaacttagattacacttccagttcaattgtaagataaacagaggaagatgaccagaaacaaaaactattttatgttgcttccaatattttatattgtatgagaatattaccttctaaattaagaaaatcatgtatttctcaatgtaattgaattgtattatatcaatataattagaaactgtaaaaaaaataataattcaactacaggccaaatatgcagccatttagtagatacatatttctaagacattagctgatcttgcatttctaatattgtaactcagtagtattagtttggcacatcttagattcaattcaattcagtcaaattaggtaaggtctcagcctcagaaatctgcctaggtactttttaaacatcatttagtgtttaccatctagaactggctgtagagaatgttggaataaaagaggggatgggttgcaagaagtgttacacagggtagtatagtggaaagtgttctggactgaaaaagaaaatttagatgctgtactgattctgccataatatatttttgtaactttgaggaagtcaccacatttttctgggcctgtggttactcatgtaaactgactgaacaagatcatttaaggtcttttccagttctaaaatgaaaacacattcatgttttccagtatttaactgttttctatagtaagcttagcagttctttaaagactgatcatggtctcctatagaattcagttggtgaccaactaatcctgggttgacagggcaaatgatatcccattgtacagatattgacaagcagtcatagagtttgacttgccagaagccgcatgcctaagtaaatggtaaagctgggaattgaatatgagacttctcacttgtgagtcagttgccctttccactggatttacagtgtcactcagtactttctgaagtactctataaccaaacctaatatgggaaaggggaaacaaaatactgatttcctttttagtgtagttggtcctgagcatttaatgaacattctcatctgtgcgtaatactctgaggtactataaaagataaatagggcttggtgcggtggctcacacctgtaatccgagcactttggagggccagtgcgggcagatcacttgaagccaggagttcaagaccaccctggccaacacggagaaaccccgtcactactgaaagtacaaaaattagctgggtgtggtggcacaggcctgtaatcccagctacttgagtggctgaggcatgagaatcgtttgaacccaggaggcagaggttgcagtgagctgagatcatgccaccgcaccctagcctggacaacagagggagactctgtctcaaaaaaaaaaaaaaaaaaaagatgatagaagaatcctaggattacctccttaaaatgtctgacttagtatgatatcagactggagtaaacacagaacagttaactatagaccacaaatttaaaactgaatatagtgtaaattaaacacttaagccataatttgaaaatagagttaatcacagaaggttccattgagtagggacaagtttaaaactaggttttgaataaagtgaccatcgtgggttgggaaagtcactaagatgaattttctttgtagttgttcctctgcctaaagcgctgttcccccataacttaagatgactgactcctcaccagtcaagtcccacctcaaatgttattaacacttccttagagaagcattccctgaacaacctagatcttttgtcatttctattatctttcatggtacttaccagtaactgaaattgtgtctctccttcagcaaaatgtaaggcgctttattcacttttgtaaccccaatgcctagaacctagaaggttctctatacatatttgttcaatgagtacatgaaagtatcacagcataatcataagaattaaatgcccatcttgttctcttatattacatgtgataaaataggagctgagttatgcgatttggctaaggcaacacgttagaaatgagatccgagtcttgttttaatgtcgactctattatagttagcagatacttttgtttagcagggataaaaaatgctgtaaagggccagatgctatgagtaagccacgtatggtaggtctttactacagagtgctaaaaagacactatttacaatggttgcttttgaaaagggagacccataatgctgacctcaactatagtgtaggaacaaagctatagtattggacacataaaattactgcagcatttgtatatattcttcagctttgttaaggagacacacaaaagttttgttttaaaagctaaaatatgctacaaagaggagatatagatagaacttaaacagttatatgtactttgtaggtttaagttataaatatatggggaattggtattagagaaaaacctaatttatagtggtctaaacaaactgagtacatagatttgttagtcactatttaattatggatacctaaaataatcaatacattctttcatgtgaaagtgaccactgatttcagtagaaatctggaattactatagttaagaggtagctacagagataatttttgcattgtacacgtgtagcttaaaagatagcatgagcatattatttgaaataaaagcctagaaaatgggtgagatgtactgtggcaggtattaaaagactgcatgaaacattcagaagaaagtttgaataatcaaagctttacttttatgttatcaaatccatcttgtcagcagatggcagttccactctgccacagtttattaatagatattgaagttctaacatagttggaggctccaagtcctaactaataaatgtatgatctatgcttgttctgtcttgttccgcatttccagccagaacaatgccagcatcaccaggggtccattcagatagttcatagaacagggccaaatgaaactgacagctgtagtcactgaactaaaaataacatgaattcagaacaattaaaagaattatttaataataaattaagagcacaaaggcatacatccttttccatttaggttaggtgtgtgtttggttgttttctttaacatgacttgtctgaaggaatggagtcatcttacatcataaagaaattaatttttaaaggaatttctttaaaaataacacacaaacacacaaaacctgatttttgtttttgtgcctttcaatagtagttgcatggaaatgttctatataccatctcatattcttctgtattttttattaagaaattaaatttaaatctacttaattgtatgagactaaagttgtagacccaaaacaaagaggtttcaaccatagggggagaaatgcttatcataaagtaattaatcaaaaacattttgatttagaaaacattcataaatttagaaggaaatatttccaaattgacctcccttttaaaaccaaagtcctttttgcattcctctgttttttacaaatgaaggattatgaagaatatctgaaatatttatttgtatgtcaccattttagttggatgtgtgtgatggggaaatacttgtaacttgatatgttctcttttttactcttgatgaaaattcatctttggggaaaaaacagtcatttaaaataatgttgggctaggtacggtggctcacacctgtaatcccaacactttgggaggccaaggtgggagattgtatgaggccaggagtttgagacgagtctgggcaacatagtgagaccctgtctctataaaaaattttaaaaaacaaaaaacctaattgttaattacagtgtgtcaaataaactgtattattcagaaaagaatacggttcagaaagcacgtttgatttgtgaacttggactagaaatttggtagtaaataaaaagtggccttctttcagtggtttacaacttgaatattaagttttttcattgtttacctcagttgccagtatgtctcaagagtggccatctatgccactttttttctgttgatctaccatatgtcaagaaaaatatcaaatttgctttctgtagtttgtaacattggctcattccttatctaataatgtacataatctccttatgtgtttttaggcttggcctttgcagtccagacatactattattctacatctgatcttctccacgattttatgttcttgattaatacaataaggaaatttgttaccaagatatttgcatttgaaacattttcttagaaatatgtgatatattttttaaaaatctatacacatgtaagattttccccagtcagtggagtgctgttttacatagcctgagaggtggagtgcagacagtaatgaactttcttaaccagcgtttcctgttggagcggtggtgtccacaattttttgtttgtctgtctcccactggtaaaacaaaacactttctattttgtatactcagttttcagtgtgtatgtatgaagtcggtatttttaaacaatgggagatgaaaggtttcatactatcatttgatcatggctcaagttgcaataagtactttctaaataaaacctttctaaaatgtgagaattgacttaattaaaatgagataatatctgtaaatctacttaactaaggtcaagtaaactacaatatacacaagtgagggactgataatggagtcagtatttgacatattgaacttaataagcctgtaggaccccttagtctcaaaggcagttttaaatatatcttgagcttgggcaaaaaacctggatgggagagatttgagagtatgaatccatgagattagagaacagattcagaaacaaaagggccaaggacagaaccctggaaagtagcaacatctaaggtttggacagaggaaggaagaatcagtgaaggaggctaaaatagaactcttaagcagagacaggcagagaagggattgttgacagccatctttggagactgccataagccctttatacacaagccttctattaacccaacttcactcttttcttaaaggagattagggctttttaaaacccccttctaaacagctaaaatctgattcgaatataatcttttgaaaagttaattgttgttagttatcatacttgctgcctttgagtagcatttttctctgtaccaggcactggaccaaatcctggcaggcctctgttttgttggcaccatgaaacatacctgaaagctgactctgatttactaattacatgatccttgaataggtaacttcagttcttggagccttggttttcttctctctaaggtaggaataaaaaatcctatatattcatgggtttatggtgacactcaaactccatcatatttgtaagaaagagctttacaagttgtaatatattgttaaatataaggttgcattatcgttatacagataataaaattgcatttctttaaaatgttatttcttgaagaaaggaatgagaagtatattggaatgccctgggaagctttttttatgctacgtagcaccttctgccacctctaattcccattcagacttctcccttagagagctaatatcagaatggggggaaggagagcaaaatataccaggaaacaactttatccattgtatatatcatctgattattctatcttctactcttatggatatatgcttatactcttttttgtttaaagcacaaaactcctgtctctggccaggtgcagtggttcacgcctgtaatcccagcactttggaaggccaacccaggcagatcgcctgagctcaggagttcaagaccagcctggacaagatggcaaaaccccgactctactaaaaatacaaaaattagctgggtgtggtggcacaagcctgtaatcccagctactttggggtggctgaggcaggagaatcacttcagccagagaggcagaggctgcagtgagctgagatcgcgccactgcactccagcatgggcaacagagtgagaccctgtctcaaaaaaacaaacaaaacaaaacaaaacaaactcctgtcctcctgccggtatttcttacttgtttttaaaagttaagaaatgtaactatttttctataaactactgtttaattatgagtcattcctcttttcaactcagtagagaaaagcatttaatcttgccacaacaaggataatttccatgtaatacttacctcttttatgtatctttgtactcagaaatttcaagattaattcggttatttcaaaattcagtcttcccccataaggattttccttttccctttctcctgcccaagatgacatatgggtgctgtggaaagcttccacaaataatataaacagcaagggagagctctctggtctgtgtgatggcttccactgaaatatcttgccttattatctgttgttaatggattagccttgaatgcagtgattttcaaacattgaaactacctggagggcttggtaaaacatggattgcttggccttaccgtcagactctataattctgggttgcaccctgagaatttatatttctaataaatatccaggtgatgttgatactgctgaaccggagaccacacttttagagccactggcatatgctttcactgtccttatatctgctttccttctggaacgtctttttcttttggcttctctgactctctcctagtttgcctgctaccatattgactgttccttcctgttccttgcccattccttctcctctcttgtgatctaaatgttgaactgcttcaaagctcagttcctctactccactatctccatattatttttggttacctcttccaactgattgactagaaaaactgactacatgctaatgactcccaagtttgtatctctttgtctgacttctccatagatcctctcactcacgtttctaccttcttacttgatatctcctcttggatatccagtaggcatcttaaacttcatatgactaaaaccaaactctgagttattaaaaaaaaatctgcatcattcttatccctcagtaaactgttgtccagtctaggtgttttccttgattcagctcttttcctctacacctgtcctgcctggatgcagagcatcagcaaaccctattgactctacttctaaaacatttcccagatctgcccagtttctgcactaccattgaccttgccctcgtagctattgttgcttgtttggactgctgtaatggcttcctaatgggtctctatttacatatcctagcttccctacaatcctttctttaagagctataatgattttgtttaatgtcacataccatccttacttccttgaattttttcagttccttcacattgcacttagactgaaattcaaactcctttttatggtaggtagagccgttcaggatccaacctctgcctgtccctccagccttaccttacaatcactcttcccttcctccactatacaccagccacaccaaacactcccaagtatttctctaaatcatcactaaaatgtcacctttctcagtgaggccttgagtgattaccttgtctaaaattggagtgaggcagagtgcatacatgtgtgtatacacacacaattatactccttttcttcttagcacacaactcccttcctttttatttgtctttttccacaagaatataaacaatgagaacaaggattttgatttggtttgttcactcttgtatcatcagtgcctaaaatagcgcatagcccttagattgggctcacatattggagtaaataaggtagtgaggtttttcttttcccttagggcaaagctttatattagttgtttcttctgtgtgtgtgtgtgtgtgtgtgtgtgtgtgtgtgtgtgtgtgtgtgtgtgtgacagagtctagctctgttgcccaggctggagttcagtggcgcgatctcggctcactgcaacctcggcctctcaggttcacgccattctcctgcctcagcctccccagtagctgggattacaggtgcctgccaccacgccccgttaattttttgtatttttagtagagatggggtttcaccgtgttagccaggatggtctcaatctcctgacctcgtgatccgcctgcctcagcctcccaaagtgctgggattggtgccttgtgtcatccaaatgtcagattcgtaacctctttatatggccttttcaaactgcccagcctggagctgccactagtctcttggtcatagcatcctattttttgttgttgtcgttgttctatgtggcatttttttaaagtctgatttttttcttactcatcttttgtttgtatatcgattttcttttctcctcccctcccttcacatacgctagaaagtacatttgtgtagatcagagcctttgtcttatttctttctgtatttctgatgtcccaaacagtagctggatgtagtacacactaaagaaatattggtttaaggagtaaacaaacgaagttcattattctttcaacatcaagcctcacttgcatcctttgaaggcagaagacctaacccagttctccctgcttgctgaccaggccttccccttggctttcattaatcctctgaaacccagctgtgttcttcattaagtatttgagctagctaccatcccacagacctctaatgtaggtcccaacactctgccctaccgcagcctccttcctgcaatcagaagactccttacttctcagttagcttgctttttgcttcacaagagcttttctttatcccttacgtgttctactggggctgagggaacccgggttagggcctcccttggtctgtcttccttgccacaatccttactcctttgaagcttctggtgtttgcagagcacatgctgtgaggatgcctgctcttagggatctaagtgagaagagaagggtatgagtcttttttgctgttgaatccctaccctaaccctatcctgaaaagggggagggaggagtttattagccttcatcattagcccttacctttggctctcttcagctggtaagtgtttaaaagtttttaagtactattatttagtcttaaatttcttctctaccgcactttcattccatgaaggcaggggtccattctttatatatattttttcttctcatccccagtgtatctacctttatgctatttttaaaaatgggaagtcatttttgatacacacaaacttaattctttaagtattgactgtgcttataatctcactcctttgaattcacagcagttattatttctatcctgtatttcaggtcagtacaaccttggacatcttcacctttctttattataactttagatcctgtcatttcactgtgcatgtgaaatatctcgtggccctaataagaatggaggcttcttaagcccatgggctcatcttacaggaatgtgcctgttttgtatttcagggtgttctagaaaattgctttcttgagcaaaaaggagaaagtttttcatgtcctcatttgaccacattttgttcccatggctttaagttgaaagctcagaatcagctctactctcatcactaggtggcacttgtgaattacaaatagtcaaatgaatttttatgacaaacatgtgattcacaaatatagataatgtttggaatccctgcatggacgttcctcaaaatggaagaaatgaaagaaggggattcctagtaagtaccagttgctgtgatgtatttataaatacatggttgaagaataaattacttcataatcatttcgtatttaatagtaatatcaataggtaaagtctggtctccatgcctgtgttcttaaactaatgttgccacaaagttgaaatttttttaggacctgcttgctattcatcttagttaattgcaagagaagtgagtactacaggtcaggtgcagtggctcacacctgtaatcccagcactttgggaggctgaggcagggcgattacttgagttcagggattcaggaccaacctgggcaacatagtgggatcccatctctacccaaaagaaaaaagaaagaaaagaaatgagtactacagccctttacactgattcatacccaattccaagcacttactgttctttgtagtatttgaggaaatacctggttttaacttacgaatcctgtagatattcatgaaggaaaatgtcagcacttctattttactgctgagaaaacagaaactcaaacttgtccaccattaagagataataggtagacagagccctacattcaaactcaagtctgttggatttcagagcctgggtgtgctctttcatttattctaatggtaccaggtagccagtaccctctattcacaataaagtaactgaatggcaagtacaaatgtctgatgagaattgtgaaggagaacaagaacctaaaccacagaacactgagtgcccagggctaggacgagtgaaatgggaagtcaacaaaacaaagactagctaccagagaagttggcctactttgaaattttgcctagaggcagccccatttcctttaagccactgatgaacagaagctgaatatagagtatgttcatcattaggtgctctaggcttcaaattctggcttctctgaatattttctgaccatccaatcttgggcaagttacaaccatgtgactccatttgcctcccttttaaatggaagaggattaaatgtgttaatgtatgagaagcacatagaatagtacctggcacatagtaaacattcaataaatgttaaccatttgagtagctttagacattgaacaacatggtaaatgttcattctgccttattgatacatgaagtggaatttaagctatggctagagtggtcatacacatcgcagtttacaactagtgtcctaatattattattattaatgccctttttttgatctccaaagtgccctcagttagataataactcatttgatcaacctagttatagtcaactttgttatagaagagttttgtgccaggaatttgttcatgtaagtctaaagtaaaagttcctccaagggaagatactaacttctacttcccgacatggggctttatatatgttacaaattaggactggtaacattcccgtgttagactacctggcatcagactgcactttaacacttgctagctatatagccttgggcaagttttacttctttaaagctaggcacttcaactgtaaaatgaggacagcattagtaccttcctctaggcctgtgtaaatgaggtaatgtatataaagcattagttaagtgcctgctgcatagaaagtacatataaatatggttaagagatgcagattttttgctaaagaaaaaggccttgatacaaagtgcttaggttcattggaagctgagagattggagtaggtggtgcttaactaaggtcctttcacaatgataaaatctaatgattttattctaacaagtatcaaaagctatttttgttttctttttttatattatgaaaaatgtcaaatatttgtaaaaataggactccatgagagagcaatgaacccatgcagtattcatcagttggcttcaacaatagtatgatacatgtctgatctttatttttatgacttttgaaaaataactgtaatgagatctattttacacatcataaaattcacccatttgaagtgtacaatttggtgggttttgcaaatttaccaggttgtcagccaccaccataaattaggtttttggttttttttttttaataatttcatcactttgtcaggataccagctactcatttactgttaattctaattttcaccctcggacccaggtatctatctatagatttgccttttctgaacattttgtataaatggaatcatacaatatgtggtctctggtgtctgacttctttgacttagcataatgtttttggagttcatatcgtaagtaacatatatcaatagtttttcttgcggaataaaattccatggaataaataatactatattttgtctgtccttcatagccggtcttttaacatctatatttatatcgtttctcctccattccctatccctgttgaattattcaaaggctatttttaatttcttaaatatgatagctgaaaatatttattatatgttcctgctttttgtttttccatatcatcttctgtcttctcattcatcttgtctgttttagtttttttttctccatttaacaaatcactttactttgttcctccatgtgtcttttttggttttacttgagaatgaaagggtgtacagatcataaactttcaaagatagagacaagcatgcatttaattatcttctcactttaacaaaaattcatacttgttcagtggcaaatccagatactgttgatttccatgttttttttttttttaatttaaagtcttaaagattgactttagttttttatattgggctgatctatttgattccgattcttgtggtgttttttgtttgttttttgtttgtttgtttaactcaggttgttggaagaggagcctttggagttgtttgcaaagctaagtggagagcaaaagatgttgctattaaacaaatagaaagtgaatctgagaggaaagcgtttattgtagaggtaagttgagatttcatttcttttgtgtagttctgcacttaagatactctgtgaatttaatattatgaaaaagattggtttctcagatgtcatttctttgtatacatgaacatcagcaattcggtttaatcaaaggtactgccataggaacattttctcgttcatactcttaattctgattaaaaattaggggaaaagcgacttaactacataaatgaattcacccctgaattaaaacagtttcatccatggaattcagatctatttcaaggcgtaatattttaattttaaaatagaaaagaaatggtatgctttcccattatctaaaattaagaaattttatacacttactttaaatggaatgtttttagaaactcagattattttaaagaaaaattatttcaaatttgatttttctcatttagcatgaaaatttgcacctattcttttagaaatagattagattgaatgatgaaagaaaatccaataatcatgaaattagcatattatcaaatttatcctttactaactttgttattttgtattttggatcacattatttagttaaatcaatgtttttatcactattaaacctcattggccaatggataagtggcctgtaccttataagccttctgaatttatatctctgttttttcatttaatcataatttcaaaatatacttcatatttttaatgtataacatggaaaaatgaggacttaattgtgatatgagaaagtgatttgtaagtggctgaatgagttgagaaatgctgataagtgatttgatgtcagcatgaagaaagatgatttctagtaatatgttctaggagtctagcctcagctttgttttatgcaatatttttattacagtttagataaagctattgatcatttcctgttacattagcagtttcacaaagctgggtgaaatagcatatgtgttaaacattaggaatcacaagtcaaaaagatcgtaatagcgtgaagaaaattttttaaatccagatgagatgtgcatgtaatgtaaaaaatcaaatggttctccaaaaattcttagtaaaaaagacttcagtctcctgtacctcctccaatctaattttctgcttcccaaagacaactactttgagctcattccttcatgtttggtgtccccagtccagatgctgtttattaccccttctctaaagaatcaacctctagtcttctgctgggatgataagagatagtcattgagctgtttgaagtcaaggaaggaatctttgagtcttttacactgtcccctgccctatcctttgattagctcatttgcataggtacctcattctgctgccactccccaaccttttggaagctttgtgagataaatctggttgtttctccatttttctcattgccagtttatgatgcagctcttctaggtctgctctatcagttattgctagtcatttgctttccagcttccaaaaatgtatgctgtttgtgcactttgcattctcttcatccttctgaggttatgccttaaaatttttcaaatctttaccatcttagtgggaattagggagagaggaggaaaaaatgcttgtataatctgctatctgaatctcagtgctgaaccttagcaagatgaaatatagtaaatatattttcatatagtaaataaatataataaatagtgatactaattctattggacgaaaaatccacacatgttggctctagatagatagagctttttattagcatacagtatgaaggtttagagacattagtgtactgaatatgagccagcagcataatgtatgtaatagagaagaggaagaagagtggaaaaagggcagaaaagagaggagaagggagaaaagaatgagcaagaagcagtttgctgtggagcgggatgcattaatagaaagaagtttgaagacagacatgatggttcacatctgtaatcccagaactttgggaatggcagatgggttgcttgagcccaggagtttgagatcagtctggacaacatggcaaaaccccatctctacaaaaaatacaaaaattaaccaggcatggtggctgtgcacctgtagtcccagctactccagaggctgaggtaggattgcatgagtccaggaggcagaggttgcagtgacccaagattgtaccactgcactgcagcatgggtaacagagcaaaacctgtctcaaaagaaagaaagaaagaaagaagtttgagatctagaataagagaagtgagtatagccaaacccctcattgacctctgtatggatcattggatcagggatgattaaaactgaaagagggaaaccagctagtaggctataatgatcactgcagcagttcaggttgggattactaaggcaatggcagtgggaatggagaggagagaattaattcaagaaatgagaaatggaatggaggcaagtatacagagggagtgcacattttaagtcagatagactaaagttcacaccccacttcttagctatagaacaggtcattcaaccctctctgagacttgaggttaaaatctcatctttaaaatggaaatgataatacctaccttgcggagttgtgataattatacaatatctataaagtgcacattagggccccacgcagagtagctagactgttcaactatagctatgaagatgataacaatgatagcatgacgtctggtttggataatgcagctcagtaccatctctgggatcatatcctaacatttcttggcagagttcatctcttcttattctatatactcatcgtgccttgttcataactcctgttatagcactttgcacattgatttaattatttgtttagatgtctatctctccagctaaactgtatgagctggagaacagggattctgtgccattctgggcagtcacttggtattttcagtgactatgattgcaatgcctgttacatagtaaatagtgattgttgaatgatttaaacaaatgttttgtacaacagtaagattttaatgatactgtgaaatcagtacttcaaaagttatcactttttaaaagaaaccttaatttcttaacagcttcggcagttatcccgtgtgaaccatcctaatattgtaaagctttatggagcctgcttgaatccagtaagtttgttactttttcatggtcacctgtgagaaatgacatggcagatgtgtgtgtgtagtttatgtagctatttttgggtttttttgttttttttaagtttttcaaaaatattatattttttcaagataaaaaggtacctccaatactttaaaatatcagcagtgatcccaatagttcaaggactatatgagtacatgtggctattatacacgcacaatatgtcaccaacacactctaaatagtgagaatacagcaccgtggcattgctcccatattattatttttttctttctctttatgtatttattgagttacttacttgtttttgatatctttttttattatactttaagttctaggttacatgtgcacaacgtgcaggtttgttacgtatgtatacatttgccatgttggtgtgctgcacccattaactcgtcatttacattaggtatttctcctaatgcttatccctcccacctctccccaccccacaacaggacccagtgtgtgatgttccccttcctgtgtccaagtgttctcattgttcagttcccatctatgagtgagaacatgtggtgtttggttttctgtccttgcaatagtttgctcagaataatggtttccagcttcatccatgtccctacaaaggacatgaactcatccttttttatggctgcatagtattccatggtgtatatgtgccacaatttcttaatccagtctatcattgatggacatttgggttggttccaagtctttgctattgtgaatagtgccacagtaaacatacgtgtccatgtgtctttatagcagcatgatttataatcctttgggtatatacccagtagtgggatggctgagtcaaatggtatttctactctagatccttgaggaattgccacactgtcttccacaatggctgaactagtttacagtcccaccaacggtgtaaaagtgttcctatttctccacatcctctccagcacctgttgtttcctgactttttaatggtcaccattctaactggtgtgagatggtatctcattgtggttttgatttacatttttctgatggccagtgatgatgagcattttttcatgtgtcttttggctgcataaacatcttcttttgagaagtgtctgttcatatcctttgcccactttttgatggggttgtttgattttttcttgtaaatttgtttaagttctttgtagattctggatattagccctttgtcagatgcgtagattgcaaaaattttctcccattctgtaggttgcgtgttcactctgatgatagtttcttttgctgtgcagaagctcgttagtttaattagatcccatttgtcaattttggcttttgttgccattgcttttggtgttttagtcctgaagtccttgcccatgcctatgtcctgaatggtattgcctaggttttcttctagggtttttatggttttaggtctaacatttaagtctttaatccatcttgaattaatttttgtataaggtataaggaagggatccagtttcagctttctacataaggctagccagttttcccagcaccatttattaaatggggaatcctttccccatttcttgtttttgtcaggtttgtcaaagatcagatggttgtagatgtatggtattatttctgagggctctgttctgttccattggtctatatctctgttttggtaccagtaccgtgctgttttggttactgtagccttgtagtatagtttgaagtcaggtagcgtgatgcctccagctttgttcttttggcttaggattgtcttggcaatgtgggctcttttttggttccatatgaactttaaagtaattttttccaattctgtgaagaaagtcattggtagcttgatggggatggcattgaatctataaattaccttgggcagtatgaccattttcacgatattgattcttcctatccatgagcatggaatgttcttccatttatttgtgtcttcttttattccaatgagcagtggtttgtagttctccttgaagaggtccttcacatcccttgtaagttggattcctaggtattttattctctttgaagcaattgtgaatgggagttcactcatgatttggctctctgtttgtctgttattagtgtataggaatgcttgtgatttttgcacattaattttgtatcctgagactttgctgaagttgcttatcagcttaaggagattttgggctgagacaatggggttttctaaatatacaatgatgtcatctgcaaacggacaatttgacttcctcttttcctaattgaataccctttatttctttctcctgtctgattgccctggccagaacttccaacactatgttgaataggagtggtgagtgagggcatccttgtcttgtgccagttttcaaagagaatgcttccagtttttgtctattcaggatgatattggctgtgggtttgtcataaatagctcttattattttgagatacgtcccatcagtacctagtttattgagagtttttagcatgaagggctgttgaattttgtcaaagcccttttctgcatctattgagataattatgtggtttttgtcattggttctgtttatatgatggattatgtctattgatatgtgtatgttgaaccagccttgcaacccagggatgaggccaacttgatcgtggtggataagctttttgatgggctgctggattcggtttgccagtattttattgaggatttttgcatcgatgttcatcagggatattggtctaaaactctctttttttgttgtttttatgccaggctttggtatcagaatgatgctggcctcataaaatgagttagggaggattccctctttttctatcgattggaatagtttcagaaggaatggtaccagctcctctttgtacctctggtagaattcggctgtgaatccatctggtcctggactttttttgtttggtaggctattcattattgcctcaatttcagagcctgttattggtctattcagggattcaacttcttcctggtttagtcttgggagggtgtatgtgtccagtaatttatccatttcttctagattttgtagtttattttcatagaggtgtttatagtattctctgatggtagtttgtatttctgtaaaattggtggtgatatccccattatcattttttatcgtgtctatttgattcttctctcttttcttctttattagtcttgctagtggtctatcagttttgctgatcttttcaaaaaaccagctcctggattcattgattttttttttgaagggtttgttgtgtctctgtctccttcagttctgctccgatcttagttatttcttgccttctgccaacttttgaatgtgtttgctcttgcttctctagttcttttaattgtgatgttagggtgtcaattttagatctttcctgctttctcttgtgggcatttagtgctataaatttccctctacacactgctttaaatgtgtcccagagattctggtatgttgtgtctttcttctcattggtttcaaagaacatctttatttctgccttcatttcgttacgtacccagtagtccattgttcagtttccatgtagttgagtggttttgagtgagtttcttaatcctgagtctagtttgattccactgtggtcagagagacagtttgttgtaatttctgttcttttacatttgctgaggagtgttttacttgcaactatgtggtcaattttggaataagtgcaatgtggtgctgagaagaatgtgtattctgttgatttgggatggagagttctatagatgtctattaggtccacttggtgcagagctgagttcaattcgtggatatccttgttaactttctgtctcgttaatttgtctaacattgacagtggggtgttaaagcctcccaatattattgtatgggagtctaagtctctttgtaggtctctaaggacttgctttatgaatctgggtgctcctgtattgggtgcatatatatttaggatagttagctcttcttgttgaattgatccctttaccattatgtaatggccttctttgtctcttttgatctttgttggtttaaagtctgttttatcagagactaggattgcaacccctgccttttttttgttttccatttgcttggtagatcttcctccatccctttattttgagcctatgtgtgtctctgcccgtgagatgagtctcctgaatacagcacacttactggtcttgactctctatccaatttgccagtctgtgtctttcatttggagcatttagcccatttacatttaaggtgaatattgttatgtgtgaatttgatcctgtcattatgatgttagctggttattttgcttgttagttgatgcagtttcttcctggcatcaatggtctttacaatttggcatgtttttgcaatggctggtaccggttgttcctttccatgtttagtgcttccttcaggagctcttgttcagcaggcctggtagtgacaaaatctgtcagcatttgtttgtctgtaaaggattttatttctccctcacctatgaagcttagtttggctggatatgaaattctgggttgaaaattcttttctttaagaatgttgactattggcccccactctcttctggcttatagagtttctgctgagagatccactgttagtctgatgggcttccctttgtgggtaacccgacctttctctctggctgcccttaacattttttccttcatttcaactttggtgaatctgacgattatgtatcttggagttgctcttctcgaggagtatctttgtggcgttctctgtatttcctgaatttgaatgttggcctgcgttgctaggttggggaagttctcctggattatcctgaagagggttttccaacttggttccattctctccatcactttcaggtacactaatgagatgtagatttggtcttttcacatagtcccatatttcttggagtctttgtttctttttactcttttttctctaaacttctcttcttgcttcatttcattcatttgatcttcaatcactgataccctttcttccacttgatcaaatcagctactgaagcttgtgcatgtgtcacgtagttcttgtgccatggttttcagctccatcaggtcatttaaggtcttctctatgctgtttattctagttagccattcagctaatctcttttcaaggtatttagcttgtttgtgatgggttcaaacatcctcctttcgcttggagaagtttgttattaccgattgtctgaagccttcttctctcaactcatcaaagtcattctccatccagctttgttccgttgctggcaaggagctttggaggagaagaggtgctctgatttttagaattttcagcttttctgctctggtttctccccatttttgtggtttttatctacctttggtctttgatgatggtgacatacagatggggttttgatgtggatgtcctttctgtttattagttttccttctaacagtcaggacctcagctgcaggtttgttggagtttgctggaggtccactccagaccgtgtttgtctgggtatcatcagcagaggctgcagaacagcaaatactgcagaacagcaaatgttgctgcttgatccttcctctggaagcttcgtctcagaggggcacctggctgtatgaggtgtcaatctgcccctactggaaggtgtctcccagttaggctactcaggggtcagggacccacttgagaaggcagtctgtccgttctcagatctcaaactccatgctgggagaatcactgctctcttcaaagctgtcagacagggatgtttaagtctgcagaagtttctgctgccttttgttcagctatgccctgcccccagaggtggagtctacagaggcgggcaggcctccttgagctgtggtgggctccacccagttcgaacttcctggctgctttgtttacctactcaagcctcagcaatggtagacgcccctctcccagcgtcgctgccgccttgcagttggatctcagactgctgtgctagcagtgagtgaggcaccgtgggcatgggaccctccgagccaggtgcaggatataatctcctggtgtggtgtttgctaagaccgttggaaaagcacagtgttagggtgggagtgttccaattttccaggtaccatctgtcacagcttcccttgtctaggaaagtgaattccccaaccccttgtgcttcccgggtgaggcgacgccctgccctgcttcgactcacactccatgggctgcacccactgtctgacaagccccagtgagatgaaccctgtacctcagttggaaatgcagaaatcacctatcttctgcgtcgcttacgctggtagctgtagactggagcttttcctatttggccatcttggaacctcctatgtagctattttgatctgctatcttagatgtatttctgaaagaacagttatagtttgttcatttgacttgtttctagtcttttagcaaaactgtatcggaagagttcttttaggtgattttgtccaataacctcatcttcttatgaggcttttgatgtcctgtggcagcacctacttactggcactggagaaagtccccagaatatcctgtgattgtattttacatacatcttcactgttagtggactcctagaagacagtcttagtcttaggtcatagataccttttccttccctagtactattcacatagtaggggccaaaagaatgatttttaatatatctataaaatcaggggagtgaattaaattctctctcaaaggccctaagatgatggagcttcttggttaatgcttctgatatatgtttcctttaggtgtgtcttgtgatggaatatgctgaagggggctctttatataatggtgagtgtcattagacctgtctttatctagtggattaaaataatttgaaaaattttaatataaaccctaagttgtttaacattcttcacaatttgccgtcagagtcccaaaagggcataatttttaaaaatctgctaagaataaaaatggaaagataagattctataacattagtatgtgaaatttagaggtctatcaattttttaagtagatggtactttgcatttcattaaaagcatttaagtaaaagtttactttttaaatagattttaaaatatcttcagatttttttctttttgccctctcataactttgagcctcctcattttagaattctttaaccatatttcgatttcactctgctttattttttcttttttttcaaaaaaaaatgtgaaaactcacttcacacaaccttttatttgtagtaatgaaaaaaaactttgtgtagttacattggagaacagagttcttttaccctaaaaataccaaccatatgcagaaatgtattgtctcttgtagcaccagttatataaaacaaattgttacattttattttttaattagtattattttatgtaaacttttacttatatttactgcccatgtgttcatcattgtgatggatatctaataccccattgtcttatttgattgaactacttctggtttttagccattacagaaaatacaggtgcaaacatcttgatatacattgttttgtttctttctgtactgttctctgcctctctcttgtagtagtgtgccataagactgctcataatttatattactttataaaagtctttatctgtttgaaaaaatgtggtaatgtatattgattttacttcaatgtaggaataacatttaatagatgtactattaaatgttaatatcatggcaattatccactcaaaattagtagatattttcatcctttttatttagaagaaaaattaaaaggccaggcatggtggctcactcctgtaatcccagcactttgggaggccaaggcaggcagatcatgaggtcaagagatcaagaccatcctggccaacatggtgataccctatctctactaaaaatacaaaaattagctgggcgtggtggcacacgcctgtagtcccagctactcgggaggctgagccaggagaatcgcttgaacccaggaggtggagtttacagtgagccaagatcgcaccactgcactccagcctggcgacaaagtgagagtccgtctcaaaaaacaaaaagaaaaaagaaagtaaaaaattaaaagcaggactgatggagcatatgtatatgtagaaaaatacccagtcatgtgttctgatagtgcttgcattcacattgtgtcttttgttatatgcaataaagttctttttagtttgtgcctttctttcgcagtgctgcatggtgctgaaccattgccatattatactgctgcccacgcaatgagttggtgtttacagtgttcccaaggagtggcttatcttcacagcatgcaacccaaagcgctaattcacagggacctgaaaccaccaaagtaagttataataatgtgacacccctcagcctcttcctccttctctctcactctcaccaccccgaacccactctctaattcaagctcattattgtacaggagtttctcttttctctatttggcttactcagtgtttacttttaactcaccttcatcatttagtcatttatctaagcttgtattttagatgttgtctttagtgggatttttatttttggtaacctctaccttagattagcatacttctagaatctgttagcctataaaaatctcattttgtgcctgcagtatataatgttgctgttagacaattccttgggggcagagataggtctgacgtttttcttgctgtgtccctaacacctagcacataaacattctacagaaatttgcagagttgttattacttgctctttcagaggaaagtaaaagggcatttcttggcatctgggtagaaattgaaaatattctggattcttcataatgtgaatacttgggactttaaaaaacttataaattccttagataagtattttaaaagactaaaactttgggggttttgtttgtataggtattcagttaaagaaaacatacacataaaacatattgtttccttttctctctttttttttcttttatgcacctgtgacacagtaaaaatagtctccacgtatcttctttaccctccccccaagctcccaccccagcacattagtctttacagaagaggtttcccttaggaaatcagtatagtcttcagttattccattctcttgatactggttaaagcattaaaacatcccttctgggtgcaacttgtcactctcaggtctaatctgatatactctacataggttccaactcttagaatcactgttcttgctatgtatcttatctctactcccaaacttaaactgatttctgtttccccaggtcactgataaaataatgtttaagcttttatttttcctgaggctattatcttagttacctgccttaactaatgaaaaaatcacttagcctttttttcttcattgtgaatattcagtcatcctttttccactatattaacagagttgaattattaaagcaaacttatgagaatcacagctcttaaccagcaacaaattgacaaatgatccaaaggatataggcaagcatcagatacagccaaagcattcttttcctaaaagagtctgaacgcatctgatgcaacacccaaaagtatcccttttctcctcgttacagtatgttttggctttggaataaatgattagttattgaacaatatatggagaaatatcttacaaaaggaagtcatttccattttctaacatcttttacattgcactaattacatggtttaaatgactatccctaatcttcatccaactacaccccatgaattttaggtttatttaatcaacctagttagaccagatatatccttctaaaatcatttgtagatagagattctccttttgctagtaaataccattaacatatttacagaaggtctggtctaggtcatttattccaggcctctccatgattggattcatcttgcaaatcgtctttggagcccctggtatacaagttggactttagaatcagaattgattctagttcagaaagtactgggtaaaagaaattctttggaatggctatgattttatatataattggacatacatgaatacctgctatatctttattttttaattatttttattattattattattttttattttgagacacagtctcgctctgtcgcccaggctggagtgcagtggcgcaatctcagctcactacaacctccacctcccgggttcaagcaattctcctgcctcagcctcccaagtagctgggactacaggcatgtgccaccatgcctggctaattttttgtatttttagtagagacagggtttcactgtgttagccaggatggtttcaatctcctgacctcgtgatctgcccgcctcagcctcccaaagtgctgggattacaggcctgagccactgcacccggccaatacctgctatatcttattgtcagtggaaaacctacagattctgtggtcaggaagagttcctcaaaatggtatctaaagaaggtacctgatgatctagggaggtgttttatacactatcaagttgtgcttgtgcttgtattttatcttttgcaagtttattcacatttacattagaaattaaaatgtgtttttaatcttaacagtgtgaaagtaagcctacaaagataatttaagttcagatttcagtgagccctgaatttcctgttcaaggctggtgaacttttgaagtcgagtaaaggagtactaacataaaactcattcaggaaaattatcttgaatcatcagaaattatcttgatatcttgaatataccagtataaaacaaggaaactagttacagagttcttataattttcttgggtaaaaagtgtaagagtttgaacaagaacattgagatgcgggaaaaaagctttgttgaagtacatatagaggtatactggatttagcattcttttcactggaatgattatgagagtctttttggtattatggaactgtgaatagtagtttatctgacttattttagtcacattggactaaaagagaagaaatttccaaatagtctctccagatgtaaaaagtttataaaacttgtaattaaaatgaattcctatgtactgctattggatattactacaatgtgatggtgcaaattatattacccatttctatttctctttgtcatgaaaagcaaaaccttgtaagtaagagtatgctacttggtgactgtagttgggtaatagtacacctaggaaagtccgaatcttaagttcagaaaattttccagaaatctctcattaggtcattttagctataatagatttgtattcctcccacacattcatagtctaagcacaaaaatggttttgggattgaacatttttagaagtatcttcaaaataaagacattaaattacagaccatttttttccttctatattggattattttctttatatagtgttactattttttaagtaatacatatttatgattaaactcccatttcaggataccgtaatgttgacctaacagaagttttttaaaccccacgttttattttggccagatagaagtatgatcaggaaagattttggagctagagatgaagacatcagaatgtgagtctagcagccttccaaagagagctaggttatggttaattaatttttgcttattatttctctgaactattaggcttttatagtgaccaagtaaattagtcatttcacagaagttgaatgataacattcattttgcttaaccttttccatttccacaaatgtctcttcttttattgtagaataaaatgttggccttgtaacttttgatgttttttgtttttttttaaacagcttactgctggttgcaggggggacagttctaaaaatttgtgattttggtacagcctgtgacattcagacacacatgaccaataacaaggggagtgctgcttggatggcacctgaagtttttgaaggtaaaatggcaaaagtatggtatgtttgataatctccctcactccttgtgaattcatatgtttttatagattttccccatttccatggttttatttctgcataatacataaagtatacaatgaaatctaaggggatattaaatatagtgttatatcctaaattttatagtaagatttaaatcttctatgcttctaagcatatgtacagttgatcctcattgttcaccaatttcttaattgcaaaattgcctatttgctaacatttatttgtaaccccaaaattaatactcatggtgctttcatggttatttgcagacagtgctttcatgtactcgcagacagtgtgcatgcgctgagcagtgcaaattttgagtcatctaacgcatgcttccagctgaggttgaacaagacaacgtttttccgtcttgtttcagctctcatgctgtaagcaggtgtccttttttgtgctgttcagagccctttttcatttttgtgatttttgttggtaattttgctacttaaaatggccctcaagcatagtactgcctaagtacaagaaggctatgatgtatcttaacagacaatatacatatgttaaattatcttcattcaggcatgagttacagaaatgttgactatgagttcaatggtaataaatcaacagtatatatgaataaggtgtctttaagcagaaatacgcatgaaacaaggctatatattgatcagttgacaaaaacatggtgaccagaggcacacaggaacctacccctgtattttccttaggagcagtgattcagtgttcactaattcagtgttctcagaaactttatagaacataaataccaggaataatgagaattaactgtgcttttgtattggtttcctagcaattaaaaattgagagccctaaagtttaaatgaggatgccttaaaaagaatgcaaatagctgggcgcggtggctcaggcctgtaatctcagcactttgggaggctgaggtgggcggatcatgaggtcaggagatcgagaccatcctgtataacacggtgaaaccccatctctactaaaactacaaaaaattcgccgggcgtggtggcgggcgcccgtagtcccagctactcgggaggctgaggcaggagaatggtgtgaacccgggaggcggagcatgcagtgagccgagatcgtgccactgcactccagcctgggtgacagagcaagactccatctcaaaaaaaaaaaagaatgcaagtaattggacagaaataagatactaagaattacaaataaatgtcaagcttatatgtttaccttcttttatacctccatatgtcactgaagttttaaaagagttgtctgtaaattatatgctaggtttctgtataaaaacatcaaattatcttttaaatgaaagaagttgaactgaaggtatgtgatttgtatgttaggaagtgtaaatgcccataaaattcagatacattcagttaatcagactctggttatagcttatttctttcagttttgatgactttaaagggttttctgtttgtttttagccaccccagaggaagagaaattgcaatgcaactagtcacctgagtggagctcttttgccctaaaattcaatttagtaataaatgaataatcaggtgttatattacacaagattaaataatgcctcctgtttcatatacagaatgtatacatttgacattgttttaaaattatttacttatttaatatacctttatgtgagttaaaatgacccaatgttactgtatgtggagagcaaaaagatttgtttatacaaaagattaattttattgctctagacaacccttaattgtctagagcaacaaaatgcagactgttaggctgtgtaagtttcttcatttctgaaagatgtcagtcaacctgtagcccaaattagactgtagcatggttgtagtgctatattacagtgtactgcttagcatgtaaagctatagctataataattgttcattcttacagtgagttgagtgtttgtttgtttttgggagattatgacgggtgcttattgtgctggctgattcaaccacctacttagtttgtaaattttgctgtgtaactcaggttatccataattttcgttacttacaacgtaatgtttaagtttataaattaagaatttcccttcaccatatattgaggaaaaaactgtaacactaaattagaaagttcttctgctttgatagcagagtagtgctgtctgtcagagtgggaagaaaatttaagattaaaatgtaacagaaaggaggccaggcacaatggctcatgcctgtgatcccagcgcctcgggaggccagagcaggaggatcagttgagcccaggagtttgagaccagcctgggcaacatggcaagaccccatctctacaaaaaatttaaaaaattaaccagttgtgccagcgcatgcctgtagccccagctactcaggaggatcacttgagcccaagagtttgaggctacactgagctccagcctggatgagagtgtgagatcctgtctcagaataaaataataataaacaacataaaggaatgtacagatgtttcatactctgccccagagaaagtatcagtctaaatacataaaagtcaagtcctgtgcctcttgatgaaaaaactgcctcttgatgaaaaaagatagaaaataactgagtttctgaagtagttttttagtgtattgttgatacttaattcatttaaaaatgtacttgttgaaaagacaaagtacttcagaaagagtagtttcttagttctacatgtgacagcctcatttttatccctgatacccattctcaaaatttaagccattgtttctgtaagtcatgtggaaaaatagtctttaggttatatactaccttttttttttctaggtagtaattacagtgaaaaatgtgacgtcttcagctggggtattattctttgggaagtgataacgcgtcggaaaccctttgatgagattggtggcccagctttccgaatcatgtgggctgttcataatggttcgtaaaaagaaatttttcttaaaagtactttttgtgttttctacttggaagactactcctgtccccttccctaaagaatatcatttatctctaacattaaaatgtacaattctttgttaagagactgctttgctattatcagactctgccctgtccctgccccagagtccagcagagcaggattgagagtagtcctggtctacacatgcggctgaggatgttcactggctccgctgattagggaaaggccatcagtacgcaacctagacagttggctctctcttagggagaagcatcaggctggatcatggaaaaaataaaaaaatacatacataaaatctctgacatggttaatataactggagagttatagcccttttctcctgaagaagcaagggcctcatcaaggagaagaagcaaagaataataatgcttcacatatttttcctgtttatattctcacccacccttagaaggtgagtactgttgcctcattttacagattaggaaactgaggcctagagaggttaaataacttgcttaaggtcacaagattagtaagtggtagagctgggattcaaatccagatgcttctgacttgaatgctcatatcttaagtcatattgacttatggactcaatgtccttgcatctgtcctgtttcttttatagttctggtaatgttgtttttaaccacatatgatgttagaatgcatcctcttcattagtaaagttactttacatttgcttgggaaaatagcttttcatgaaggaaaattacttaccttcttaattttagcgccactcttagttatttcatttctatgccttgtttataatcatgtgactaatggccattttttacattattccacaagtctaaaaacaaatgtctgcctaattatttaggtcattcatagatttatcaaacagtaccatcatctgagtaatcttagctgtttttaccagtttcctatactgcctttaatattactaccattagtatcattgtggagactgttcagcattgaccaggacagcttgcttgcttgctttctatcagttgtcagtaaataattgaacgtccgtgaagtaaagagtaaaagaactaacttgttaattgataaaattacaaagcacttttattactccaaattacagatcttaaactacaagatctataaaataaataccactttggaaatacgtacaaagagtttgcatcattctttgggtaaatacattcttccccccttcctctcattttcaattgtaggtactcgaccaccactgataaaaaatttacctaagcccattgagagcctgatgactcgttgttggtctaaagatccttcccagcgcccttcaatggaggaaattgtgaaaataatgactcacttgatgcgggtataatccttcttttgaggggctttggatttaggggaatttaatatgtgctgagttttaatggaattttaaaagggatgttattactatattctgctttatatattgctatgttttctaagtgagaatgggcatttattactcatagtcagaagaggaaacatttcgagagggaaaatctagttctttatcactggaaagatggctagactaggtttctagacttgcttttttctttttgcttacattagtggacaagtatgtttgtctctgggcctgttgcctcatttgtaatgtgggagaaactgaaatagatagtctctaaagccatcacaggacttggatatattaatattatgacttcaatacatgataaactaaattttacatttttctgataccaattttcatcaagcatttagtcatttatgcaaggcaataggttgcattctcagacacatttatttgagtgacttttactatttggcctattttcaggtttttatatcccagtaaaaagttaaactttcttctatttagaagaacccttttaaatgattatcaaattttcctagtctgtgaatcaagcgcctttagaattatttggaatattttacgcctctggtttttggtacattaacaaaaactgtgaagtggtatcttggctttaaaaagttcaaatatctatgaaagtgcctgaattttgaaacagtttgttcagtagaagaatcttacaatctccttaaatatagactaagtaatttcctaaatggtaaaacgttgtttattcaatctattgaaaatttcttacgcaaagcagcttgaactaatctactaaaagtttaccatcgtatttggataccagtcatatatagaagcctaggccttaaaggtgtgtgcataagaaaacaacttagtctctgtagtcagattacttaaaactttaggatatataagttattgcagttgtaattttgcttctctgttccttgtctaatttgaggagaatacgtttcctttttttctctaaattctaacatttttgtccagcagatactttgagtattatgcctccagtttgtagaaagacattcataatctatcctcttaatatttaaaatgttctaacaattattctatggtatactagtctcagtcttcagactaacagtcactggaagtttacatcactactgtaagaacatgagtatgttttacataattatgagaaatgatactattttatttcatatgtttctctagagaaatatttgctgttttcttcaagactatctagactccaatgtaagctagattcttaggtaggtgcatggcattgatcaaagttgaaatccaagagtacattattgtaatctttgtaaaataaaaaacttaggcacctacaaatttagtatataacttagggaaaataaaacattaatcaggatttaatttgtattaaggaaattttaagctgtggtttacttttttatatatagtactttccaggagcagatgagccattacagtatccttgtcagtattcagatgaaggacagagcaactctgccaccagtacaggtaaatggatagattggaagagtattgacttgatttttctttcatctctattcccatgaaattataatcaagaagtaatgaataatgtccccatttgcattttaattccttcatttcatatgattgactgcaatttgagtttacaggtgcgtcattcttcatgtaggtaccctgattaaagagttattgaagacctgcttccaagtcttagaattcctacataattatgaataaaaagatggcatattgtattacagtgaatgtcattcttaacttgaaaaatcacttttacatgcatactactagatcaagtagtattagaaattattgtaaatgtatttaaacatttcttcatcacgaacaccctagtttttgttctcttctacagaggctctgatttaagaagctatgttaaaagttccttagttttccgaaatgtgaagtagtagtgggacatgtaatttgtggtcatcaaaaagatagtagaaataatactgtaacttagaaatattgtacttctcaaaatatagtggcattataagcatttcattattaattgaaacttaaagatatgtgtgtgtctatatgcacatgtatttaccctgcatttattgaaaaatacttttactgatctatttctcccacctcaagaatagttttatttattttaagatggttactgcttggctagttattctcaaattccagttttactgaaaatattttgagttgctctgaattctaaaatgtacttctctaaaattctatcatttgtgtctcccacgtcctctaaactctctcttcatttccttactgtgaccttgaattttttgagcctcccaccttttcactggtcctcagtcctcttaggtccttttttctttctccctccacttaattccaatcaactattataattcttttgggaataattttcatctttctagcctctctctcaagcttgcttggctaaaccacaagcctaatgaaagctgacactcggcttactccttgcctgtaccaatgcagctgagtgtggctggagatagcacaggtttactatcctcacgtgcatgtttagtgctattggacagttgtactgtattgtagttcatctctttcctcctatatgtcttaattttatactgtagcctctcctcagacttcaaacacctcctcgccactcctcactctcagctgatcttgtttgctctttctctgagaaaattggagtaatcggaagacagcttccacaacatctgtgcccatctactctgctttcttctgttactctggctaaactatccatacttctggccaaaggtgtacctttctgcctgtgcattatatcccatctgctcctctgagcaattctcccctgtctcttgcatcatcagttttagctttctactggatcattcctaaaacatacgtagtctgtatttgcattcactagcttctcttttccccttctttcttgagctgactccattcagacgtattatgccagtacttcagaattgttcttgtcaaggtcactagttatctctacatcactacatttaaggaatcattttcatttctcatcttgactctcagtagcacttgacctaattcattactttctccttcttacagacagcactttcttcagttggcctccgagataccatactagcctagattccatcttacatctctggccgtctgttctcagttttctttgctggttattcctcatctccccaacctagaaatgttggagtgcccagggcctgctcatttggcttcttcacttatctgtctgcactcatttccttggtaacctcattcattattatggccttatataccatctgttggctcataatgttttccatcttatacctgaactctatactcatatatccaactatttcctttacatctactagaaactcaaacttaatattttccaaactgagttcctgatacttccttcaaactcactcttcctttagtctttccgcatctcaattaatagccctcagttcttctactagctcaggttaaaaaccttaagttattcttgactattagaagactatttaggcatcttggttccttttttgtgctatccttaagtttctcttaaaatgggtttgtttggatatcttcattagcttgaaaagtcttattttatttctgttcctgcctggctagtttataaaagaatgtaagttacataataccaagtgaagcatttgtattatttccagccattagtcataaatgtttctgcttttcctaggctcattcatggacattgcttctacaaatacgagtaacaaaagtgacactaatatggagcaagttcctgccacaaatgatactattaagcgcttagaatcaaaattgttgaaaaatcaggcaaagcaacaggtttgttatgttattacaagtaaaactggtaaccttaccagtagtcacaatattatactaactgaaattaattatttaccatcttctattttataaatcctgaattttcttcctgaaacatgcaaaagagcttacaaatagagacacgtaatgagattctcctaccatttattaccaaatggtttttccttctaatgattgctacctttgccaattctaaatccctatctataataatccctaaatgtaatggttgatggttaaaaatgtaaaatgggtatattttggctgcgctgcccagttagaggagttgttctaagtctatcatttcatgctgttcagatttattatatttttgccattgttgatttttaaaaatatttcaaggagtgagtttattcattttgcctgaggcatttaggttaacgaataattggggcttttagctcccagttctagtgactgccttttcataaagacagtatctgcagcttgctttcccttacccctgtagctccctctcgtacaaacttccctctcctttcagagcagaacaggatctatcagaatcccatttgccatcttcctccttttaggttgcctaagattgctaaatctaaagaacttcagtaattcagattgacctgtaattttaacagagtgaatctggacgtttaagcttgggagcctcccgtgggagcagtgtggagagcttgcccccaacctctgagggcaagaggatgagtgctgacatgtctgaaatagaagctaggatcgccgcaaccacaggtaaaaaggaactacaagtctgaagagtgaaaatgtatataagcctttttggccatggtagtttcagttgtcaaaggttttttgtgtgtgtcttatatttttttttaaataggaagtaggtttacaatatatttttctaagttactagcaatagtttatgcatttatctcaaattccaaataaggaaggtatgacttgtaaaattatttggatgagaaagtatgccttcctcatttacagattttatcaaatgtaattctttctgctcaaacatgagttgaaagtctaagtgagaaattgaaattctgccaaaaccagaatattttggggattttcagtgatactactagatttttgtgctgaactcaaataatagcaaatattttgtttcaaatttaacagaaaaatgtattccagatccatgtatgatttgaccttctatctgcttcttcattccagtgacaaaataatagctaagctggttgtggttaatttttttaattgtaaaataaaatatcataattttattagatcttgaaaaagctagcatttaaattccattgttcagttcttaaaattattaatcatggaagaactggtcagcacaaaaacaattacatgttttgttacttaagtaaactgacaacctaattctgtgaccaggtttcattttagtaatgctggtttaatttggacgtttttggttttttgctgattctttccagggatcagggggagctgattttaaaagtaaacacgtttctgttgtggaaaatgtggaaatgtaaacaagccaaaaaaacttacataattaccccactcagagataaacacttaacatttttgtgtatttaccccatcttttaactatgtatgtgtataaatgtatatattcatgtgtatttgcatcttttttaacttagctaaccaattttttaggtctttttttcacttatttggtttttttctaaatagaatattctcattgtgtgtggagctcttttcagaaagaagttgtcaagatggaccatcatactatacttgtcttcaactaatcatgatcattgattttatcagctactattagaatccattagatataacagaatatccgaaataacagtgtctataacacataagcattatttttcacatataaacaagtctggaggtagtgggctctgtgatcttgaagtaactggtctcctatttctgtgctgtaatccctactgtatagcttccattctcaaagttatcctgtgctccaaaatggctgttgaagttccatttcatcacttctacattccaggcaataggaaggaagacatgggggcagggcaaatagacatccaagttctttgaaggaacattcccagatgcctctcttaacaacatccacacatcattggtcaaagtaacatggtcgaatggctacacgtagctccaagggaagaggagatctgccctcttttatctgatgacttttctgtcctaaataaaatcagagtactattgctaaaacagaagggaagagtggaaactggcagaagatagctgtgtctgccacagatgggtcttcagaaactatcaagttgagtagaagtcaccagccactgacaagcccatgagtctccatgagtcacaagtatttctttggagcagggttgtctcactgtagtgtcagatgaaccctactcaccgggacataccctcatgctttgaggaacccttttcacttcagggatgttgttcaggatagatctgccacatactaattgctgtctcaaaactgaaaattgttataataatggtttcatgtcttcgctagtatcatatttctagtcaagcactggttttttattattatttacagaaatgactttgctagaaggataaccacacacattaaaattttgcctaagtgtagaacaaatgctattgtacatcccttgagttttacacaatttaaattttttcatgaattgtcttacttggaaagagtcatactttccagccttttgacagactttgtgtttactgtgaatgtaccctaaactttggaaaatataataaatatttggtactagaaatatgtataagtatgactacaaaagcatatacatttcacactttgattcaataattattatttaatcattggattttactttatagcacacttcaagaaacacctaacttgaacatgtattcctgtgtttgtgtaattaaaacaaatacgacaacttactttttaacgcctttcttcctctcctccttcgttcccccacccccatcacagatcagtgatttcacttaggtagactgtttctatgaatatatttgaaattttgcttcctcattaccctgcagctttgtctctgttctttttatttttttctgctaattaaaaccagtgtgtaaaacatcttgtatttggtagttgtttgctctttaatctcgccttttctgagcatggatgaaaagttaggtagttctgcatgccattctgcatgaaatgttattaacatgaactatttgaaaatgagtctatttttgtagttaatcattttccgtgttactgtttgtggttgtttgcatgtatactgtatatatgtgtttttgcagcctattccaagcctaaacggggccaccgtaaaactgcttcatttggcaacattctggatgtccctgagatcgtcatatcaggtatcatagaccacctgagttggtctaatagctgtggaaccggaataatgatccctggtacttgtaaaatgcttcttgctccaatttttacaagacatgaaaatggataccttgcatgcagtaattagggagacagattgaaaaactacatttattctgaagcagtcttgaaaagatacctctgatctacaataagtgaggataaaatagaagagaaagtaaacctttttggagaagggagaacaccaacccagaattctaccaacttcctctctacttttaagtgagcacatgagctaaacccagaccttttttgcacccaacagaaagaggaaacaactaattaaaatttgttattttccttggctcctttccttcctcagttactgctttttgggtcccctctagactttctgtcctaacctctttctgttggtagcaagtgaatgtgaagttgagagaagagagttgctaaatagcattttgccttaacctggaaaacaaaaagtaaagctaaatgagatgtgctgttttgcagggtatcttgccaaagaatcatgtaaaatagttggtcaattctgatttttgtgtattatcaggagaatctcataaattacatgtttttatacctaacttacacatggtactttagtgtctaaaattggtaaactgctttatttcttatggtgatcatttcatagaggaatatgttaccatttttaatagaaacttaaatggcatattgaccttcagtattgattaatgtattatcaaaattatcatttatttatccctttaggcttttctctacctctttacccaaaatcttgataaggaaatacatattttccacacacgttcatgagtgcgagttggatgaattcttcagcatgctgtcctttgcctgtgattgtgtttttagcagtgttgataattctagttgaatacctaatggttattttctcctctactaaactgaaaactatgtaaggatagaatccatatctttgtgcattattttgttgttgttgcttattattgattgtatcagcagttgctggctcagtgcttcacatattaagcatattaacatagtgtttaataaatacatttattaaataaatgaacagacctattgagcatctcccctggtgagaaactagcatacaaaaatatgaattatactattcttaggtgccattttgtctgtataaaactatcttatattaattttcccctggttatcaaagtggtttcttattttacaacatcattactattgctattcaaagagtagagttaacccatttttcacatggtaatttttatttattgaatctggactgcttcagaaattaacaaagagatcattttacatggagatcagtttacctccatgcggaaaggtactgtgtataagggacgtactttaaagaggtggaagcatttaaacttacataccgctgaactgtgcttcccttaaatgtttgagggaatcaggaaaatttagacagatggcagtgtaatcttatgactaagcattaagaataaatttatatatggcagcgtagcccacgctatacaagataatgggggagggaaaaataaggaaagaataatagtttataactgtcaggtactactggcatctagtgggcagagaccagggatgctgctaaacatcctgatgtgtaccaggcagtcttctccaacaaagaatgatccagcccaaaatggcagcagtgctgaggctgaaaacccctgattagatgttctttgtgccctacaaagtagcttaaagtacatcttattttacctttatacaatcttacaactaggttatcggatgaaattatagctgtttaacagacgaagaacttagatctgatgatgtttagtggtttttccagaatcatatagccaggaccccaacccagatcttctgactccaagtcacatccattttttgttcttttgtttaagtcagagaagctagagtaatttcttcttgctttctcttagtgttcacattaaggagagctcttcagccagggagatcctcttttatgacattgggcctttatggaatcaggtaaccttaattctcttaattgccagagcagcagtgctattcatatgaaaatattattcagtaataccttttattaaatattctttttaggcttttcccccctcagatatcaaacattaacttactcaggtgcactttctttaatagaagaatacaagctgtagaattgacactagtggacataaaagccaatcatgaatgtgctcataggtaatgtttttaaattaaatataaaaataccgcccatcctttgggaatatctcaaatttcctacatgacattttaattgtaaagaagggtgatacttaatttccaaaatttcttaatactttctagaaattgttttgttctaagtggatttcccacaagctttatggtattagcaaatacttcttgatatattcaaactgtttaattagcattaaaacccaattgcaaggattctttttaaatatagctttttaaagatcttatttacatggataagagtttcgttaatacttccctttggccaagtgcaatgtactgagtctaatgtacttcttggaatgaactacctctcttaataagagcaatccttcaagcatcacaaaaaaggttttgtatatatatctttaaagtcactaaaatgtctaacctagtcataggtaaagaaatgcaaagaccctaatcttgtaatcttgttttttgctcgctcttcaaaatgtgtatactatgccatcagtcaaatgtggaagaaaaagcaacttagcaaaacagcactatttatcaatttagtagtctctcagatcatacagaaattaacctttaataccttaggactccctgtgggtcagactgtacaattttttatacctcttctaccatattactggctctgaagaactgacaaacttttgtacggtaacccttccttctttccactgtccatctgcccttaaaagagtgagctttatagattagcctggctcctttttaccaaggaagacacgcagctaagagcaaattaccagtagagtgtgtgacattttgctgactcttcctttgtagagaaggtcctgccaagtagcagtgtgctacctaagcaaagtaaatgtaaatgtggaagtttcttgcccagtatttagaccatatgaactacagttttctaatgcatttgcttgctggtaagttggaagggacttcgagaaaagaaatagattttcttaaatgttttttattaaaacttgagttttaaaaaccatatcctttctcctttcagccagtacatctaatttgttacatttatatttgaagaaaagggaataggtagcagattattggattctttgaagtttttctagattttttttgttctaggactttaataagggcagtaagaacacagatcattgttttgcatggattttctttactttttcccatattttctttttgtcactatctaagcttccaagaatctatttttcacccaccttcatctcaagtacacaaatgaaatagattattgggattgtgaaactatgtaagacattctaatgcagttcatctgatgttagaagaatacctaaattttacatttcttttaaaaatccaaatgtcaaagaggaacaggtagaatgcctaaatattacaaaaaaagaggaacaacctttttcagtttaacatgtagagtaagagaataagtagttaagaaagcgaattatttttcatgcttgtagcatcagtaatggaagatgggttgttctgctctggagcctttgtgtgagtagttatagcatttaaggaaataaactgtaattataatgcattctaaaatctactggaaaaaaatactgtcatatacatatatacttaccacctataaaagatttaattaaacattagtcttctgcacttctactctgatataaaatttgttgtacatggttcataccggcttgattgcttttataaagtgaaatgagtttcccaaatgtgatatgcaaaagtaaaattttctaaattacagacatttttaatgctattatatcatcatagataaatttatttcttagttcagattagattataatgcttgatttcaagtacttgaaaaccatccattctatagatgaacattgccttgaagtgcttcaatttgagaaccttgaacagtgttgctttagtgtaccttttgttatttctaagcctaaaataatatggcataacattcgagagcaataaaatgccttgaccaaagaggattttctgtcttacatactgttcttaaggatatgcaaaagaagattgaatatacaaatgtttttgagtcagatcttactgaaatagataagatttttgcctagtttcctgaagaacctgaacttaattgatatttattgtttgttatatcattcttaaagctaaaaagaaaccttaggtgtccttatgatttcagccgcatttagatctcttaactgaataaaaaacgcgtattcgcttttaatttcagtcaaggacgtttagctctattgtatattggttttttactaacagtatgataagtagtaaattggagtaagtagaatgtagagaggcccaaacattttaactgaaaaatagatgagtagttaggcttctaatacttgtatcttgttgccctccttcagaagtttcaaatgtcaggtattggcaaataaattatctaggtggggagggctttatagaatgcttaaacaactggaagcagagatgcttttcaaggacacctgagcactattttgctttctccaccaggatgaaaatatcacttttttaatagtatatttggttcaagagccggtcggtaactaatgtttgtaaacctttctttaactggaagcatgtaagttattaaatatttcctccagactactgcagcaccaatatgaagaggcaaagagagaaagaattgagtttttctagatctggcaagttctcacctagcacagatagtgtcattagcagatgtaagcctttgatagggatcctagggctaaggggtgctatactaagatgtactgtactagtttctgtgtatagccacctcactttcaataaaattctctatttgtggcatattaaatagggaagttaatctaactttataatgaatatttaggtggcctttctgccatattgtatagtctaccaagatcactttttgtaatctaaaaaattcaactctaagctaataaagctggtttattggaaagcaaataaaccacctgacggacctttccagtgaaagagccagaatttgttaaaattagtaaagaaatacgaaactttggcagcctaaattagaacatatattttaaaattacatgttcagtttaccatgaagcagtaatgtaatgctagtgtatcatgctatgcatttttttaaatcttgggtattttacacatgaagagaatggtgtcccataatgtgtaatattcaaaactcgtgaatctcaaaatttctaacatttaggttaagagaagtctccaggaaaatgtagtgttgattcttacatgaagacagtcttcaggaagttttaaagtagaaaataagagtagtgtaagtcaaggaaaactatgagcttaactgataagaaaaattacaggagtggctgtctgggacctaagccagcagtctctggaagaaacccgggataacttttaaataccagctcaggaaatcagttgtacttaaaagagcagcttttttgaagaggggctctgttttaatgacattactgtaaaaagaatggaactgacccctaagttgctttctatttgcggtgggcaggagtgcagatttagtatgcactggcaatgtgatgtattcttagaagtcattctaaaaagtggaatttgttctctattataagacatgaacgttccagaattcattacagaatgaaatactcaggatagcatatgcaggtttcagattccttgatcaggcatctgtttacatcatgctgtcctcatttctactactttttccatttacactaccatgtataatataggtatgtacatatcaaaggaccaaaaaaggtaaaatgagtgaatgtctaaattagtattcagttgcaaaaaacttcagaatcaattcaaatttactgagaacacacccagtaattttcatttgaagtaataggaggttgatttttcttacattcatatttctaaattatgacttaaaatttaatattggagcaacaagtatttgttgattgcaatcctgttttgctttgtctgaactatctgccagatggtttctgccatggttgtgctaattaaaatgcattgcctaatactgcttgctttgattcatgcagtagcttaaagatttctcattttatggcatttgttaactgtcagctcttctttaccttacttccttaaaaggttttacttcccttttctcctatccttccacctaaatttaagttcagtttttgttgttattgcaatggtgatgtaatggtttatagacacatgtgtcgggtggttcctcagattaacaaatgttgctgtgttgctaatctgaaaagagaattccagacacttttacaagcctgtctcatcaccgctaattttagaatgaatgtgttgaatgaaatgtgcctaaaattgcttattagtcacggttgtggggatcctttttgtccttgggaaacaggggtagttgaaagtattcagaaaagtaatctagtggatctaattcaataaatgcacagttttgttgttttagtttgtaatgaaaagttgaaatttttggaataaaatgaaatttgaagtaaatgtgaattcagataatgcaaagaattataaaacgtagcttaaaatggaaaaaaactgatgatgtcttacatttgcaagaggagttacaaatttgagtttttatattcactacacatattattctattaaacattcttattccattgtaaggtccttttagtttatctgcagcataataatggggtcatgtgggttaaggtgctaaattatattgctgattggttttaaaaggatgtctctacgaaagattctggaagtctaaaattttaagaatgaattctgtctactaatcgggaaactacaattagagtgagtacatgttctaagtgttgcccactagttgagaaattacgtaatacagatttcagagtcaaaagaattttgagtattgtatcagctgttactcagtattttggtgtttccttttagacagctgatctctcacgttagaagatactgcataaacagctttattcccaaataaaagtgctgagtgaagccattgctcaattcattgttttgctgaggacttatatgtgtagaattctctcataaattgatttttaattaaattaattataaacatagaagtttctaaagcagaattaacacaatagcccatttcaacaagctgtatatttgagaacagagtgacagttattaacatccagtaggaaattaagagttgttgttcacaaataataaattactagattctgacaaagactaatggggattaagtaagcgtgactcaatataacaaatttaagcctaagcatcttctaggccctgaaatgaacaaggtattgctgccagttaaagtcagttgtgtcttacaacctgctagctgtcttgctgtaaaaactgtaacgtaaggcccttgaaatagatgccgtcatcagccccagcccccaagcattcatctatttaaacacatgacagaagatggtggaagagagttcagcagctattcatgtggtagaagtggttattgtattaggacatactctgttgtaggccagcaacttttgagttaaaacaccgcagctgtttctcttcctttctttacatctttctcttcttttttttttttcttagcaataaactcacttttttttccccacaaacattttgtgtagatccaaggagcaacaaattccaactttctgctgtagcaattacacgctttttgtctgtttgactagattttagtattttactttttttcttctttttaaaggcaacggacagccaagacgtagatccatccaagacttgactgtaactggaacagaacctggtcaggtaagacaacattcaaattttctatctttgaagaatactaggcagaaaacaagaattaactgtattctactctgcaaaattagttttatgagttgacctaaagttgtgatagagaaattcattgcacctgaacttaaatacttaggggggaaaaaaacataggtgccattgttaatttaacttgaaagataatttattaaagtaggtttattaaactccatggaaaagtaaattgttcattagcgctgtatatatgttatatggttttatgtatgttttaataagtattcaattttataatttaacaatttatcattaaagtgtcctttaaagtgaatcattaatatgtctcctttttactaataagggtagtaaacatttccccaataagttgctactcctctagcgccacgtagggcattacatggagaactctaacgtcttttaacttggcatatccactggattaatatttttttcaaatatccttaagataacatttactaagcaaatgtgtaaactctcgaaaggcttctattccagtggttaagatttcattgtttatatttctggatcctcctctaaactctccttgtctctttatcactgctgctttgcagatgatgcagacagtgttataatttaagccattactgattagtgcagagttttaacccaccaggtatataaaagtagctcagtcattgttttttctgtgttactcagattaatacacttgacatatataatttattatatactatattctgtaaaatgaatgaagattaattataaggtgtttgttttcagctgtacaagaataagttttatgagagcagcataaaagtaatgaaattaagtaatgaaattgttacatattaagaagtattaagtattaaattattaagtattaagtaatgaaattattacatcgtgacccatatttttgtaaaattttagcgtttatatattataaacaatctgttgtaatttatgataatatgtattagtacttgtcatcctaaaaaggtattttattattatatcatttgtataatatacttaaaatttgggagatcctttgtagtcattaataaaaaagtcttttatacccatcaaccaacttaccaaaaaccacttcaaatatttaagtggtgaatatccttgatcttcatttatatctggaaatatgtttatttcacaaaatgcttataaacacatatataaataaaatctatatagacacattaatttattatgttttgtgatactagtgactctaaatcttgatttcattatttagtgatagtttttttcagtgcatctgtttttgtaagaccccagaacttttggctgaagtttcccgttttctccccctcagatacttaaaagttttaatcagcccatttagtaacagatagtttgacatctgctatttgctttgattctttggaggtttgatgagctcagccttttaaactctgtttactattgccactgatattccagttatgagaacttctagccaactgtttgactaggaatgagaagcttgtcctaagacatgtcaggagcagctactagtttgaaagcttttctgtagactctagaataaaagtgttgccataattcaggactgatcttcccacaccaagtcttacttatttcttcacaagttccacattatttgagattttcgttgttacccttttaattcacaataccttcaggtagtaaaacgctggaactgaggccaactatgggtgtgggacagtcatttgtggaattgtcatagaccactctgaaagatttggggtgagggagagtttgatatgggtgagggagagtttgatatggcagtaaaacctgttctgaaacaggtgatgtatgaccattgtgtagccacattttaaaactgatccactctttcaaaattatttgtgttatagccttaaaatgcctaatgttcagcttggcatgagagtggcaaatactaatcctaatgtactatgaaaacatttctcccaaaaaatgtatgataagtgaccattaaatcttttaaattactcacaaagatgatattcatttgaggaagaaaagtattcacaatatgtgttttcaaaattggaaggtgccatcctttttgaagtctggctaagcgtgattccatcttgcagaggaaagtaaacttattgtactgtggctcttgactcaaaacataatcttagtaaaaccacttagaatttccatctgtaaactaaaattaaattggttgtttttctgctgccatccatttgagaggaacagtaaatgaagcaagcttcttaattaaaagtaatgatataagtataggtgtaaaagattgcattcttacaacatacaactcactttcaaacatggttttttcattaattcaggaagctttttaaacactcaatagatgtgacttcctagaagctttgaaaagatactgagaaagaaaaaagcagtccctgacatccaggaactggtttgacactgtggcctcactgttgttagtagctagccttattctcaacggctggctgtcacagctagagcatgttactgtcttattggacataatctctcagaacaccaatatcagacaagataatgctgagaccgtgataaaaggagacaaaacaagactacttcggaatgttttctaagcacagacaaaaacaaggtcactgtgccacccacaaaatacctaacattgtcctctcccagctattaagagtgactgctgcttctttaccaattacagcttggtcctcactctggactgccctccctgtggaattgcccttgctttctgacagcggccaatctggaacgaacccctccttcctttgagtttccccaaaatcactcaaccaaagcctaaatcctataatactttctttttctaaaaccctcttactgagacaccccatgctgccccatggtaagcattctccttcactgcaataaatattaaacccaactctttccactattggtgtgttcctggcagtctttggctagagggctttgacaataccaataaagcctattccgcaaggacctcatttggagagatcagacttatgcccaaatcaattagaaaactaaagtaataacagcttccatttgttgtgcactgactttgtgccagataggctcttagtatacattatcagaatgttaatcctgttatcaggatcttagtcctgtgaagttggtactttttcacctaatttgcagccaggtaaagtgaggatgagagaaactgacctaagtctcttacttccttatactgccagtaattcctataaccaggttttgaatccagacctgattgcaaagcacacaaactctatactttaatcattctaacttgcatgtgaaactagatgtgatgcatgctgttatagccctagatctcttacatttaggtattttggcttctaatagtctgcattgtcattaattatttaaacagttgttaagtgatgatgaattgtagctgtatcatatcattgaacaaggttaacctatcttgataataaatttctaccaatgactgcacaaatttatgttttatacacctgggtgagccattctgtgtttcactaaaacaatatacattcttataaatgcctgaataccccttctggaattgtattcagtatagatctatattcaagaattctcttagaggaggctgcagtcagtgaaaattacgactgcaagatgatacagttatgattatttagagaagtgggcatattacatttccatatggactttataatctacttttactagtcaaatatgtgactttgggcaagttccttaatttccctgagcttctgcacccttatctgcaaatagggaccataacacccacctcccagagttcttaacagatgtgaaagtgccagggcacacagtagatactaatccatgttgtatgccagcctctccacagtgtgcctcaccgggctcttgatatcacttccttgctctcatgatagtgagaaataaaaagaaaatagcacttggaaagaagtaaaatccaccagcgttctttctgtatcataaggaaaccttgtgtcaaggatcatggaaagtatttgctttaaaggtctcttatcgcatattgagtgatattaatatacattgttattatttatttaagggatgtgatttattatactacttttttccatcttcattctgcacctccttttgtgtaaacaaatgttctggtaaactctaaatcagaaacttatgtaatagttttgaataattccttcttcatagtatacctttctattggagaatagacacgtttcttcttttttttttttttttccgagacacagtccccgctgtcagccaggctggagtgcagtagtgtgatctccgctcattgcaacctctgcctcctgagttcaagtgattcttccacctcagcctcccgagtagctgggattacaggcatgtgccaccacacctggctaatttttgttttatttttagtggaggcagggtttcaccctgttgcccaggctggtctcgaacttctggcctcaagcgatctgcccgcctcagcctcccaaagtgctaggattacagtcgtgagccactatgcctggcctctgttggagaacagacacctttctattgtagaagaccatgtaagaataataaaattctgaaatttccttatgaaaaactgtagtgaagccaaaatagatcaagcctacagacctttagattagaaagaatattttcagtacaaccttcatgtatagatttaattatctgtaactaccataataagtacccatgtaaatccacattaccaacttatacccattttaaaaatatttatattattgagatgttactttagcaagaatatcatagaagtcatcatttaatctctgtgttttgtgcttgtataattttagctactaagatttctgagggtattaaatagcttttaaatgtcagtctaaataataacactgggtgtaaattcctgacttatgaaaatattttcccagtctttcaggtaagatattaaaagctgagctttatttttgtctgtaaaataacttccaattcctttttataaatatagggataaatttctggtcaaaggccaattctggttcatgtctactgatggtaatctgcccctgaggtttaaatttggcttagtattcttttgctgccttaaattgctgtgtcacgtttctatactcttgtgactttcatatccagttcttttggtaagtcaagtttgcctatatctcttaaactttgcaattaatgtggggatagaataagtaattttaaatgtcttagaggaaggagcaacttaaatgagttttaatagtttgagagcatttgtgaccctcagaattttaccagtgattttaaaaaataagtactgtaaaaacttcttcagtagttggttacaagcagtaacataaattcagccacaaactagtttgagttttttcattgattgtcagatgttatgtgttcctcttatttatgccttgtattattcacatactcaaaaactacagttatgccttgtttttaaatatttccttagtttttttatacaaacatattagcatatttttatttattgagatacacatttcttaaaatataaagatttatttattagttaatggatttaaatctaactgtgctggtctaaaaacagttttgaaacttgcattaaaagtgcaagccttatatttcttagtttcatagctgttggaaattacaagtgggacaaacaagcatgcacagaaggtgctaagagtttcttggaaagtagaaggtgaaaagaaaggtgtagcaaagaatcattttgcaaaagatttaagcttaaggagtactataaaattcctattaggtccaacttatttgttttaatattgcagatgttcagtgacctcttttttaaatatactaaatccattctcattttaaaaacctaattattacttctactgtattttgttgatttctcacaactgatactgattcttacatgtcacaaacatgtgtttctctttttaaaatgtgcattagcattacactgactctgaaaccctggtctgccaccactttgaaggaaaaatgcctttgatttataatagcagttataactatgggcatatttgtgtacttgctttcagtcaaagaaagttaaaaagactcaggaataatttcataatgtctatacttgctttgtcaagggtaaaagtatcctaaaagtaagagtgaaacatttcatcactggttttctttggtgtatgtcgttgttattcttatatactaaaggtaaataagcttaagcaccaatcttgtatctgagtgctaatagcttgtgttctcattttattcaatgagtatctattatgtgtttattatatattcagcaatttcccagatcctgggaagtacaatataaaaagtacgcatggtctctgcccttaagaggttataatacttttgaagaggagtaaaactttgagactactataatttcgggcacaagttgaagtaggaactgactatacagccaaaattcaaagaagaaaaaaatctcgtgtgaagacatttcatgtacatcatttcatttaatttttataaccttatagatagataatactgtccttattttcctattgagtcttagaggttaaataagttacccaaagctgtactagttagaaatggcagagcacagtcaaactctgggctgtcttgtctccaacacccaacttcttactgctactactttttctcattcacacttcatcaatgagaaacctaagtctcagagaggctaagttacttacacaggttcacacagctgtaagtggcagaatggagacataaccccaggtctccaaagtattagactgaaacatgtgaagttgctgagttttcaactacaaaaacaccagttttatctggttcagttttatgcatgccctgtgcactacgccgtattatctttaggtgaatatgaggtcaggattaaaaactgcaagggaaacaggggcatgaggaattttaagaggagagaaaatccagatgggcaaggtaaacctgctgatggagagtcatgaatgccagagtgagaatttcagaattgattcagtaacaatcagtaaacgaacattttgcctgcagtacactgttaggcactccatgtcctcaaacacaaggtctggccttgtacacaaacaaccagagaagtggcaagaatcaccacataatgtagaagaaaacctgagctgggccttacagggtggggaaggattaacaaggagaagaaaagaacagaatgagcaatcttatatggagttaaaaattggttatggtgtagaaaagctttttggaatttctgaagcaatttcagtgggtacccaaaatgaaagtcatatttcatcagtttttcttcaaagttaatttatgatttttttctctgaaattgttaggaaagtacctttcactaaaagtataattagattgtttgtaacacaaaggataaatgcttgagggaatgggtaccccatttttcatgatgtgattattatgcattgcatgcctgtgtcaaaacatctcatgtgccccataaatatgtacctactatgtacacacaaaaattaaaaattatttttaaaaaaacagaaatgagaggaaaacaaagtacctgtcactgtttattatcctgaatccattgtggcttttcaagacctaaaatcatataattttagcactatatggaacacttctcatcacattcttaacccagccccaacccctctccagataaagagaggttgaagtgatctgaagcagacattacagcataattagaactcacatacgatggattctactcaaaggtacttttgtattgcatttcattttacttgttgcagtcttgaatttgagtgtttgtatatatgttgaagctagatataagattcttcatgaatttattttaagttttattttctataactccatgttcttttttaagtctcttctttggtactcagtaacacatcaagaaaaaaaaggtgctttttaaaaagtccttatgaggccgggcgcggtggctcacgcctgtaatcccagcactttgggaggccgaggcgggcggatcacgaggtcaggagatcgagaccattctggctaacacggtgaaaccccgtctctactaaaaatacaaaaaattagccgggcgtggtagcgggcgcctgtagtcccagctactcgggaggctgaggcaggagaatggcgtgaacccgggaggcggagcttgcagtgagccgagatcgcgccactgcactccagcctgggcgacagagcgagactccgtctcaaaaaaaaaaaaaaaaaaaaaaaaaaaaaagtccttatgaaacccattttagtttctgtgtcctttgaaaggctttaatatatgaaatataaatatgtagacaagaatgtatataatgtataagttatgaaaataaaatgagcacttgtgaacccaccacccagcttaaggaatggaacattagcaatcccagtgggggttggtccctgtgtgttcctcgcctgtggccttccctgtcatttccccaccaaccctcagtgccatgttctgtcatatgtcatgtttccagatatcataaataccttttatctgattaagaagtcctcttcccactgggcacaggggctcacacctataatcccagcacgttaggaggctgaggcaggaggatcgcttgagcccaggagttcaagaccagcctgcacaacacgggcgagaccccgtctctacacaaattttttttaaaattagccatgcatggtgccgtgagcatgtggttccagctactgaggaggctgaggtgggaggattacttgagcccaggaggtcaaagctgcagtgagctgtgttggtgccattgcacaccagcctgggcaagagaacaagaccctgtctcaaaaaaaaaagaaagaaagaaaaagaaattctcttctcatacatggaatttaagtttgttaaatgtcttttttataagtagatgttaaatgttgtcaaatgctttttctgcatctgttgaggttttgtcctttaatctgttgatgtgattaattttattaatggaatttcctaatgtcagatgagtgacctttgcagtcatttgcaaagttggataaactaaactttttaaatggtttttattgcttctacactgccacattatatttgctaatataatttttagaaattttgacttttgtgtctttttatttttattttatttttttggaagtgaggttcagttgtaactttctttctcacactgtccttacatattgatttttactgccttcacagaatgggtcagaaagtttcttctttctttgtttaggataatttaagattggaaaaatccttatcttgaatgtttgatagaacttacctgtaaaaccctcctctgtgcttggtattttctataatgtataggaatttttgaaacttttttttaaagaatgtgttcatttttatagtattgtctccgatttcaaaatactatcttttactatttttcattttgggaggcaaattcttttttttaactaagttagatctctagcttataaattgtcagtgtttctggttttttcatatatatatttagaattaaatattttcctttaaatgctcttatagtcacatccccaagtattagcatgattcacgttaaaagtcagttcaagtactttctaatgtcccttttgttttcttctttgaccaatgagttatttagaagtgtttttcaaaacaaaagatttttaaaggttttgaaatcagtataaaaagtaattaagttatgatactgaaattttttttaactttgagatttgctttatagcttagtacataatcagttttcattagtgtcccatgaatgcttaaaaagaatgtgtattcttcatttgctaggcgtaaagtcacttatgtttagattaagcttgttttttatggagttcaagttttactgtgtgtgttttgttttgtttttttggtctccttttatataatttacagaagaatattaaaatatattactgtggggctgggcacagttgctcacacctgtaatcccagcactttgggaggccaaggtgggaggatttcttgaagccattaggtcagcctgggcaacataacaagatcccatctctacaaaaagtttaaaaattagccaagtgcaatatcatgtaactgtagtcccagctactcaggaggctactcaaggaggatcacttgagcccaggagtttgacgatacctccttgagcttttttactttatgtgtttatatgtacagcatataaattttgaattgttggccaggcacagtggcttatacctgcaatcccagtgctttgggaaactgtggagggaggatcacttgaggccaagaggtagagaccagcctgggaacgtagcaagaccctggctctacaaaatattttaaaattaactgggcatagttgtgtgtgcctgtagtcccagttactcgggaggctgagatggaaggatcgcttgagcccaggagtttgagggtacagtgagccatgatggtaccactgcactccagcctgggcaacagagcaagaccctgtctttaaaaacaaatctcactgtgatggtggatatgtcctttttccttgcagttttttgatttatctatttgtatgtacagcatataaattttgaatcgttggccaggcacagtggctcatgcctgtaatcccagcacttagggagactgaggcaagagggtcacttggggccaggagattgagagaagcctggtcaacatagtaagacccatttctacaaaaaaaaattagtttttaaaaaataaattttgaattgttgtattctgaattgaaccacttatcatattatctctttctctagtaattttttggaccctaaaatacattctctctgatattaatataggtaccttatttggggtagtttttgcctggttttctttttttatcctttaactttctgttttctctgtctctgtaaattagatatgtctcttataaatagcatttaattcatcctgacaatctgatttttttttaaatatcttaactggagagtaattcatttacatttattgtggttactgataagtttgctctcttatgttttatttctctttcttttctttcaagttttgagttgaataaatttattcttcattttattattttctttctggtttgggagttatatattaattactacttttagtaaatacctttgaaattttaacattcatgcccaacctagtaaagatctgtaccctcatcctgaacaatatttaaaacaaggagttttaagtcagtgcttttcatgcttgtgctattgttattataattttagtgccatcttgtttgtttgataattctataaattcactgtttctgtcactgaatgttttcagtgtgtagatttatttccctgtttatcactattccttattgcatcttgatccttctatcaagtaaaatttttcttcttccaaaaatacatgcttgaaaaacttatgtggtaagaatgtatggaaggtaaactcagtttttgcccatctaagaatgttattttggcctctatcttcaaattttgttggctagacaattctagactggcagttatttttcagcactttgaagatattgttctgctttcttctggctgctttttctgtctcctgttgattgtttcctagaatttgaatgtatacgttccatgttgaactcaatttgtgagcttcctcctatttcttatgctggggatttgttgtggttggaatttgttgtaacctgcatccaatctggaaattttttgtggattcacagttaatacatttctcccttccacccagagccactaacccaagagagacaaatttgtttcctgtctgcttttgtaggtcagattttttttttcctagttgagtgaccttttctctgagagtgaagcctttgctgagttttagctttaagcagaggtttctccagtcttacttccatcctacaaaggcccaaggctttatggtccattcctctgagtgcagcagcctgtgaaaacagtagctctaggccattggtgtttagttgaaattccgagggctgtcagcttaagcacttactagtttcctgatattgttttgtttctaatctcagagtatttcttagtttcttgcaagctcatcagtttttaataggtatcatgcgtgagtgaatataaatttttacatatatataagagaggatttattttgttgtttacaagagttttggggggatctctaagtctcttcttgccttttaatggaaacgttctcgtcattttttttaatcaaaaaatcacattttgtttctcctgtgacttcttcctgtaggtgagcagtaggtcatccagtcccagtgtcagaatgattactacctcaggaccaacctcagaaaagccaactcgaagtcatccatggacccctgatgattccacaggtgaccagtctgtttcttcatacttatgaagttgaatcagtcatgtttatattcatttggccatgtcattactctaatgtttacaaaggcaggcattatactgttgtttagatttttatattaaataaactatttagtaatacatgttaaaataccattttgaatacagagacagagactgccttgccttctgtattttttttaatccagatactaaacatgtattttaaagattgtctgtttggggtttttttccagttgcgaagcgtattgaattcttgatacttcagcctgtgattttcctactagattcatcctactagatgatagtagtaaagtcattttttcagtaaccaaaatcggagaatggtaaaaatcatccccatcatcttcatctcaatcttttaaggacacgagatgtcatgtaccttaagttgaaaaaaattctgaccattgaccttttgaattgtttttaactgataagagacaccattttcagttatacaaatattctattagacctttagaaacctgtgatgagttattaaagctccccaacatgaataactaactgttcacaatattagtattaatgtctacctgcctaaaggtagtgacggcatcgtttcattatgggcaaacaggaaatgatgtgccatagtagaattaacttttccctaactttaagagaataccttgataaatgcttttaagtgtacttatgaaattttttatttatattatattaagtcacgaagggaaagatgatctcttagcccttggaaaattaaagcatttgatattttatataagatcgactatgttattaatagtaacaattagattgaagtttaaaagccagctttctgtctttacaaactaaaatacaactcaagtatttatagttatctgatgtggtttggtcaagtttataatttaatttaaaaaattaactgggtggtttttctgtgtgtcatgtaagatagaactatgtttagccagggtgtactctctagttttagtaagtttaaatttagtggcggcaaaaactcctgtttcacccctagcacagcccaacctaggactgtccagagcattcaccactacgcagcacatgtgtagaattcattatagacttgctcctccccagtggtagacagggcaatgctcttgcccagttttatcattaacattcaggtgatagcagctctttttgatttctgaaccccctggcaagggagtacgttctctgacattacagcatttgcccgggtctggtactcaactcagcagagccttctgtcttcagtctacactaatctgtatatgccagtcaatagtgtggcagattgtgacttcatgggggtaaaataaaaaatgtttaaggctctctctcacataactgctacatttctgcctcatatgttgcttctaccttccaactcccgtcccattgttttctttttctgtacctagaaacaccacaaaataccaattgctagaaataatttgcaatatcagctgaattttgtctttgccttgaaatatattgcacatgtgtggctataattttgaatacattttaaaaatggatgctctggtttaagtttataattaattcagctgtgcagtatttgtaagaaaaatattgataaccaagctaatagaataaattagggaacagataggtaaagtctttttctttgaaggcccactgaccaaggaaaaaattaagagtgtaaatgtaagttaaagtgacctaattaaatttttttaatttgagaggtttttgtatattttcagagaaagctaaagagcataacaatttaataatcatagccgataataagcgctcttcagttcctatttataatataatgggtattcaaaaagacacacatactgagaggatctagtgagagagagatctagacgcagtagagggagccgcagagggggaaactcactaaagaattttcacctttgcttagtactttgcaaacatgtattaatataaagtgtaagacatggcccattccttgcagtctggttagagtcataatactgacacattaaaagtaaacttatactatataataacttactaaatttatagtacaagctgagtgttttgatagttgtaagagaaatcagttcaacaagacttggcatagtctctggccttttcataaaatgatgagacttttctttagccataaagcagaaaggagaaggcagcattccactgaagggaatgcatactcaaagaatatgagatagtaacaagtgttgtgtttgaggggtcagaaaagagagtttgccttaatttaaccaaaccaacatgagctttgacattcaggagaagcaattagatttgattagcaattgaaacacacacacacacacacacacacacacacgcaaaaaactttcattaaataatcttccgatctgtgaccaattattgctagtagagattggaagttcaatatcaatttagtgtaaagtgagaaagtgaaatcccacttctttttttagagagaagatgaaattcaatgaaggaccttaagttccccaccatacaagggctttaattatttgaataacacaatccttggactttttttctgctcccagaataccacgcaacactgatgtattaagcttaattctaaaatacatatcagatacagggtgctgatataatgagatatataatgtatcagtgatttaagaaagaataataggaatggaaatcttaaattgaaactttttcaagacacttaaatttttctagtaaatcaggaggaaatcagtcatttttaatcagttttagttttgtggaaagcagtgtttatgtgggagcgtagtttgaaaccactgttggggtgggagaagagttggtcagagaaataacaaattaagtatatttcttgtttagccacttcagaaaaacacacatttatgttagtactgtatatgagccttaagggtaagggtaagtgccttaagtctctactgtttttctgtattgccctgcaatatttaataaacattactttttcaatatggaattcatactatactattttaaattgttctttctaattctccatttagtatgaataataatgataactaccgtcatgtattgagtgcttaatatacgccaggatttgcatggtgttcctcacatgcactggctcatttggtctgatttcgctaattagcttttggagtttcttgagagcacgttctcagtggctttaaaaaaacaaaaacaaaagcaaaaagaaaaaaaaacacctggattatcagttgacaataaattagaagattactgagccagcaacccttcttgagtttttttggattgcatacagtgcgtctgctgtcttcctgacttgcctttatccacaccactccttcaaggagttattcgtcagaaaaaggctgaagagctcactcatttagctctttttttgtctactaacagtgggaaagcaactacttctgaagtagaaaagtctgtattgcttcagagttactctgtttacttctggaactgttctacataaccataaatgttgagaagagactgtcccacgcatctcagtcaagttgtatggcagttttacctcttttgaaatataaacaaaagcattctattcaaataattttataaaattgactgattgtttgaattaatcaacttaactgttttcggcatgacattgagccacaggtttcaacctcattttggttccttactgttcgtatttgtaatatactctcatcaccaacatctcgttttctgcagtgattcttactgggaagggcaggatgagtggtggaggtcacattataatctatataaattgaaaatgatccactggaagagaatgtgtctctgctttctccctttccctgttaaggaacattgatattagcggagttgatatagccttctataaaataaacttagcatgataaagaaaagagatggggagtttgattagatagggtcaattaagactgaatttaaaatataaaggtctcatcactgtttttgtttttaattaagagcttagaagctctaatatattgtgttctattcagtttatagccaacttaaattataggtatgagaatataattgcattctaatatctgataattgaatatcctttttttaacctttagaattcagaaatagactcttcaattaccaatagctgtaacttttaatttacatattatttactttagggaaaaaaagcatttcattcatgctttcttgctgttcgtttataattatttgtgacagaaaatcaataaaatacatgcttgaattccagataccaatggatcagataactccatcccaatggcttatcttacactggatcaccaactacaggtaaaggagtactttcttattgaaagttgacttttttcttcttagagagtttaagttgacaattgtgttgctacctgtcattgtatagtcactccttaatttatccttttagttggcctccttaaactttttagaatcaaatcaaaataattcttttggttaagttaatcaaactttaaattggcagaatcatattcttatcttttcagtcatcttaaaatcctccagtatctttctttagtactgctaagcattacattttcactctttaattttagtgcattaaaacaaaactcataagcttatttctatttaatacatttgtgatacattctcatgttcatagtgactgaaaatgtaaataatatacttcagtgccccctcatgagtatgagggctataaacatcatttagtttgagcctgtttgcagcctgaaatgtcataccagagactacaactccaacaatcatgattctctgtaacagactgttaaaacagcaagaatagatttaaatgctgagttaattctgacaaaaggacactgagattttctagggcatggtttaacacttatttttaaaagatcattgctttagtgctataaaaatatatcacagtctctgtcttgactctcatcttagctagatattgaaatttgatttaattatgttttaacattcctgattattttcagcctctagcaccgtgcccaaactccaaagaatctatggcagtgtttgaacagcattgtaaaatggcacaagaatatatgaaagttcaaacagaaattgcattgttattacagagaaagtaagttattttttatgaataaaaataaaaatacattagtattttgagtttaaaatatgataaggtgcaatgaaaacgtagtttttagaattagtcattaagtatactttcaacttgtttaagctttaagcacccttttactaaaaattttttatgcaaaactcaatccttttgactatcatattagtgctatggaaaataaactggtgctttatacttgttgttttatgttctcagagctgtttagacttattattataaagatttattgttttcttgtaaatagataaaataatttgatttattaacattcagttgtgccttatcttagaaacatttttgtagatacattttttccaggtgtatgtttagaattggattacttattaaaagactgtatttcataactgagtgtttttctgaggagttatagaaactgccttcctccctttttaaagaaacacagcctaatttccttactactgcattcacagttcttaaatatgtatgtatcttcagttttcttaagcatgacctccatgaaattttatacttaggtaactgaattgttggtggtaactaaaatgaagtgataaggaaaaaattttggcaactttatatatgtatgataataggattcccttcattaattttaatctaaataaatgaaagttgtttttttctgaatttgcgaaaagctttctgtatgtacttcaaaaaaaagagagaaaaaattgttttatcataatttattgatacagtgatttaaatggaaccaacctggtatttgaaaggtaagcctaaataggaaattaaatactacagtttggaaatcgtagaagtaattatcaaactgctggcacttttatgttgaaaaagcttgatttcttatttcacttatttaacctatacttttgccatactttaatcatttgaaagaagtattctatgctggaaaaaacaaatggtggattagggtgttggctgtgaaaactatgacagttttaatcaattttaaatactttcagaagtagtattagttagttattttgcttgaggactttttattaattattcatttatatccagtaacctcactttaggaaatgcctaaagatgcatctttttcgggaatacttaatagttcccaaataagagggacttaaataagtttatcagactataaaagaatgagggtctttcctgaaagtgcttgcaaatgtaagtgttttaaaagaagtggtactttgtcatttttctcactgctttaaaatgggaaaaagctttaaattggatagcatttattttaattagattgcaaatttgctattagcttaccactctctgctatagttaagtaggattgtgacttcagaatgtgaatcagtataaaagtagaatgtgaaggataaaaacttcatgatattttcccatagccacatagaacccttcccagccttttttcatccttcctacacaaaaagaggatagaaaatgaaattttctgaaacttttattttaccattttatctgcttcgctaattatccaagtacagttacttaataaaaggattatgttatttgtatgattacactagaagtagatgagagttccatcccagcccataattatatttgattagtgtacctaagatgcaaaatgataaaccaagaataaaaattctcattaattgagcttccatcatcagctactaaggtatgaatttttccatcatgtgtaatattatgtggtatttgtttgtaggcaagaactagttgcagaactggaccaggatgaaaaggaccagcaaaatacatctcgcctggtacaggaacataaaaagcttttagatgaaaacaaaagcctttctacttactaccagcaatgcaaaaaacaactagaggtcatcagaagtcagcagcagaaacgacaaggcacttcatgattctctgggaccgttacattttgaaatatgcaaagaaagactttttttttaaggaaaggaaaaccttataatgacgattcatgagtgttagctttttggcgtgttctgaatgccaactgcctatatttgctgcatttttttcattgtttattttccttttctcatggtggacatacaattttactgtttcattgcataacatggtagcatctgtgacttgaatgagcagcactttgcaacttcaaaacagatgcagtgaactgtggctgtatatgcatgctcattgtgtgaaggctagcctaacagaacaggaggtatcaaactagctgctatgtgcaaacagcgtccattttttcatattagaggtggaacctcaagaatgactttattcttgtatctcatctcaaaatattaataatttttttcccaaaagatggtatataccaagttaaagacagggtattataaatttagagtgattggtggtatattacggaaatacggaacctttagggatagttccgtgtaagggctttgatgccagcatccttggatcagtactgaactcagttccatccgtaaaatatgtaaaggtaagtggcagctgctctatttaatgaaagcagttttaccggattttgttagactaaaatttgattgtgatacattgaacaaaatggaactcatttttttttaaggagtaaagatttttaattctgtgattgtgtgtatgtgtgttgaaactgtaaagcttttatgactctaatattaatctcttaaatgaaattaaaaggcaaaagaacatgattgagcttaaatgatcatttcttcctgcagtgattcttggattgttttctcatgtatttgaaaaaaaaaaaatgaagaaaaataatggaaaatggaagtaattactccagctaaaaaaagcttggacttagatttctttttatgataccaaatgagaaataaaccaggcaaatcagaaggaagttaaagaagcaaatataaattcaacaagtgtcctaattatcctggatattggaatatttgattttccttacaatcccgttctagaatgcctgccgcctttcaacactttcaagagaatttcaacacttacagagtatttatattgttaacagtaattttgctaccaaaaccttcagaataactttaataataaaatgacactgaaataatagactatacaaactctatattttttcagttggtgttaaaataagtcacattttgataccagtacaagatgtcttttaaataaggatgtcatcagtctgatttttatagcattaatgttttatgaagaaaaagttcaaaatgaaagcattaattgctgtgattattagaattctatcatgactgtattgtagtttttgctctatttcagataagcaagatctaagaagttatcaaaactattctttaaaatgctaaagcaggtaactttttcttccattattttttcctcctaccactgagttttgtaatgaattccttgtgtatacaagcaatacaggtgaatactaaactgttatttttagcttcttcaaaagctattttagaaagcttcctggaaataaatgtcttctgtcatttaatttaaataaaaggagtgttaattgttcccaaatttgattacctagctgaaacagatattggattcagcatagtaatagtaaaataaaattggcagagaaaataactgtagactaggataaagcatgactcctccatagcattgttgcttgtatgtacatctgtcactccactgaaagggacctagtcactttaaagaggccttttatctcagcacgagatatccaagcgtgaatgctaaggcttgatgtttccattaggatttagcattcgagatttcagattttatttatagtcattgatgtgttttgctgtattataacacatttaagggaaattttattatggtttttacatgtagtcatttcataaaaatatccagataggtaaatggaagaaaatagtagattttagtcatggtaccaaatgcaagaggctgttgaacagttgcttgtttgtttacagtaagttccttgagattttcagtactgtagttgccctggacattgagtacagttcagccttactctgtttttaagtagttgtgttgtcaatttcatgcttttaagtcctgatgatccttggagatgggagaaaaagataccagggataattaaaatccacagccagtttcatcagtttcctcatccatcctgcaaataaaaatgttaacaaggagccaaacttattcgttctggttttacaatttattttgaccgttttttgggtgaaaattgcaaacagccaagcaagtggctggaatgccccagtctaagaaattcaaaaacaatcactgagtaagccctaattacattaattacattttactcttgactccaggaaaagaaagcaagcttttatctaatctagagggaagtattcgtgagcaataaaaatcacttttttgagttgaataataatcagttaagaatatttaccgcatagcaacacaacatataaagatttgttacaagttgtttacggatgtttgactatttttgctgaagtattttagagtattgaatgtcttctctcttcaagtttctttcatgttcctaatttcagctcctgtagccagagatcacaggtcttccctgtgaaactttggtttctttctataaatgtgtgtggttttcagcgctcaactcctgtcttcaaatggtagtaagttctacttctacttctgtcattcagaacattttatgtcaaatgatgtaatgcagaaattcttgtgcatatttgtaactgaaggaagctttttagatttatttttgtttttaataaaattcagattcctattctaaactggta

SEQ ID NO: 15681 - DNA, 73494 bp, Homo sapiens
ggcggaaaacgcagcggagccagagccggacacggctgtggccgctgcctctacccccgccacggatcgccgggtagtaggactgcgcggctccaggctgagggtcggtccggaggcgggtgggcgcgggtctcacccggattgtccgggtggcaccgttcccggccccaccgggcgccgcgagggatcatgtctacagcctctgccgcctcctcctcctcctcgtcttcggccggtgagatgatcgaagccccttcccaggtcctcaactttgaagagatcgactacaaggagatcgaggtggaagaggtgagcgaggcccggcatggagacgccggtcccggcctgccccgcccccgcctctgcctggtgccggctctgaaggtgcctcccggggcccctctaattcgcgggaccctgcggggtccacccgggagaccccacagccctcagtaacgtgggagtgggggttactctctgagctcaactgctcgggagtagctgccttttttcctctcttgggtactcttgattttggatttgatattccggtgataaacaggagaatgaactggtgagatagtgtggtccaccagttctcgtatctgtaagtagtagtttcagcgaagatcgtagccgttctggagtttcagtccgctggacgtaatgttcttttttttttttttttttttttgagacggagtctcgctctgtcgcccaggccggactgcggactgcagtggcgcaatctcggctcactgcaagctccgcttcccgggttcacgccattctcctgcctcagcctcccgagtagctgggactacaggcgcccgccaccgcgcctggctaattttttgtatttttagtagagacggggtttcaccttgttagccaggatggtctcgatctcctgacctcatgatccacccgcctcggcctcccaaagtgctgggattacaggcgtgagccaccgggcccggccggacgtaatgttcttaatggccaaagattgtattatattcgacttctacttcagtacctggcatgtaggggatgctcaataaatgcttgttaaattagtagatcatcaagtctaataaagtgtttcccttagcaccgaatggttctcaatttctccgataccgcacagcaatactcgtaatgtttaaatgctcggctttcagttgggctaatgtaggtgaatttcaccataagtaacatagactggtctacgatcaaaagatgtttcaagtagcatattctgaagagataacgaatgatttcggtgacaatcagaatataatattagactagaaatcgctatcagaaaacccatatcctttctttattctgcagtaatttattttagaacaagatatttcaaagtgactttaaagcgtcgtttttcaaattaacaggtaaattgggttctaatgactataaaatttagaaaagtaaaaactgcatatatattttttaaagacactttagaacttgttaaaaactttggttgaaaatactatctcttaccatttatttgccattttttaaatttattaagcactttgcgttatatagtccatgaaaaacctagtgaaatattatagattgtcaacgagttatgtctactttaaaattctaaaattatttttaagtgtcagcaagttcaaagtagtgagataacgttcaacaaataaattttttttcctgtgcatgttttggaagagtaatggattactgaattatatatgttttatcacataaagtaactttagagattattgagaatatcctcattttacaagataatatggtggaaagagcaaggtctttggagttagaggaaagttcagtgtatcagatatgccatttattagctgtgtgatttggggcaagtttcctaacccctttgaattttagtttactctaagaaagggctaataaattctgtttcattttatctgcataacagatcttagtagacattatatgcaaaacacctaccacagggcctgacacatattaggaaacctagttccagagaggaaatgtgacctgctttaaggtcatatggctaaaagaagacctgtattttgaaaagagggggaaatgtttttagtttctttttttttacattgaggctatgataaattccttttccagaagtggatagttgatgcagctttcatggctaatattcttttttaagaataaaaattcagtgagtcagtatacaagaattgcagtttttaaataagcgtttacgtctgctctgtggtgaattgctatgcttgtagactacaaattgttatataataataacttgtgctttatggtctactaaatgctttcacaaacttacttcatttggttcttacaaccttagtttttgaatgctactttctaaagctttttacattcttgattcagggaaaaacaaattactaaggaggtagttatcattttgatgttcttcccctaaagctatttcgcttctggttaggtttctgtgtttccaagacccttctctcagtttagataatgtttcaatctttgtgtgtatgtgggtgtgtgtgtgtttaggaaatttctgggagtaggtttttgtttttagatgaaaatttgtttctaatatcaggcagtcatttgggttttttgtttgttttattccctttcatgtttaatacttagttcatttttgcattaaagattgaatttggacctttctgatattgaaagcattacataatttccatcatcttcttcatttgcatacattaaaccagtgttacacaatccagggtgaaccatgaacacttattagctatttgtcaacttagattacacttccagttcaattgtaagataaacagaggaagatgaccagaaacaaaaactattttatgttgcttccaatattttatattgtatgagaatattaccttctaaattaagaaaatcatgtatttctcaatgtaattgaattgtattatatcaatataattagaaactgtaaaaaaaataataattcaactacaggccaaatatgcagccatttagtagatacatatttctaagacattagctgatcttgcatttctaatattgtaactcagtagtattagtttggcacatcttagattcaattcaattcagtcaaattaggtaaggtctcagcctcagaaatctgcctaggtactttttaaacatcatttagtgtttaccatctagaactggctgtagagaatgttggaataaaagaggggatgggttgcaagaagtgttacacagggtagtatagtggaaagtgttctggactgaaaaagaaaatttagatgctgtactgattctgccataatatatttttgtaactttgaggaagtcaccacatttttctgggcctgtggttactcatgtaaactgactgaacaagatcatttaaggtcttttccagttctaaaatgaaaacacattcatgttttccagtatttaactgttttctatagtaagcttagcagttctttaaagactgatcatggtctcctatagaattcagttggtgaccaactaatcctgggttgacagggcaaatgatatcccattgtacagatattgacaagcagtcatagagtttgacttgccagaagccgcatgcctaagtaaatggtaaagctgggaattgaatatgagacttctcacttgtgagtcagttgccctttccactggatttacagtgtcactcagtactttctgaagtactctataaccaaacctaatatgggaaaggggaaacaaaatactgatttcctttttagtgtagttggtcctgagcatttaatgaacattctcatctgtgcgtaatactctgaggtactataaaagataaatagggcttggtgcggtggctcacacctgtaatccgagcactttggagggccagtgcgggcagatcacttgaagccaggagttcaagaccaccctggccaacacggagaaaccccgtcactactgaaagtacaaaaattagctgggtgtggtggcacaggcctgtaatcccagctacttgagtggctgaggcatgagaatcgtttgaacccaggaggcagaggttgcagtgagctgagatcatgccaccgcaccctagcctggacaacagagggagactctgtctcaaaaaaaaaaaaaaaaaaaagatgatagaagaatcctaggattacctccttaaaatgtctgacttagtatgatatcagactggagtaaacacagaacagttaactatagaccacaaatttaaaactgaatatagtgtaaattaaacacttaagccataatttgaaaatagagttaatcacagaaggttccattgagtagggacaagtttaaaactaggttttgaataaagtgaccatcgtgggttgggaaagtcactaagatgaattttctttgtagttgttcctctgcctaaagcgctgttcccccataacttaagatgactgactcctcaccagtcaagtcccacctcaaatgttattaacacttccttagagaagcattccctgaacaacctagatcttttgtcatttctattatctttcatggtacttaccagtaactgaaattgtgtctctccttcagcaaaatgtaaggcgctttattcacttttgtaaccccaatgcctagaacctagaaggttctctatacatatttgttcaatgagtacatgaaagtatcacagcataatcataagaattaaatgcccatcttgttctcttatattacatgtgataaaataggagctgagttatgcgatttggctaaggcaacacgttagaaatgagatccgagtcttgttttaatgtcgactctattatagttagcagatacttttgtttagcagggataaaaaatgctgtaaagggccagatgctatgagtaagccacgtatggtaggtctttactacagagtgctaaaaagacactatttacaatggttgcttttgaaaagggagacccataatgctgacctcaactatagtgtaggaacaaagctatagtattggacacataaaattactgcagcatttgtatatattcttcagctttgttaaggagacacacaaaagttttgttttaaaagctaaaatatgctacaaagaggagatatagatagaacttaaacagttatatgtactttgtaggtttaagttataaatatatggggaattggtattagagaaaaacctaatttatagtggtctaaacaaactgagtacatagatttgttagtcactatttaattatggatacctaaaataatcaatacattctttcatgtgaaagtgaccactgatttcagtagaaatctggaattactatagttaagaggtagctacagagataatttttgcattgtacacgtgtagcttaaaagatagcatgagcatattatttgaaataaaagcctagaaaatgggtgagatgtactgtggcaggtattaaaagactgcatgaaacattcagaagaaagtttgaataatcaaagctttacttttatgttatcaaatccatcttgtcagcagatggcagttccactctgccacagtttattaatagatattgaagttctaacatagttggaggctccaagtcctaactaataaatgtatgatctatgcttgttctgtcttgttccgcatttccagccagaacaatgccagcatcaccaggggtccattcagatagttcatagaacagggccaaatgaaactgacagctgtagtcactgaactaaaaataacatgaattcagaacaattaaaagaattatttaataataaattaagagcacaaaggcatacatccttttccatttaggttaggtgtgtgtttggttgttttctttaacatgacttgtctgaaggaatggagtcatcttacatcataaagaaattaatttttaaaggaatttctttaaaaataacacacaaacacacaaaacctgatttttgtttttgtgcctttcaatagtagttgcatggaaatgttctatataccatctcatattcttctgtattttttattaagaaattaaatttaaatctacttaattgtatgagactaaagttgtagacccaaaacaaagaggtttcaaccatagggggagaaatgcttatcataaagtaattaatcaaaaacattttgatttagaaaacattcataaatttagaaggaaatatttccaaattgacctcccttttaaaaccaaagtcctttttgcattcctctgttttttacaaatgaaggattatgaagaatatctgaaatatttatttgtatgtcaccattttagttggatgtgtgtgatggggaaatacttgtaacttgatatgttctcttttttactcttgatgaaaattcatctttggggaaaaaacagtcatttaaaataatgttgggctaggtacggtggctcacacctgtaatcccaacactttgggaggccaaggtgggagattgtatgaggccaggagtttgagacgagtctgggcaacatagtgagaccctgtctctataaaaaattttaaaaaacaaaaaacctaattgttaattacagtgtgtcaaataaactgtattattcagaaaagaatacggttcagaaagcacgtttgatttgtgaacttggactagaaatttggtagtaaataaaaagtggccttctttcagtggtttacaacttgaatattaagttttttcattgtttacctcagttgccagtatgtctcaagagtggccatctatgccactttttttctgttgatctaccatatgtcaagaaaaatatcaaatttgctttctgtagtttgtaacattggctcattccttatctaataatgtacataatctccttatgtgtttttaggcttggcctttgcagtccagacatactattattctacatctgatcttctccacgattttatgttcttgattaatacaataaggaaatttgttaccaagatatttgcatttgaaacattttcttagaaatatgtgatatattttttaaaaatctatacacatgtaagattttccccagtcagtggagtgctgttttacatagcctgagaggtggagtgcagacagtaatgaactttcttaaccagcgtttcctgttggagcggtggtgtccacaattttttgtttgtctgtctcccactggtaaaacaaaacactttctattttgtatactcagttttcagtgtgtatgtatgaagtcggtatttttaaacaatgggagatgaaaggtttcatactatcatttgatcatggctcaagttgcaataagtactttctaaataaaacctttctaaaatgtgagaattgacttaattaaaatgagataatatctgtaaatctacttaactaaggtcaagtaaactacaatatacacaagtgagggactgataatggagtcagtatttgacatattgaacttaataagcctgtaggaccccttagtctcaaaggcagttttaaatatatcttgagcttgggcaaaaaacctggatgggagagatttgagagtatgaatccatgagattagagaacagattcagaaacaaaagggccaaggacagaaccctggaaagtagcaacatctaaggtttggacagaggaaggaagaatcagtgaaggaggctaaaatagaactcttaagcagagacaggcagagaagggattgttgacagccatctttggagactgccataagccctttatacacaagccttctattaacccaacttcactcttttcttaaaggagattagggctttttaaaacccccttctaaacagctaaaatctgattcgaatataatcttttgaaaagttaattgttgttagttatcatacttgctgcctttgagtagcatttttctctgtaccaggcactggaccaaatcctggcaggcctctgttttgttggcaccatgaaacatacctgaaagctgactctgatttactaattacatgatccttgaataggtaacttcagttcttggagccttggttttcttctctctaaggtaggaataaaaaatcctatatattcatgggtttatggtgacactcaaactccatcatatttgtaagaaagagctttacaagttgtaatatattgttaaatataaggttgcattatcgttatacagataataaaattgcatttctttaaaatgttatttcttgaagaaaggaatgagaagtatattggaatgccctgggaagctttttttatgctacgtagcaccttctgccacctctaattcccattcagacttctcccttagagagctaatatcagaatggggggaaggagagcaaaatataccaggaaacaactttatccattgtatatatcatctgattattctatcttctactcttatggatatatgcttatactcttttttgtttaaagcacaaaactcctgtctctggccaggtgcagtggttcacgcctgtaatcccagcactttggaaggccaacccaggcagatcgcctgagctcaggagttcaagaccagcctggacaagatggcaaaaccccgactctactaaaaatacaaaaattagctgggtgtggtggcacaagcctgtaatcccagctactttggggtggctgaggcaggagaatcacttcagccagagaggcagaggctgcagtgagctgagatcgcgccactgcactccagcatgggcaacagagtgagaccctgtctcaaaaaaacaaacaaaacaaaacaaaacaaactcctgtcctcctgccggtatttcttacttgtttttaaaagttaagaaatgtaactatttttctataaactactgtttaattatgagtcattcctcttttcaactcagtagagaaaagcatttaatcttgccacaacaaggataatttccatgtaatacttacctcttttatgtatctttgtactcagaaatttcaagattaattcggttatttcaaaattcagtcttcccccataaggattttccttttccctttctcctgcccaagatgacatatgggtgctgtggaaagcttccacaaataatataaacagcaagggagagctctctggtctgtgtgatggcttccactgaaatatcttgccttattatctgttgttaatggattagccttgaatgcagtgattttcaaacattgaaactacctggagggcttggtaaaacatggattgcttggccttaccgtcagactctataattctgggttgcaccctgagaatttatatttctaataaatatccaggtgatgttgatactgctgaaccggagaccacacttttagagccactggcatatgctttcactgtccttatatctgctttccttctggaacgtctttttcttttggcttctctgactctctcctagtttgcctgctaccatattgactgttccttcctgttccttgcccattccttctcctctcttgtgatctaaatgttgaactgcttcaaagctcagttcctctactccactatctccatattatttttggttacctcttccaactgattgactagaaaaactgactacatgctaatgactcccaagtttgtatctctttgtctgacttctccatagatcctctcactcacgtttctaccttcttacttgatatctcctcttggatatccagtaggcatcttaaacttcatatgactaaaaccaaactctgagttattaaaaaaaaatctgcatcattcttatccctcagtaaactgttgtccagtctaggtgttttccttgattcagctcttttcctctacacctgtcctgcctggatgcagagcatcagcaaaccctattgactctacttctaaaacatttcccagatctgcccagtttctgcactaccattgaccttgccctcgtagctattgttgcttgtttggactgctgtaatggcttcctaatgggtctctatttacatatcctagcttccctacaatcctttctttaagagctataatgattttgtttaatgtcacataccatccttacttccttgaattttttcagttccttcacattgcacttagactgaaattcaaactcctttttatggtaggtagagccgttcaggatccaacctctgcctgtccctccagccttaccttacaatcactcttcccttcctccactatacaccagccacaccaaacactcccaagtatttctctaaatcatcactaaaatgtcacctttctcagtgaggccttgagtgattaccttgtctaaaattggagtgaggcagagtgcatacatgtgtgtatacacacacaattatactccttttcttcttagcacacaactcccttcctttttatttgtctttttccacaagaatataaacaatgagaacaaggattttgatttggtttgttcactcttgtatcatcagtgcctaaaatagcgcatagcccttagattgggctcacatattggagtaaataaggtagtgaggtttttcttttcccttagggcaaagctttatattagttgtttcttctgtgtgtgtgtgtgtgtgtgtgtgtgtgtgtgtgtgtgtgtgtgtgtgtgtgacagagtctagctctgttgcccaggctggagttcagtggcgcgatctcggctcactgcaacctcggcctctcaggttcacgccattctcctgcctcagcctccccagtagctgggattacaggtgcctgccaccacgccccgttaattttttgtatttttagtagagatggggtttcaccgtgttagccaggatggtctcaatctcctgacctcgtgatccgcctgcctcagcctcccaaagtgctgggattggtgccttgtgtcatccaaatgtcagattcgtaacctctttatatggccttttcaaactgcccagcctggagctgccactagtctcttggtcatagcatcctattttttgttgttgtcgttgttctatgtggcatttttttaaagtctgatttttttcttactcatcttttgtttgtatatcgattttcttttctcctcccctcccttcacatacgctagaaagtacatttgtgtagatcagagcctttgtcttatttctttctgtatttctgatgtcccaaacagtagctggatgtagtacacactaaagaaatattggtttaaggagtaaacaaacgaagttcattattctttcaacatcaagcctcacttgcatcctttgaaggcagaagacctaacccagttctccctgcttgctgaccaggccttccccttggctttcattaatcctctgaaacccagctgtgttcttcattaagtatttgagctagctaccatcccacagacctctaatgtaggtcccaacactctgccctaccgcagcctccttcctgcaatcagaagactccttacttctcagttagcttgctttttgcttcacaagagcttttctttatcccttacgtgttctactggggctgagggaacccgggttagggcctcccttggtctgtcttccttgccacaatccttactcctttgaagcttctggtgtttgcagagcacatgctgtgaggatgcctgctcttagggatctaagtgagaagagaagggtatgagtcttttttgctgttgaatccctaccctaaccctatcctgaaaagggggagggaggagtttattagccttcatcattagcccttacctttggctctcttcagctggtaagtgtttaaaagtttttaagtactattatttagtcttaaatttcttctctaccgcactttcattccatgaaggcaggggtccattctttatatatattttttcttctcatccccagtgtatctacctttatgctatttttaaaaatgggaagtcatttttgatacacacaaacttaattctttaagtattgactgtgcttataatctcactcctttgaattcacagcagttattatttctatcctgtatttcaggtcagtacaaccttggacatcttcacctttctttattataactttagatcctgtcatttcactgtgcatgtgaaatatctcgtggccctaataagaatggaggcttcttaagcccatgggctcatcttacaggaatgtgcctgttttgtatttcagggtgttctagaaaattgctttcttgagcaaaaaggagaaagtttttcatgtcctcatttgaccacattttgttcccatggctttaagttgaaagctcagaatcagctctactctcatcactaggtggcacttgtgaattacaaatagtcaaatgaatttttatgacaaacatgtgattcacaaatatagataatgtttggaatccctgcatggacgttcctcaaaatggaagaaatgaaagaaggggattcctagtaagtaccagttgctgtgatgtatttataaatacatggttgaagaataaattacttcataatcatttcgtatttaatagtaatatcaataggtaaagtctggtctccatgcctgtgttcttaaactaatgttgccacaaagttgaaatttttttaggacctgcttgctattcatcttagttaattgcaagagaagtgagtactacaggtcaggtgcagtggctcacacctgtaatcccagcactttgggaggctgaggcagggcgattacttgagttcagggattcaggaccaacctgggcaacatagtgggatcccatctctacccaaaagaaaaaagaaagaaaagaaatgagtactacagccctttacactgattcatacccaattccaagcacttactgttctttgtagtatttgaggaaatacctggttttaacttacgaatcctgtagatattcatgaaggaaaatgtcagcacttctattttactgctgagaaaacagaaactcaaacttgtccaccattaagagataataggtagacagagccctacattcaaactcaagtctgttggatttcagagcctgggtgtgctctttcatttattctaatggtaccaggtagccagtaccctctattcacaataaagtaactgaatggcaagtacaaatgtctgatgagaattgtgaaggagaacaagaacctaaaccacagaacactgagtgcccagggctaggacgagtgaaatgggaagtcaacaaaacaaagactagctaccagagaagttggcctactttgaaattttgcctagaggcagccccatttcctttaagccactgatgaacagaagctgaatatagagtatgttcatcattaggtgctctaggcttcaaattctggcttctctgaatattttctgaccatccaatcttgggcaagttacaaccatgtgactccatttgcctcccttttaaatggaagaggattaaatgtgttaatgtatgagaagcacatagaatagtacctggcacatagtaaacattcaataaatgttaaccatttgagtagctttagacattgaacaacatggtaaatgttcattctgccttattgatacatgaagtggaatttaagctatggctagagtggtcatacacatcgcagtttacaactagtgtcctaatattattattattaatgccctttttttgatctccaaagtgccctcagttagataataactcatttgatcaacctagttatagtcaactttgttatagaagagttttgtgccaggaatttgttcatgtaagtctaaagtaaaagttcctccaagggaagatactaacttctacttcccgacatggggctttatatatgttacaaattaggactggtaacattcccgtgttagactacctggcatcagactgcactttaacacttgctagctatatagccttgggcaagttttacttctttaaagctaggcacttcaactgtaaaatgaggacagcattagtaccttcctctaggcctgtgtaaatgaggtaatgtatataaagcattagttaagtgcctgctgcatagaaagtacatataaatatggttaagagatgcagattttttgctaaagaaaaaggccttgatacaaagtgcttaggttcattggaagctgagagattggagtaggtggtgcttaactaaggtcctttcacaatgataaaatctaatgattttattctaacaagtatcaaaagctatttttgttttctttttttatattatgaaaaatgtcaaatatttgtaaaaataggactccatgagagagcaatgaacccatgcagtattcatcagttggcttcaacaatagtatgatacatgtctgatctttatttttatgacttttgaaaaataactgtaatgagatctattttacacatcataaaattcacccatttgaagtgtacaatttggtgggttttgcaaatttaccaggttgtcagccaccaccataaattaggtttttggttttttttttttaataatttcatcactttgtcaggataccagctactcatttactgttaattctaattttcaccctcggacccaggtatctatctatagatttgccttttctgaacattttgtataaatggaatcatacaatatgtggtctctggtgtctgacttctttgacttagcataatgtttttggagttcatatcgtaagtaacatatatcaatagtttttcttgcggaataaaattccatggaataaataatactatattttgtctgtccttcatagccggtcttttaacatctatatttatatcgtttctcctccattccctatccctgttgaattattcaaaggctatttttaatttcttaaatatgatagctgaaaatatttattatatgttcctgctttttgtttttccatatcatcttctgtcttctcattcatcttgtctgttttagtttttttttctccatttaacaaatcactttactttgttcctccatgtgtcttttttggttttacttgagaatgaaagggtgtacagatcataaactttcaaagatagagacaagcatgcatttaattatcttctcactttaacaaaaattcatacttgttcagtggcaaatccagatactgttgatttccatgttttttttttttttaatttaaagtcttaaagattgactttagttttttatattgggctgatctatttgattccgattcttgtggtgttttttgtttgttttttgtttgtttgtttaactcaggttgttggaagaggagcctttggagttgtttgcaaagctaagtggagagcaaaagatgttgctattaaacaaatagaaagtgaatctgagaggaaagcgtttattgtagaggtaagttgagatttcatttcttttgtgtagttctgcacttaagatactctgtgaatttaatattatgaaaaagattggtttctcagatgtcatttctttgtatacatgaacatcagcaattcggtttaatcaaaggtactgccataggaacattttctcgttcatactcttaattctgattaaaaattaggggaaaagcgacttaactacataaatgaattcacccctgaattaaaacagtttcatccatggaattcagatctatttcaaggcgtaatattttaattttaaaatagaaaagaaatggtatgctttcccattatctaaaattaagaaattttatacacttactttaaatggaatgtttttagaaactcagattattttaaagaaaaattatttcaaatttgatttttctcatttagcatgaaaatttgcacctattcttttagaaatagattagattgaatgatgaaagaaaatccaataatcatgaaattagcatattatcaaatttatcctttactaactttgttattttgtattttggatcacattatttagttaaatcaatgtttttatcactattaaacctcattggccaatggataagtggcctgtaccttataagccttctgaatttatatctctgttttttcatttaatcataatttcaaaatatacttcatatttttaatgtataacatggaaaaatgaggacttaattgtgatatgagaaagtgatttgtaagtggctgaatgagttgagaaatgctgataagtgatttgatgtcagcatgaagaaagatgatttctagtaatatgttctaggagtctagcctcagctttgttttatgcaatatttttattacagtttagataaagctattgatcatttcctgttacattagcagtttcacaaagctgggtgaaatagcatatgtgttaaacattaggaatcacaagtcaaaaagatcgtaatagcgtgaagaaaattttttaaatccagatgagatgtgcatgtaatgtaaaaaatcaaatggttctccaaaaattcttagtaaaaaagacttcagtctcctgtacctcctccaatctaattttctgcttcccaaagacaactactttgagctcattccttcatgtttggtgtccccagtccagatgctgtttattaccccttctctaaagaatcaacctctagtcttctgctgggatgataagagatagtcattgagctgtttgaagtcaaggaaggaatctttgagtcttttacactgtcccctgccctatcctttgattagctcatttgcataggtacctcattctgctgccactccccaaccttttggaagctttgtgagataaatctggttgtttctccatttttctcattgccagtttatgatgcagctcttctaggtctgctctatcagttattgctagtcatttgctttccagcttccaaaaatgtatgctgtttgtgcactttgcattctcttcatccttctgaggttatgccttaaaatttttcaaatctttaccatcttagtgggaattagggagagaggaggaaaaaatgcttgtataatctgctatctgaatctcagtgctgaaccttagcaagatgaaatatagtaaatatattttcatatagtaaataaatataataaatagtgatactaattctattggacgaaaaatccacacatgttggctctagatagatagagctttttattagcatacagtatgaaggtttagagacattagtgtactgaatatgagccagcagcataatgtatgtaatagagaagaggaagaagagtggaaaaagggcagaaaagagaggagaagggagaaaagaatgagcaagaagcagtttgctgtggagcgggatgcattaatagaaagaagtttgaagacagacatgatggttcacatctgtaatcccagaactttgggaatggcagatgggttgcttgagcccaggagtttgagatcagtctggacaacatggcaaaaccccatctctacaaaaaatacaaaaattaaccaggcatggtggctgtgcacctgtagtcccagctactccagaggctgaggtaggattgcatgagtccaggaggcagaggttgcagtgacccaagattgtaccactgcactgcagcatgggtaacagagcaaaacctgtctcaaaagaaagaaagaaagaaagaagtttgagatctagaataagagaagtgagtatagccaaacccctcattgacctctgtatggatcattggatcagggatgattaaaactgaaagagggaaaccagctagtaggctataatgatcactgcagcagttcaggttgggattactaaggcaatggcagtgggaatggagaggagagaattaattcaagaaatgagaaatggaatggaggcaagtatacagagggagtgcacattttaagtcagatagactaaagttcacaccccacttcttagctatagaacaggtcattcaaccctctctgagacttgaggttaaaatctcatctttaaaatggaaatgataatacctaccttgcggagttgtgataattatacaatatctataaagtgcacattagggccccacgcagagtagctagactgttcaactatagctatgaagatgataacaatgatagcatgacgtctggtttggataatgcagctcagtaccatctctgggatcatatcctaacatttcttggcagagttcatctcttcttattctatatactcatcgtgccttgttcataactcctgttatagcactttgcacattgatttaattatttgtttagatgtctatctctccagctaaactgtatgagctggagaacagggattctgtgccattctgggcagtcacttggtattttcagtgactatgattgcaatgcctgttacatagtaaatagtgattgttgaatgatttaaacaaatgttttgtacaacagtaagattttaatgatactgtgaaatcagtacttcaaaagttatcactttttaaaagaaaccttaatttcttaacagcttcggcagttatcccgtgtgaaccatcctaatattgtaaagctttatggagcctgcttgaatccagtaagtttgttactttttcatggtcacctgtgagaaatgacatggcagatgtgtgtgtgtagtttatgtagctatttttgggtttttttgttttttttaagtttttcaaaaatattatattttttcaagataaaaaggtacctccaatactttaaaatatcagcagtgatcccaatagttcaaggactatatgagtacatgtggctattatacacgcacaatatgtcaccaacacactctaaatagtgagaatacagcaccgtggcattgctcccatattattatttttttctttctctttatgtatttattgagttacttacttgtttttgatatctttttttattatactttaagttctaggttacatgtgcacaacgtgcaggtttgttacgtatgtatacatttgccatgttggtgtgctgcacccattaactcgtcatttacattaggtatttctcctaatgcttatccctcccacctctccccaccccacaacaggacccagtgtgtgatgttccccttcctgtgtccaagtgttctcattgttcagttcccatctatgagtgagaacatgtggtgtttggttttctgtccttgcaatagtttgctcagaataatggtttccagcttcatccatgtccctacaaaggacatgaactcatccttttttatggctgcatagtattccatggtgtatatgtgccacaatttcttaatccagtctatcattgatggacatttgggttggttccaagtctttgctattgtgaatagtgccacagtaaacatacgtgtccatgtgtctttatagcagcatgatttataatcctttgggtatatacccagtagtgggatggctgagtcaaatggtatttctactctagatccttgaggaattgccacactgtcttccacaatggctgaactagtttacagtcccaccaacggtgtaaaagtgttcctatttctccacatcctctccagcacctgttgtttcctgactttttaatggtcaccattctaactggtgtgagatggtatctcattgtggttttgatttacatttttctgatggccagtgatgatgagcattttttcatgtgtcttttggctgcataaacatcttcttttgagaagtgtctgttcatatcctttgcccactttttgatggggttgtttgattttttcttgtaaatttgtttaagttctttgtagattctggatattagccctttgtcagatgcgtagattgcaaaaattttctcccattctgtaggttgcgtgttcactctgatgatagtttcttttgctgtgcagaagctcgttagtttaattagatcccatttgtcaattttggcttttgttgccattgcttttggtgttttagtcctgaagtccttgcccatgcctatgtcctgaatggtattgcctaggttttcttctagggtttttatggttttaggtctaacatttaagtctttaatccatcttgaattaatttttgtataaggtataaggaagggatccagtttcagctttctacataaggctagccagttttcccagcaccatttattaaatggggaatcctttccccatttcttgtttttgtcaggtttgtcaaagatcagatggttgtagatgtatggtattatttctgagggctctgttctgttccattggtctatatctctgttttggtaccagtaccgtgctgttttggttactgtagccttgtagtatagtttgaagtcaggtagcgtgatgcctccagctttgttcttttggcttaggattgtcttggcaatgtgggctcttttttggttccatatgaactttaaagtaattttttccaattctgtgaagaaagtcattggtagcttgatggggatggcattgaatctataaattaccttgggcagtatgaccattttcacgatattgattcttcctatccatgagcatggaatgttcttccatttatttgtgtcttcttttattccaatgagcagtggtttgtagttctccttgaagaggtccttcacatcccttgtaagttggattcctaggtattttattctctttgaagcaattgtgaatgggagttcactcatgatttggctctctgtttgtctgttattagtgtataggaatgcttgtgatttttgcacattaattttgtatcctgagactttgctgaagttgcttatcagcttaaggagattttgggctgagacaatggggttttctaaatatacaatgatgtcatctgcaaacggacaatttgacttcctcttttcctaattgaataccctttatttctttctcctgtctgattgccctggccagaacttccaacactatgttgaataggagtggtgagtgagggcatccttgtcttgtgccagttttcaaagagaatgcttccagtttttgtctattcaggatgatattggctgtgggtttgtcataaatagctcttattattttgagatacgtcccatcagtacctagtttattgagagtttttagcatgaagggctgttgaattttgtcaaagcccttttctgcatctattgagataattatgtggtttttgtcattggttctgtttatatgatggattatgtctattgatatgtgtatgttgaaccagccttgcaacccagggatgaggccaacttgatcgtggtggataagctttttgatgggctgctggattcggtttgccagtattttattgaggatttttgcatcgatgttcatcagggatattggtctaaaactctctttttttgttgtttttatgccaggctttggtatcagaatgatgctggcctcataaaatgagttagggaggattccctctttttctatcgattggaatagtttcagaaggaatggtaccagctcctctttgtacctctggtagaattcggctgtgaatccatctggtcctggactttttttgtttggtaggctattcattattgcctcaatttcagagcctgttattggtctattcagggattcaacttcttcctggtttagtcttgggagggtgtatgtgtccagtaatttatccatttcttctagattttgtagtttattttcatagaggtgtttatagtattctctgatggtagtttgtatttctgtaaaattggtggtgatatccccattatcattttttatcgtgtctatttgattcttctctcttttcttctttattagtcttgctagtggtctatcagttttgctgatcttttcaaaaaaccagctcctggattcattgattttttttttgaagggtttgttgtgtctctgtctccttcagttctgctccgatcttagttatttcttgccttctgccaacttttgaatgtgtttgctcttgcttctctagttcttttaattgtgatgttagggtgtcaattttagatctttcctgctttctcttgtgggcatttagtgctataaatttccctctacacactgctttaaatgtgtcccagagattctggtatgttgtgtctttcttctcattggtttcaaagaacatctttatttctgccttcatttcgttacgtacccagtagtccattgttcagtttccatgtagttgagtggttttgagtgagtttcttaatcctgagtctagtttgattccactgtggtcagagagacagtttgttgtaatttctgttcttttacatttgctgaggagtgttttacttgcaactatgtggtcaattttggaataagtgcaatgtggtgctgagaagaatgtgtattctgttgatttgggatggagagttctatagatgtctattaggtccacttggtgcagagctgagttcaattcgtggatatccttgttaactttctgtctcgttaatttgtctaacattgacagtggggtgttaaagcctcccaatattattgtatgggagtctaagtctctttgtaggtctctaaggacttgctttatgaatctgggtgctcctgtattgggtgcatatatatttaggatagttagctcttcttgttgaattgatccctttaccattatgtaatggccttctttgtctcttttgatctttgttggtttaaagtctgttttatcagagactaggattgcaacccctgccttttttttgttttccatttgcttggtagatcttcctccatccctttattttgagcctatgtgtgtctctgcccgtgagatgagtctcctgaatacagcacacttactggtcttgactctctatccaatttgccagtctgtgtctttcatttggagcatttagcccatttacatttaaggtgaatattgttatgtgtgaatttgatcctgtcattatgatgttagctggttattttgcttgttagttgatgcagtttcttcctggcatcaatggtctttacaatttggcatgtttttgcaatggctggtaccggttgttcctttccatgtttagtgcttccttcaggagctcttgttcagcaggcctggtagtgacaaaatctgtcagcatttgtttgtctgtaaaggattttatttctccctcacctatgaagcttagtttggctggatatgaaattctgggttgaaaattcttttctttaagaatgttgactattggcccccactctcttctggcttatagagtttctgctgagagatccactgttagtctgatgggcttccctttgtgggtaacccgacctttctctctggctgcccttaacattttttccttcatttcaactttggtgaatctgacgattatgtatcttggagttgctcttctcgaggagtatctttgtggcgttctctgtatttcctgaatttgaatgttggcctgcgttgctaggttggggaagttctcctggattatcctgaagagggttttccaacttggttccattctctccatcactttcaggtacactaatgagatgtagatttggtcttttcacatagtcccatatttcttggagtctttgtttctttttactcttttttctctaaacttctcttcttgcttcatttcattcatttgatcttcaatcactgataccctttcttccacttgatcaaatcagctactgaagcttgtgcatgtgtcacgtagttcttgtgccatggttttcagctccatcaggtcatttaaggtcttctctatgctgtttattctagttagccattcagctaatctcttttcaaggtatttagcttgtttgtgatgggttcaaacatcctcctttcgcttggagaagtttgttattaccgattgtctgaagccttcttctctcaactcatcaaagtcattctccatccagctttgttccgttgctggcaaggagctttggaggagaagaggtgctctgatttttagaattttcagcttttctgctctggtttctccccatttttgtggtttttatctacctttggtctttgatgatggtgacatacagatggggttttgatgtggatgtcctttctgtttattagttttccttctaacagtcaggacctcagctgcaggtttgttggagtttgctggaggtccactccagaccgtgtttgtctgggtatcatcagcagaggctgcagaacagcaaatactgcagaacagcaaatgttgctgcttgatccttcctctggaagcttcgtctcagaggggcacctggctgtatgaggtgtcaatctgcccctactggaaggtgtctcccagttaggctactcaggggtcagggacccacttgagaaggcagtctgtccgttctcagatctcaaactccatgctgggagaatcactgctctcttcaaagctgtcagacagggatgtttaagtctgcagaagtttctgctgccttttgttcagctatgccctgcccccagaggtggagtctacagaggcgggcaggcctccttgagctgtggtgggctccacccagttcgaacttcctggctgctttgtttacctactcaagcctcagcaatggtagacgcccctctcccagcgtcgctgccgccttgcagttggatctcagactgctgtgctagcagtgagtgaggcaccgtgggcatgggaccctccgagccaggtgcaggatataatctcctggtgtggtgtttgctaagaccgttggaaaagcacagtgttagggtgggagtgttccaattttccaggtaccatctgtcacagcttcccttgtctaggaaagtgaattccccaaccccttgtgcttcccgggtgaggcgacgccctgccctgcttcgactcacactccatgggctgcacccactgtctgacaagccccagtgagatgaaccctgtacctcagttggaaatgcagaaatcacctatcttctgcgtcgcttacgctggtagctgtagactggagcttttcctatttggccatcttggaacctcctatgtagctattttgatctgctatcttagatgtatttctgaaagaacagttatagtttgttcatttgacttgtttctagtcttttagcaaaactgtatcggaagagttcttttaggtgattttgtccaataacctcatcttcttatgaggcttttgatgtcctgtggcagcacctacttactggcactggagaaagtccccagaatatcctgtgattgtattttacatacatcttcactgttagtggactcctagaagacagtcttagtcttaggtcatagataccttttccttccctagtactattcacatagtaggggccaaaagaatgatttttaatatatctataaaatcaggggagtgaattaaattctctctcaaaggccctaagatgatggagcttcttggttaatgcttctgatatatgtttcctttaggtgtgtcttgtgatggaatatgctgaagggggctctttatataatggtgagtgtcattagacctgtctttatctagtggattaaaataatttgaaaaattttaatataaaccctaagttgtttaacattcttcacaatttgccgtcagagtcccaaaagggcataatttttaaaaatctgctaagaataaaaatggaaagataagattctataacattagtatgtgaaatttagaggtctatcaattttttaagtagatggtactttgcatttcattaaaagcatttaagtaaaagtttactttttaaatagattttaaaatatcttcagatttttttctttttgccctctcataactttgagcctcctcattttagaattctttaaccatatttcgatttcactctgctttattttttcttttttttcaaaaaaaaatgtgaaaactcacttcacacaaccttttatttgtagtaatgaaaaaaaactttgtgtagttacattggagaacagagttcttttaccctaaaaataccaaccatatgcagaaatgtattgtctcttgtagcaccagttatataaaacaaattgttacattttattttttaattagtattattttatgtaaacttttacttatatttactgcccatgtgttcatcattgtgatggatatctaataccccattgtcttatttgattgaactacttctggtttttagccattacagaaaatacaggtgcaaacatcttgatatacattgttttgtttctttctgtactgttctctgcctctctcttgtagtagtgtgccataagactgctcataatttatattactttataaaagtctttatctgtttgaaaaaatgtggtaatgtatattgattttacttcaatgtaggaataacatttaatagatgtactattaaatgttaatatcatggcaattatccactcaaaattagtagatattttcatcctttttatttagaagaaaaattaaaaggccaggcatggtggctcactcctgtaatcccagcactttgggaggccaaggcaggcagatcatgaggtcaagagatcaagaccatcctggccaacatggtgataccctatctctactaaaaatacaaaaattagctgggcgtggtggcacacgcctgtagtcccagctactcgggaggctgagccaggagaatcgcttgaacccaggaggtggagtttacagtgagccaagatcgcaccactgcactccagcctggcgacaaagtgagagtccgtctcaaaaaacaaaaagaaaaaagaaagtaaaaaattaaaagcaggactgatggagcatatgtatatgtagaaaaatacccagtcatgtgttctgatagtgcttgcattcacattgtgtcttttgttatatgcaataaagttctttttagtttgtgcctttctttcgcagtgctgcatggtgctgaaccattgccatattatactgctgcccacgcaatgagttggtgtttacagtgttcccaaggagtggcttatcttcacagcatgcaacccaaagcgctaattcacagggacctgaaaccaccaaagtaagttataataatgtgacacccctcagcctcttcctccttctctctcactctcaccaccccgaacccactctctaattcaagctcattattgtacaggagtttctcttttctctatttggcttactcagtgtttacttttaactcaccttcatcatttagtcatttatctaagcttgtattttagatgttgtctttagtgggatttttatttttggtaacctctaccttagattagcatacttctagaatctgttagcctataaaaatctcattttgtgcctgcagtatataatgttgctgttagacaattccttgggggcagagataggtctgacgtttttcttgctgtgtccctaacacctagcacataaacattctacagaaatttgcagagttgttattacttgctctttcagaggaaagtaaaagggcatttcttggcatctgggtagaaattgaaaatattctggattcttcataatgtgaatacttgggactttaaaaaacttataaattccttagataagtattttaaaagactaaaactttgggggttttgtttgtataggtattcagttaaagaaaacatacacataaaacatattgtttccttttctctctttttttttcttttatgcacctgtgacacagtaaaaatagtctccacgtatcttctttaccctccccccaagctcccaccccagcacattagtctttacagaagaggtttcccttaggaaatcagtatagtcttcagttattccattctcttgatactggttaaagcattaaaacatcccttctgggtgcaacttgtcactctcaggtctaatctgatatactctacataggttccaactcttagaatcactgttcttgctatgtatcttatctctactcccaaacttaaactgatttctgtttccccaggtcactgataaaataatgtttaagcttttatttttcctgaggctattatcttagttacctgccttaactaatgaaaaaatcacttagcctttttttcttcattgtgaatattcagtcatcctttttccactatattaacagagttgaattattaaagcaaacttatgagaatcacagctcttaaccagcaacaaattgacaaatgatccaaaggatataggcaagcatcagatacagccaaagcattcttttcctaaaagagtctgaacgcatctgatgcaacacccaaaagtatcccttttctcctcgttacagtatgttttggctttggaataaatgattagttattgaacaatatatggagaaatatcttacaaaaggaagtcatttccattttctaacatcttttacattgcactaattacatggtttaaatgactatccctaatcttcatccaactacaccccatgaattttaggtttatttaatcaacctagttagaccagatatatccttctaaaatcatttgtagatagagattctccttttgctagtaaataccattaacatatttacagaaggtctggtctaggtcatttattccaggcctctccatgattggattcatcttgcaaatcgtctttggagcccctggtatacaagttggactttagaatcagaattgattctagttcagaaagtactgggtaaaagaaattctttggaatggctatgattttatatataattggacatacatgaatacctgctatatctttattttttaattatttttattattattattattttttattttgagacacagtctcgctctgtcgcccaggctggagtgcagtggcgcaatctcagctcactacaacctccacctcccgggttcaagcaattctcctgcctcagcctcccaagtagctgggactacaggcatgtgccaccatgcctggctaattttttgtatttttagtagagacagggtttcactgtgttagccaggatggtttcaatctcctgacctcgtgatctgcccgcctcagcctcccaaagtgctgggattacaggcctgagccactgcacccggccaatacctgctatatcttattgtcagtggaaaacctacagattctgtggtcaggaagagttcctcaaaatggtatctaaagaaggtacctgatgatctagggaggtgttttatacactatcaagttgtgcttgtgcttgtattttatcttttgcaagtttattcacatttacattagaaattaaaatgtgtttttaatcttaacagtgtgaaagtaagcctacaaagataatttaagttcagatttcagtgagccctgaatttcctgttcaaggctggtgaacttttgaagtcgagtaaaggagtactaacataaaactcattcaggaaaattatcttgaatcatcagaaattatcttgatatcttgaatataccagtataaaacaaggaaactagttacagagttcttataattttcttgggtaaaaagtgtaagagtttgaacaagaacattgagatgcgggaaaaaagctttgttgaagtacatatagaggtatactggatttagcattcttttcactggaatgattatgagagtctttttggtattatggaactgtgaatagtagtttatctgacttattttagtcacattggactaaaagagaagaaatttccaaatagtctctccagatgtaaaaagtttataaaacttgtaattaaaatgaattcctatgtactgctattggatattactacaatgtgatggtgcaaattatattacccatttctatttctctttgtcatgaaaagcaaaaccttgtaagtaagagtatgctacttggtgactgtagttgggtaatagtacacctaggaaagtccgaatcttaagttcagaaaattttccagaaatctctcattaggtcattttagctataatagatttgtattcctcccacacattcatagtctaagcacaaaaatggttttgggattgaacatttttagaagtatcttcaaaataaagacattaaattacagaccatttttttccttctatattggattattttctttatatagtgttactattttttaagtaatacatatttatgattaaactcccatttcaggataccgtaatgttgacctaacagaagttttttaaaccccacgttttattttggccagatagaagtatgatcaggaaagattttggagctagagatgaagacatcagaatgtgagtctagcagccttccaaagagagctaggttatggttaattaatttttgcttattatttctctgaactattaggcttttatagtgaccaagtaaattagtcatttcacagaagttgaatgataacattcattttgcttaaccttttccatttccacaaatgtctcttcttttattgtagaataaaatgttggccttgtaacttttgatgttttttgtttttttttaaacagcttactgctggttgcaggggggacagttctaaaaatttgtgattttggtacagcctgtgacattcagacacacatgaccaataacaaggggagtgctgcttggatggcacctgaagtttttgaaggtaaaatggcaaaagtatggtatgtttgataatctccctcactccttgtgaattcatatgtttttatagattttccccatttccatggttttatttctgcataatacataaagtatacaatgaaatctaaggggatattaaatatagtgttatatcctaaattttatagtaagatttaaatcttctatgcttctaagcatatgtacagttgatcctcattgttcaccaatttcttaattgcaaaattgcctatttgctaacatttatttgtaaccccaaaattaatactcatggtgctttcatggttatttgcagacagtgctttcatgtactcgcagacagtgtgcatgcgctgagcagtgcaaattttgagtcatctaacgcatgcttccagctgaggttgaacaagacaacgtttttccgtcttgtttcagctctcatgctgtaagcaggtgtccttttttgtgctgttcagagccctttttcatttttgtgatttttgttggtaattttgctacttaaaatggccctcaagcatagtactgcctaagtacaagaaggctatgatgtatcttaacagacaatatacatatgttaaattatcttcattcaggcatgagttacagaaatgttgactatgagttcaatggtaataaatcaacagtatatatgaataaggtgtctttaagcagaaatacgcatgaaacaaggctatatattgatcagttgacaaaaacatggtgaccagaggcacacaggaacctacccctgtattttccttaggagcagtgattcagtgttcactaattcagtgttctcagaaactttatagaacataaataccaggaataatgagaattaactgtgcttttgtattggtttcctagcaattaaaaattgagagccctaaagtttaaatgaggatgccttaaaaagaatgcaaatagctgggcgcggtggctcaggcctgtaatctcagcactttgggaggctgaggtgggcggatcatgaggtcaggagatcgagaccatcctgtataacacggtgaaaccccatctctactaaaactacaaaaaattcgccgggcgtggtggcgggcgcccgtagtcccagctactcgggaggctgaggcaggagaatggtgtgaacccgggaggcggagcatgcagtgagccgagatcgtgccactgcactccagcctgggtgacagagcaagactccatctcaaaaaaaaaaaagaatgcaagtaattggacagaaataagatactaagaattacaaataaatgtcaagcttatatgtttaccttcttttatacctccatatgtcactgaagttttaaaagagttgtctgtaaattatatgctaggtttctgtataaaaacatcaaattatcttttaaatgaaagaagttgaactgaaggtatgtgatttgtatgttaggaagtgtaaatgcccataaaattcagatacattcagttaatcagactctggttatagcttatttctttcagttttgatgactttaaagggttttctgtttgtttttagccaccccagaggaagagaaattgcaatgcaactagtcacctgagtggagctcttttgccctaaaattcaatttagtaataaatgaataatcaggtgttatattacacaagattaaataatgcctcctgtttcatatacagaatgtatacatttgacattgttttaaaattatttacttatttaatatacctttatgtgagttaaaatgacccaatgttactgtatgtggagagcaaaaagatttgtttatacaaaagattaattttattgctctagacaacccttaattgtctagagcaacaaaatgcagactgttaggctgtgtaagtttcttcatttctgaaagatgtcagtcaacctgtagcccaaattagactgtagcatggttgtagtgctatattacagtgtactgcttagcatgtaaagctatagctataataattgttcattcttacagtgagttgagtgtttgtttgtttttgggagattatgacgggtgcttattgtgctggctgattcaaccacctacttagtttgtaaattttgctgtgtaactcaggttatccataattttcgttacttacaacgtaatgtttaagtttataaattaagaatttcccttcaccatatattgaggaaaaaactgtaacactaaattagaaagttcttctgctttgatagcagagtagtgctgtctgtcagagtgggaagaaaatttaagattaaaatgtaacagaaaggaggccaggcacaatggctcatgcctgtgatcccagcgcctcgggaggccagagcaggaggatcagttgagcccaggagtttgagaccagcctgggcaacatggcaagaccccatctctacaaaaaatttaaaaaattaaccagttgtgccagcgcatgcctgtagccccagctactcaggaggatcacttgagcccaagagtttgaggctacactgagctccagcctggatgagagtgtgagatcctgtctcagaataaaataataataaacaacataaaggaatgtacagatgtttcatactctgccccagagaaagtatcagtctaaatacataaaagtcaagtcctgtgcctcttgatgaaaaaactgcctcttgatgaaaaaagatagaaaataactgagtttctgaagtagttttttagtgtattgttgatacttaattcatttaaaaatgtacttgttgaaaagacaaagtacttcagaaagagtagtttcttagttctacatgtgacagcctcatttttatccctgatacccattctcaaaatttaagccattgtttctgtaagtcatgtggaaaaatagtctttaggttatatactaccttttttttttctaggtagtaattacagtgaaaaatgtgacgtcttcagctggggtattattctttgggaagtgataacgcgtcggaaaccctttgatgagattggtggcccagctttccgaatcatgtgggctgttcataatggttcgtaaaaagaaatttttcttaaaagtactttttgtgttttctacttggaagactactcctgtccccttccctaaagaatatcatttatctctaacattaaaatgtacaattctttgttaagagactgctttgctattatcagactctgccctgtccctgccccagagtccagcagagcaggattgagagtagtcctggtctacacatgcggctgaggatgttcactggctccgctgattagggaaaggccatcagtacgcaacctagacagttggctctctcttagggagaagcatcaggctggatcatggaaaaaataaaaaaatacatacataaaatctctgacatggttaatataactggagagttatagcccttttctcctgaagaagcaagggcctcatcaaggagaagaagcaaagaataataatgcttcacatatttttcctgtttatattctcacccacccttagaaggtgagtactgttgcctcattttacagattaggaaactgaggcctagagaggttaaataacttgcttaaggtcacaagattagtaagtggtagagctgggattcaaatccagatgcttctgacttgaatgctcatatcttaagtcatattgacttatggactcaatgtccttgcatctgtcctgtttcttttatagttctggtaatgttgtttttaaccacatatgatgttagaatgcatcctcttcattagtaaagttactttacatttgcttgggaaaatagcttttcatgaaggaaaattacttaccttcttaattttagcgccactcttagttatttcatttctatgccttgtttataatcatgtgactaatggccattttttacattattccacaagtctaaaaacaaatgtctgcctaattatttaggtcattcatagatttatcaaacagtaccatcatctgagtaatcttagctgtttttaccagtttcctatactgcctttaatattactaccattagtatcattgtggagactgttcagcattgaccaggacagcttgcttgcttgctttctatcagttgtcagtaaataattgaacgtccgtgaagtaaagagtaaaagaactaacttgttaattgataaaattacaaagcacttttattactccaaattacagatcttaaactacaagatctataaaataaataccactttggaaatacgtacaaagagtttgcatcattctttgggtaaatacattcttccccccttcctctcattttcaattgtaggtactcgaccaccactgataaaaaatttacctaagcccattgagagcctgatgactcgttgttggtctaaagatccttcccagcgcccttcaatggaggaaattgtgaaaataatgactcacttgatgcgggtataatccttcttttgaggggctttggatttaggggaatttaatatgtgctgagttttaatggaattttaaaagggatgttattactatattctgctttatatattgctatgttttctaagtgagaatgggcatttattactcatagtcagaagaggaaacatttcgagagggaaaatctagttctttatcactggaaagatggctagactaggtttctagacttgcttttttctttttgcttacattagtggacaagtatgtttgtctctgggcctgttgcctcatttgtaatgtgggagaaactgaaatagatagtctctaaagccatcacaggacttggatatattaatattatgacttcaatacatgataaactaaattttacatttttctgataccaattttcatcaagcatttagtcatttatgcaaggcaataggttgcattctcagacacatttatttgagtgacttttactatttggcctattttcaggtttttatatcccagtaaaaagttaaactttcttctatttagaagaacccttttaaatgattatcaaattttcctagtctgtgaatcaagcgcctttagaattatttggaatattttacgcctctggtttttggtacattaacaaaaactgtgaagtggtatcttggctttaaaaagttcaaatatctatgaaagtgcctgaattttgaaacagtttgttcagtagaagaatcttacaatctccttaaatatagactaagtaatttcctaaatggtaaaacgttgtttattcaatctattgaaaatttcttacgcaaagcagcttgaactaatctactaaaagtttaccatcgtatttggataccagtcatatatagaagcctaggccttaaaggtgtgtgcataagaaaacaacttagtctctgtagtcagattacttaaaactttaggatatataagttattgcagttgtaattttgcttctctgttccttgtctaatttgaggagaatacgtttcctttttttctctaaattctaacatttttgtccagcagatactttgagtattatgcctccagtttgtagaaagacattcataatctatcctcttaatatttaaaatgttctaacaattattctatggtatactagtctcagtcttcagactaacagtcactggaagtttacatcactactgtaagaacatgagtatgttttacataattatgagaaatgatactattttatttcatatgtttctctagagaaatatttgctgttttcttcaagactatctagactccaatgtaagctagattcttaggtaggtgcatggcattgatcaaagttgaaatccaagagtacattattgtaatctttgtaaaataaaaaacttaggcacctacaaatttagtatataacttagggaaaataaaacattaatcaggatttaatttgtattaaggaaattttaagctgtggtttacttttttatatatagtactttccaggagcagatgagccattacagtatccttgtcagtattcagatgaaggacagagcaactctgccaccagtacaggtaaatggatagattggaagagtattgacttgatttttctttcatctctattcccatgaaattataatcaagaagtaatgaataatgtccccatttgcattttaattccttcatttcatatgattgactgcaatttgagtttacaggtgcgtcattcttcatgtaggtaccctgattaaagagttattgaagacctgcttccaagtcttagaattcctacataattatgaataaaaagatggcatattgtattacagtgaatgtcattcttaacttgaaaaatcacttttacatgcatactactagatcaagtagtattagaaattattgtaaatgtatttaaacatttcttcatcacgaacaccctagtttttgttctcttctacagaggctctgatttaagaagctatgttaaaagttccttagttttccgaaatgtgaagtagtagtgggacatgtaatttgtggtcatcaaaaagatagtagaaataatactgtaacttagaaatattgtacttctcaaaatatagtggcattataagcatttcattattaattgaaacttaaagatatgtgtgtgtctatatgcacatgtatttaccctgcatttattgaaaaatacttttactgatctatttctcccacctcaagaatagttttatttattttaagatggttactgcttggctagttattctcaaattccagttttactgaaaatattttgagttgctctgaattctaaaatgtacttctctaaaattctatcatttgtgtctcccacgtcctctaaactctctcttcatttccttactgtgaccttgaattttttgagcctcccaccttttcactggtcctcagtcctcttaggtccttttttctttctccctccacttaattccaatcaactattataattcttttgggaataattttcatctttctagcctctctctcaagcttgcttggctaaaccacaagcctaatgaaagctgacactcggcttactccttgcctgtaccaatgcagctgagtgtggctggagatagcacaggtttactatcctcacgtgcatgtttagtgctattggacagttgtactgtattgtagttcatctctttcctcctatatgtcttaattttatactgtagcctctcctcagacttcaaacacctcctcgccactcctcactctcagctgatcttgtttgctctttctctgagaaaattggagtaatcggaagacagcttccacaacatctgtgcccatctactctgctttcttctgttactctggctaaactatccatacttctggccaaaggtgtacctttctgcctgtgcattatatcccatctgctcctctgagcaattctcccctgtctcttgcatcatcagttttagctttctactggatcattcctaaaacatacgtagtctgtatttgcattcactagcttctcttttccccttctttcttgagctgactccattcagacgtattatgccagtacttcagaattgttcttgtcaaggtcactagttatctctacatcactacatttaaggaatcattttcatttctcatcttgactctcagtagcacttgacctaattcattactttctccttcttacagacagcactttcttcagttggcctccgagataccatactagcctagattccatcttacatctctggccgtctgttctcagttttctttgctggttattcctcatctccccaacctagaaatgttggagtgcccagggcctgctcatttggcttcttcacttatctgtctgcactcatttccttggtaacctcattcattattatggccttatataccatctgttggctcataatgttttccatcttatacctgaactctatactcatatatccaactatttcctttacatctactagaaactcaaacttaatattttccaaactgagttcctgatacttccttcaaactcactcttcctttagtctttccgcatctcaattaatagccctcagttcttctactagctcaggttaaaaaccttaagttattcttgactattagaagactatttaggcatcttggttccttttttgtgctatccttaagtttctcttaaaatgggtttgtttggatatcttcattagcttgaaaagtcttattttatttctgttcctgcctggctagtttataaaagaatgtaagttacataataccaagtgaagcatttgtattatttccagccattagtcataaatgtttctgcttttcctaggctcattcatggacattgcttctacaaatacgagtaacaaaagtgacactaatatggagcaagttcctgccacaaatgatactattaagcgcttagaatcaaaattgttgaaaaatcaggcaaagcaacaggtttgttatgttattacaagtaaaactggtaaccttaccagtagtcacaatattatactaactgaaattaattatttaccatcttctattttataaatcctgaattttcttcctgaaacatgcaaaagagcttacaaatagagacacgtaatgagattctcctaccatttattaccaaatggtttttccttctaatgattgctacctttgccaattctaaatccctatctataataatccctaaatgtaatggttgatggttaaaaatgtaaaatgggtatattttggctgcgctgcccagttagaggagttgttctaagtctatcatttcatgctgttcagatttattatatttttgccattgttgatttttaaaaatatttcaaggagtgagtttattcattttgcctgaggcatttaggttaacgaataattggggcttttagctcccagttctagtgactgccttttcataaagacagtatctgcagcttgctttcccttacccctgtagctccctctcgtacaaacttccctctcctttcagagcagaacaggatctatcagaatcccatttgccatcttcctccttttaggttgcctaagattgctaaatctaaagaacttcagtaattcagattgacctgtaattttaacagagtgaatctggacgtttaagcttgggagcctcccgtgggagcagtgtggagagcttgcccccaacctctgagggcaagaggatgagtgctgacatgtctgaaatagaagctaggatcgccgcaaccacaggtaaaaaggaactacaagtctgaagagtgaaaatgtatataagcctttttggccatggtagtttcagttgtcaaaggttttttgtgtgtgtcttatatttttttttaaataggaagtaggtttacaatatatttttctaagttactagcaatagtttatgcatttatctcaaattccaaataaggaaggtatgacttgtaaaattatttggatgagaaagtatgccttcctcatttacagattttatcaaatgtaattctttctgctcaaacatgagttgaaagtctaagtgagaaattgaaattctgccaaaaccagaatattttggggattttcagtgatactactagatttttgtgctgaactcaaataatagcaaatattttgtttcaaatttaacagaaaaatgtattccagatccatgtatgatttgaccttctatctgcttcttcattccagtgacaaaataatagctaagctggttgtggttaatttttttaattgtaaaataaaatatcataattttattagatcttgaaaaagctagcatttaaattccattgttcagttcttaaaattattaatcatggaagaactggtcagcacaaaaacaattacatgttttgttacttaagtaaactgacaacctaattctgtgaccaggtttcattttagtaatgctggtttaatttggacgtttttggttttttgctgattctttccagggatcagggggagctgattttaaaagtaaacacgtttctgttgtggaaaatgtggaaatgtaaacaagccaaaaaaacttacataattaccccactcagagataaacacttaacatttttgtgtatttaccccatcttttaactatgtatgtgtataaatgtatatattcatgtgtatttgcatcttttttaacttagctaaccaattttttaggtctttttttcacttatttggtttttttctaaatagaatattctcattgtgtgtggagctcttttcagaaagaagttgtcaagatggaccatcatactatacttgtcttcaactaatcatgatcattgattttatcagctactattagaatccattagatataacagaatatccgaaataacagtgtctataacacataagcattatttttcacatataaacaagtctggaggtagtgggctctgtgatcttgaagtaactggtctcctatttctgtgctgtaatccctactgtatagcttccattctcaaagttatcctgtgctccaaaatggctgttgaagttccatttcatcacttctacattccaggcaataggaaggaagacatgggggcagggcaaatagacatccaagttctttgaaggaacattcccagatgcctctcttaacaacatccacacatcattggtcaaagtaacatggtcgaatggctacacgtagctccaagggaagaggagatctgccctcttttatctgatgacttttctgtcctaaataaaatcagagtactattgctaaaacagaagggaagagtggaaactggcagaagatagctgtgtctgccacagatgggtcttcagaaactatcaagttgagtagaagtcaccagccactgacaagcccatgagtctccatgagtcacaagtatttctttggagcagggttgtctcactgtagtgtcagatgaaccctactcaccgggacataccctcatgctttgaggaacccttttcacttcagggatgttgttcaggatagatctgccacatactaattgctgtctcaaaactgaaaattgttataataatggtttcatgtcttcgctagtatcatatttctagtcaagcactggttttttattattatttacagaaatgactttgctagaaggataaccacacacattaaaattttgcctaagtgtagaacaaatgctattgtacatcccttgagttttacacaatttaaattttttcatgaattgtcttacttggaaagagtcatactttccagccttttgacagactttgtgtttactgtgaatgtaccctaaactttggaaaatataataaatatttggtactagaaatatgtataagtatgactacaaaagcatatacatttcacactttgattcaataattattatttaatcattggattttactttatagcacacttcaagaaacacctaacttgaacatgtattcctgtgtttgtgtaattaaaacaaatacgacaacttactttttaacgcctttcttcctctcctccttcgttcccccacccccatcacagatcagtgatttcacttaggtagactgtttctatgaatatatttgaaattttgcttcctcattaccctgcagctttgtctctgttctttttatttttttctgctaattaaaaccagtgtgtaaaacatcttgtatttggtagttgtttgctctttaatctcgccttttctgagcatggatgaaaagttaggtagttctgcatgccattctgcatgaaatgttattaacatgaactatttgaaaatgagtctatttttgtagttaatcattttccgtgttactgtttgtggttgtttgcatgtatactgtatatatgtgtttttgcagcctattccaagcctaaacggggccaccgtaaaactgcttcatttggcaacattctggatgtccctgagatcgtcatatcaggtatcatagaccacctgagttggtctaatagctgtggaaccggaataatgatccctggtacttgtaaaatgcttcttgctccaatttttacaagacatgaaaatggataccttgcatgcagtaattagggagacagattgaaaaactacatttattctgaagcagtcttgaaaagatacctctgatctacaataagtgaggataaaatagaagagaaagtaaacctttttggagaagggagaacaccaacccagaattctaccaacttcctctctacttttaagtgagcacatgagctaaacccagaccttttttgcacccaacagaaagaggaaacaactaattaaaatttgttattttccttggctcctttccttcctcagttactgctttttgggtcccctctagactttctgtcctaacctctttctgttggtagcaagtgaatgtgaagttgagagaagagagttgctaaatagcattttgccttaacctggaaaacaaaaagtaaagctaaatgagatgtgctgttttgcagggtatcttgccaaagaatcatgtaaaatagttggtcaattctgatttttgtgtattatcaggagaatctcataaattacatgtttttatacctaacttacacatggtactttagtgtctaaaattggtaaactgctttatttcttatggtgatcatttcatagaggaatatgttaccatttttaatagaaacttaaatggcatattgaccttcagtattgattaatgtattatcaaaattatcatttatttatccctttaggcttttctctacctctttacccaaaatcttgataaggaaatacatattttccacacacgttcatgagtgcgagttggatgaattcttcagcatgctgtcctttgcctgtgattgtgtttttagcagtgttgataattctagttgaatacctaatggttattttctcctctactaaactgaaaactatgtaaggatagaatccatatctttgtgcattattttgttgttgttgcttattattgattgtatcagcagttgctggctcagtgcttcacatattaagcatattaacatagtgtttaataaatacatttattaaataaatgaacagacctattgagcatctcccctggtgagaaactagcatacaaaaatatgaattatactattcttaggtgccattttgtctgtataaaactatcttatattaattttcccctggttatcaaagtggtttcttattttacaacatcattactattgctattcaaagagtagagttaacccatttttcacatggtaatttttatttattgaatctggactgcttcagaaattaacaaagagatcattttacatggagatcagtttacctccatgcggaaaggtactgtgtataagggacgtactttaaagaggtggaagcatttaaacttacataccgctgaactgtgcttcccttaaatgtttgagggaatcaggaaaatttagacagatggcagtgtaatcttatgactaagcattaagaataaatttatatatggcagcgtagcccacgctatacaagataatgggggagggaaaaataaggaaagaataatagtttataactgtcaggtactactggcatctagtgggcagagaccagggatgctgctaaacatcctgatgtgtaccaggcagtcttctccaacaaagaatgatccagcccaaaatggcagcagtgctgaggctgaaaacccctgattagatgttctttgtgccctacaaagtagcttaaagtacatcttattttacctttatacaatcttacaactaggttatcggatgaaattatagctgtttaacagacgaagaacttagatctgatgatgtttagtggtttttccagaatcatatagccaggaccccaacccagatcttctgactccaagtcacatccattttttgttcttttgtttaagtcagagaagctagagtaatttcttcttgctttctcttagtgttcacattaaggagagctcttcagccagggagatcctcttttatgacattgggcctttatggaatcaggtaaccttaattctcttaattgccagagcagcagtgctattcatatgaaaatattattcagtaataccttttattaaatattctttttaggcttttcccccctcagatatcaaacattaacttactcaggtgcactttctttaatagaagaatacaagctgtagaattgacactagtggacataaaagccaatcatgaatgtgctcataggtaatgtttttaaattaaatataaaaataccgcccatcctttgggaatatctcaaatttcctacatgacattttaattgtaaagaagggtgatacttaatttccaaaatttcttaatactttctagaaattgttttgttctaagtggatttcccacaagctttatggtattagcaaatacttcttgatatattcaaactgtttaattagcattaaaacccaattgcaaggattctttttaaatatagctttttaaagatcttatttacatggataagagtttcgttaatacttccctttggccaagtgcaatgtactgagtctaatgtacttcttggaatgaactacctctcttaataagagcaatccttcaagcatcacaaaaaaggttttgtatatatatctttaaagtcactaaaatgtctaacctagtcataggtaaagaaatgcaaagaccctaatcttgtaatcttgttttttgctcgctcttcaaaatgtgtatactatgccatcagtcaaatgtggaagaaaaagcaacttagcaaaacagcactatttatcaatttagtagtctctcagatcatacagaaattaacctttaataccttaggactccctgtgggtcagactgtacaattttttatacctcttctaccatattactggctctgaagaactgacaaacttttgtacggtaacccttccttctttccactgtccatctgcccttaaaagagtgagctttatagattagcctggctcctttttaccaaggaagacacgcagctaagagcaaattaccagtagagtgtgtgacattttgctgactcttcctttgtagagaaggtcctgccaagtagcagtgtgctacctaagcaaagtaaatgtaaatgtggaagtttcttgcccagtatttagaccatatgaactacagttttctaatgcatttgcttgctggtaagttggaagggacttcgagaaaagaaatagattttcttaaatgttttttattaaaacttgagttttaaaaaccatatcctttctcctttcagccagtacatctaatttgttacatttatatttgaagaaaagggaataggtagcagattattggattctttgaagtttttctagattttttttgttctaggactttaataagggcagtaagaacacagatcattgttttgcatggattttctttactttttcccatattttctttttgtcactatctaagcttccaagaatctatttttcacccaccttcatctcaagtacacaaatgaaatagattattgggattgtgaaactatgtaagacattctaatgcagttcatctgatgttagaagaatacctaaattttacatttcttttaaaaatccaaatgtcaaagaggaacaggtagaatgcctaaatattacaaaaaaagaggaacaacctttttcagtttaacatgtagagtaagagaataagtagttaagaaagcgaattatttttcatgcttgtagcatcagtaatggaagatgggttgttctgctctggagcctttgtgtgagtagttatagcatttaaggaaataaactgtaattataatgcattctaaaatctactggaaaaaaatactgtcatatacatatatacttaccacctataaaagatttaattaaacattagtcttctgcacttctactctgatataaaatttgttgtacatggttcataccggcttgattgcttttataaagtgaaatgagtttcccaaatgtgatatgcaaaagtaaaattttctaaattacagacatttttaatgctattatatcatcatagataaatttatttcttagttcagattagattataatgcttgatttcaagtacttgaaaaccatccattctatagatgaacattgccttgaagtgcttcaatttgagaaccttgaacagtgttgctttagtgtaccttttgttatttctaagcctaaaataatatggcataacattcgagagcaataaaatgccttgaccaaagaggattttctgtcttacatactgttcttaaggatatgcaaaagaagattgaatatacaaatgtttttgagtcagatcttactgaaatagataagatttttgcctagtttcctgaagaacctgaacttaattgatatttattgtttgttatatcattcttaaagctaaaaagaaaccttaggtgtccttatgatttcagccgcatttagatctcttaactgaataaaaaacgcgtattcgcttttaatttcagtcaaggacgtttagctctattgtatattggttttttactaacagtatgataagtagtaaattggagtaagtagaatgtagagaggcccaaacattttaactgaaaaatagatgagtagttaggcttctaatacttgtatcttgttgccctccttcagaagtttcaaatgtcaggtattggcaaataaattatctaggtggggagggctttatagaatgcttaaacaactggaagcagagatgcttttcaaggacacctgagcactattttgctttctccaccaggatgaaaatatcacttttttaatagtatatttggttcaagagccggtcggtaactaatgtttgtaaacctttctttaactggaagcatgtaagttattaaatatttcctccagactactgcagcaccaatatgaagaggcaaagagagaaagaattgagtttttctagatctggcaagttctcacctagcacagatagtgtcattagcagatgtaagcctttgatagggatcctagggctaaggggtgctatactaagatgtactgtactagtttctgtgtatagccacctcactttcaataaaattctctatttgtggcatattaaatagggaagttaatctaactttataatgaatatttaggtggcctttctgccatattgtatagtctaccaagatcactttttgtaatctaaaaaattcaactctaagctaataaagctggtttattggaaagcaaataaaccacctgacggacctttccagtgaaagagccagaatttgttaaaattagtaaagaaatacgaaactttggcagcctaaattagaacatatattttaaaattacatgttcagtttaccatgaagcagtaatgtaatgctagtgtatcatgctatgcatttttttaaatcttgggtattttacacatgaagagaatggtgtcccataatgtgtaatattcaaaactcgtgaatctcaaaatttctaacatttaggttaagagaagtctccaggaaaatgtagtgttgattcttacatgaagacagtcttcaggaagttttaaagtagaaaataagagtagtgtaagtcaaggaaaactatgagcttaactgataagaaaaattacaggagtggctgtctgggacctaagccagcagtctctggaagaaacccgggataacttttaaataccagctcaggaaatcagttgtacttaaaagagcagcttttttgaagaggggctctgttttaatgacattactgtaaaaagaatggaactgacccctaagttgctttctatttgcggtgggcaggagtgcagatttagtatgcactggcaatgtgatgtattcttagaagtcattctaaaaagtggaatttgttctctattataagacatgaacgttccagaattcattacagaatgaaatactcaggatagcatatgcaggtttcagattccttgatcaggcatctgtttacatcatgctgtcctcatttctactactttttccatttacactaccatgtataatataggtatgtacatatcaaaggaccaaaaaaggtaaaatgagtgaatgtctaaattagtattcagttgcaaaaaacttcagaatcaattcaaatttactgagaacacacccagtaattttcatttgaagtaataggaggttgatttttcttacattcatatttctaaattatgacttaaaatttaatattggagcaacaagtatttgttgattgcaatcctgttttgctttgtctgaactatctgccagatggtttctgccatggttgtgctaattaaaatgcattgcctaatactgcttgctttgattcatgcagtagcttaaagatttctcattttatggcatttgttaactgtcagctcttctttaccttacttccttaaaaggttttacttcccttttctcctatccttccacctaaatttaagttcagtttttgttgttattgcaatggtgatgtaatggtttatagacacatgtgtcgggtggttcctcagattaacaaatgttgctgtgttgctaatctgaaaagagaattccagacacttttacaagcctgtctcatcaccgctaattttagaatgaatgtgttgaatgaaatgtgcctaaaattgcttattagtcacggttgtggggatcctttttgtccttgggaaacaggggtagttgaaagtattcagaaaagtaatctagtggatctaattcaataaatgcacagttttgttgttttagtttgtaatgaaaagttgaaatttttggaataaaatgaaatttgaagtaaatgtgaattcagataatgcaaagaattataaaacgtagcttaaaatggaaaaaaactgatgatgtcttacatttgcaagaggagttacaaatttgagtttttatattcactacacatattattctattaaacattcttattccattgtaaggtccttttagtttatctgcagcataataatggggtcatgtgggttaaggtgctaaattatattgctgattggttttaaaaggatgtctctacgaaagattctggaagtctaaaattttaagaatgaattctgtctactaatcgggaaactacaattagagtgagtacatgttctaagtgttgcccactagttgagaaattacgtaatacagatttcagagtcaaaagaattttgagtattgtatcagctgttactcagtattttggtgtttccttttagacagctgatctctcacgttagaagatactgcataaacagctttattcccaaataaaagtgctgagtgaagccattgctcaattcattgttttgctgaggacttatatgtgtagaattctctcataaattgatttttaattaaattaattataaacatagaagtttctaaagcagaattaacacaatagcccatttcaacaagctgtatatttgagaacagagtgacagttattaacatccagtaggaaattaagagttgttgttcacaaataataaattactagattctgacaaagactaatggggattaagtaagcgtgactcaatataacaaatttaagcctaagcatcttctaggccctgaaatgaacaaggtattgctgccagttaaagtcagttgtgtcttacaacctgctagctgtcttgctgtaaaaactgtaacgtaaggcccttgaaatagatgccgtcatcagccccagcccccaagcattcatctatttaaacacatgacagaagatggtggaagagagttcagcagctattcatgtggtagaagtggttattgtattaggacatactctgttgtaggccagcaacttttgagttaaaacaccgcagctgtttctcttcctttctttacatctttctcttcttttttttttttcttagcaataaactcacttttttttccccacaaacattttgtgtagatccaaggagcaacaaattccaactttctgctgtagcaattacacgctttttgtctgtttgactagattttagtattttactttttttcttctttttaaaggcaacggacagccaagacgtagatccatccaagacttgactgtaactggaacagaacctggtcaggtaagacaacattcaaattttctatctttgaagaatactaggcagaaaacaagaattaactgtattctactctgcaaaattagttttatgagttgacctaaagttgtgatagagaaattcattgcacctgaacttaaatacttaggggggaaaaaaacataggtgccattgttaatttaacttgaaagataatttattaaagtaggtttattaaactccatggaaaagtaaattgttcattagcgctgtatatatgttatatggttttatgtatgttttaataagtattcaattttataatttaacaatttatcattaaagtgtcctttaaagtgaatcattaatatgtctcctttttactaataagggtagtaaacatttccccaataagttgctactcctctagcgccacgtagggcattacatggagaactctaacgtcttttaacttggcatatccactggattaatatttttttcaaatatccttaagataacatttactaagcaaatgtgtaaactctcgaaaggcttctattccagtggttaagatttcattgtttatatttctggatcctcctctaaactctccttgtctctttatcactgctgctttgcagatgatgcagacagtgttataatttaagccattactgattagtgcagagttttaacccaccaggtatataaaagtagctcagtcattgttttttctgtgttactcagattaatacacttgacatatataatttattatatactatattctgtaaaatgaatgaagattaattataaggtgtttgttttcagctgtacaagaataagttttatgagagcagcataaaagtaatgaaattaagtaatgaaattgttacatattaagaagtattaagtattaaattattaagtattaagtaatgaaattattacatcgtgacccatatttttgtaaaattttagcgtttatatattataaacaatctgttgtaatttatgataatatgtattagtacttgtcatcctaaaaaggtattttattattatatcatttgtataatatacttaaaatttgggagatcctttgtagtcattaataaaaaagtcttttatacccatcaaccaacttaccaaaaaccacttcaaatatttaagtggtgaatatccttgatcttcatttatatctggaaatatgtttatttcacaaaatgcttataaacacatatataaataaaatctatatagacacattaatttattatgttttgtgatactagtgactctaaatcttgatttcattatttagtgatagtttttttcagtgcatctgtttttgtaagaccccagaacttttggctgaagtttcccgttttctccccctcagatacttaaaagttttaatcagcccatttagtaacagatagtttgacatctgctatttgctttgattctttggaggtttgatgagctcagccttttaaactctgtttactattgccactgatattccagttatgagaacttctagccaactgtttgactaggaatgagaagcttgtcctaagacatgtcaggagcagctactagtttgaaagcttttctgtagactctagaataaaagtgttgccataattcaggactgatcttcccacaccaagtcttacttatttcttcacaagttccacattatttgagattttcgttgttacccttttaattcacaataccttcaggtagtaaaacgctggaactgaggccaactatgggtgtgggacagtcatttgtggaattgtcatagaccactctgaaagatttggggtgagggagagtttgatatgggtgagggagagtttgatatggcagtaaaacctgttctgaaacaggtgatgtatgaccattgtgtagccacattttaaaactgatccactctttcaaaattatttgtgttatagccttaaaatgcctaatgttcagcttggcatgagagtggcaaatactaatcctaatgtactatgaaaacatttctcccaaaaaatgtatgataagtgaccattaaatcttttaaattactcacaaagatgatattcatttgaggaagaaaagtattcacaatatgtgttttcaaaattggaaggtgccatcctttttgaagtctggctaagcgtgattccatcttgcagaggaaagtaaacttattgtactgtggctcttgactcaaaacataatcttagtaaaaccacttagaatttccatctgtaaactaaaattaaattggttgtttttctgctgccatccatttgagaggaacagtaaatgaagcaagcttcttaattaaaagtaatgatataagtataggtgtaaaagattgcattcttacaacatacaactcactttcaaacatggttttttcattaattcaggaagctttttaaacactcaatagatgtgacttcctagaagctttgaaaagatactgagaaagaaaaaagcagtccctgacatccaggaactggtttgacactgtggcctcactgttgttagtagctagccttattctcaacggctggctgtcacagctagagcatgttactgtcttattggacataatctctcagaacaccaatatcagacaagataatgctgagaccgtgataaaaggagacaaaacaagactacttcggaatgttttctaagcacagacaaaaacaaggtcactgtgccacccacaaaatacctaacattgtcctctcccagctattaagagtgactgctgcttctttaccaattacagcttggtcctcactctggactgccctccctgtggaattgcccttgctttctgacagcggccaatctggaacgaacccctccttcctttgagtttccccaaaatcactcaaccaaagcctaaatcctataatactttctttttctaaaaccctcttactgagacaccccatgctgccccatggtaagcattctccttcactgcaataaatattaaacccaactctttccactattggtgtgttcctggcagtctttggctagagggctttgacaataccaataaagcctattccgcaaggacctcatttggagagatcagacttatgcccaaatcaattagaaaactaaagtaataacagcttccatttgttgtgcactgactttgtgccagataggctcttagtatacattatcagaatgttaatcctgttatcaggatcttagtcctgtgaagttggtactttttcacctaatttgcagccaggtaaagtgaggatgagagaaactgacctaagtctcttacttccttatactgccagtaattcctataaccaggttttgaatccagacctgattgcaaagcacacaaactctatactttaatcattctaacttgcatgtgaaactagatgtgatgcatgctgttatagccctagatctcttacatttaggtattttggcttctaatagtctgcattgtcattaattatttaaacagttgttaagtgatgatgaattgtagctgtatcatatcattgaacaaggttaacctatcttgataataaatttctaccaatgactgcacaaatttatgttttatacacctgggtgagccattctgtgtttcactaaaacaatatacattcttataaatgcctgaataccccttctggaattgtattcagtatagatctatattcaagaattctcttagaggaggctgcagtcagtgaaaattacgactgcaagatgatacagttatgattatttagagaagtgggcatattacatttccatatggactttataatctacttttactagtcaaatatgtgactttgggcaagttccttaatttccctgagcttctgcacccttatctgcaaatagggaccataacacccacctcccagagttcttaacagatgtgaaagtgccagggcacacagtagatactaatccatgttgtatgccagcctctccacagtgtgcctcaccgggctcttgatatcacttccttgctctcatgatagtgagaaataaaaagaaaatagcacttggaaagaagtaaaatccaccagcgttctttctgtatcataaggaaaccttgtgtcaaggatcatggaaagtatttgctttaaaggtctcttatcgcatattgagtgatattaatatacattgttattatttatttaagggatgtgatttattatactacttttttccatcttcattctgcacctccttttgtgtaaacaaatgttctggtaaactctaaatcagaaacttatgtaatagttttgaataattccttcttcatagtatacctttctattggagaatagacacgtttcttcttttttttttttttttccgagacacagtccccgctgtcagccaggctggagtgcagtagtgtgatctccgctcattgcaacctctgcctcctgagttcaagtgattcttccacctcagcctcccgagtagctgggattacaggcatgtgccaccacacctggctaatttttgttttatttttagtggaggcagggtttcaccctgttgcccaggctggtctcgaacttctggcctcaagcgatctgcccgcctcagcctcccaaagtgctaggattacagtcgtgagccactatgcctggcctctgttggagaacagacacctttctattgtagaagaccatgtaagaataataaaattctgaaatttccttatgaaaaactgtagtgaagccaaaatagatcaagcctacagacctttagattagaaagaatattttcagtacaaccttcatgtatagatttaattatctgtaactaccataataagtacccatgtaaatccacattaccaacttatacccattttaaaaatatttatattattgagatgttactttagcaagaatatcatagaagtcatcatttaatctctgtgttttgtgcttgtataattttagctactaagatttctgagggtattaaatagcttttaaatgtcagtctaaataataacactgggtgtaaattcctgacttatgaaaatattttcccagtctttcaggtaagatattaaaagctgagctttatttttgtctgtaaaataacttccaattcctttttataaatatagggataaatttctggtcaaaggccaattctggttcatgtctactgatggtaatctgcccctgaggtttaaatttggcttagtattcttttgctgccttaaattgctgtgtcacgtttctatactcttgtgactttcatatccagttcttttggtaagtcaagtttgcctatatctcttaaactttgcaattaatgtggggatagaataagtaattttaaatgtcttagaggaaggagcaacttaaatgagttttaatagtttgagagcatttgtgaccctcagaattttaccagtgattttaaaaaataagtactgtaaaaacttcttcagtagttggttacaagcagtaacataaattcagccacaaactagtttgagttttttcattgattgtcagatgttatgtgttcctcttatttatgccttgtattattcacatactcaaaaactacagttatgccttgtttttaaatatttccttagtttttttatacaaacatattagcatatttttatttattgagatacacatttcttaaaatataaagatttatttattagttaatggatttaaatctaactgtgctggtctaaaaacagttttgaaacttgcattaaaagtgcaagccttatatttcttagtttcatagctgttggaaattacaagtgggacaaacaagcatgcacagaaggtgctaagagtttcttggaaagtagaaggtgaaaagaaaggtgtagcaaagaatcattttgcaaaagatttaagcttaaggagtactataaaattcctattaggtccaacttatttgttttaatattgcagatgttcagtgacctcttttttaaatatactaaatccattctcattttaaaaacctaattattacttctactgtattttgttgatttctcacaactgatactgattcttacatgtcacaaacatgtgtttctctttttaaaatgtgcattagcattacactgactctgaaaccctggtctgccaccactttgaaggaaaaatgcctttgatttataatagcagttataactatgggcatatttgtgtacttgctttcagtcaaagaaagttaaaaagactcaggaataatttcataatgtctatacttgctttgtcaagggtaaaagtatcctaaaagtaagagtgaaacatttcatcactggttttctttggtgtatgtcgttgttattcttatatactaaaggtaaataagcttaagcaccaatcttgtatctgagtgctaatagcttgtgttctcattttattcaatgagtatctattatgtgtttattatatattcagcaatttcccagatcctgggaagtacaatataaaaagtacgcatggtctctgcccttaagaggttataatacttttgaagaggagtaaaactttgagactactataatttcgggcacaagttgaagtaggaactgactatacagccaaaattcaaagaagaaaaaaatctcgtgtgaagacatttcatgtacatcatttcatttaatttttataaccttatagatagataatactgtccttattttcctattgagtcttagaggttaaataagttacccaaagctgtactagttagaaatggcagagcacagtcaaactctgggctgtcttgtctccaacacccaacttcttactgctactactttttctcattcacacttcatcaatgagaaacctaagtctcagagaggctaagttacttacacaggttcacacagctgtaagtggcagaatggagacataaccccaggtctccaaagtattagactgaaacatgtgaagttgctgagttttcaactacaaaaacaccagttttatctggttcagttttatgcatgccctgtgcactacgccgtattatctttaggtgaatatgaggtcaggattaaaaactgcaagggaaacaggggcatgaggaattttaagaggagagaaaatccagatgggcaaggtaaacctgctgatggagagtcatgaatgccagagtgagaatttcagaattgattcagtaacaatcagtaaacgaacattttgcctgcagtacactgttaggcactccatgtcctcaaacacaaggtctggccttgtacacaaacaaccagagaagtggcaagaatcaccacataatgtagaagaaaacctgagctgggccttacagggtggggaaggattaacaaggagaagaaaagaacagaatgagcaatcttatatggagttaaaaattggttatggtgtagaaaagctttttggaatttctgaagcaatttcagtgggtacccaaaatgaaagtcatatttcatcagtttttcttcaaagttaatttatgatttttttctctgaaattgttaggaaagtacctttcactaaaagtataattagattgtttgtaacacaaaggataaatgcttgagggaatgggtaccccatttttcatgatgtgattattatgcattgcatgcctgtgtcaaaacatctcatgtgccccataaatatgtacctactatgtacacacaaaaattaaaaattatttttaaaaaaacagaaatgagaggaaaacaaagtacctgtcactgtttattatcctgaatccattgtggcttttcaagacctaaaatcatataattttagcactatatggaacacttctcatcacattcttaacccagccccaacccctctccagataaagagaggttgaagtgatctgaagcagacattacagcataattagaactcacatacgatggattctactcaaaggtacttttgtattgcatttcattttacttgttgcagtcttgaatttgagtgtttgtatatatgttgaagctagatataagattcttcatgaatttattttaagttttattttctataactccatgttcttttttaagtctcttctttggtactcagtaacacatcaagaaaaaaaaggtgctttttaaaaagtccttatgaggccgggcgcggtggctcacgcctgtaatcccagcactttgggaggccgaggcgggcggatcacgaggtcaggagatcgagaccattctggctaacacggtgaaaccccgtctctactaaaaatacaaaaaattagccgggcgtggtagcgggcgcctgtagtcccagctactcgggaggctgaggcaggagaatggcgtgaacccgggaggcggagcttgcagtgagccgagatcgcgccactgcactccagcctgggcgacagagcgagactccgtctcaaaaaaaaaaaaaaaaaaaaaaaaaaaaaagtccttatgaaacccattttagtttctgtgtcctttgaaaggctttaatatatgaaatataaatatgtagacaagaatgtatataatgtataagttatgaaaataaaatgagcacttgtgaacccaccacccagcttaaggaatggaacattagcaatcccagtgggggttggtccctgtgtgttcctcgcctgtggccttccctgtcatttccccaccaaccctcagtgccatgttctgtcatatgtcatgtttccagatatcataaataccttttatctgattaagaagtcctcttcccactgggcacaggggctcacacctataatcccagcacgttaggaggctgaggcaggaggatcgcttgagcccaggagttcaagaccagcctgcacaacacgggcgagaccccgtctctacacaaattttttttaaaattagccatgcatggtgccgtgagcatgtggttccagctactgaggaggctgaggtgggaggattacttgagcccaggaggtcaaagctgcagtgagctgtgttggtgccattgcacaccagcctgggcaagagaacaagaccctgtctcaaaaaaaaaagaaagaaagaaaaagaaattctcttctcatacatggaatttaagtttgttaaatgtcttttttataagtagatgttaaatgttgtcaaatgctttttctgcatctgttgaggttttgtcctttaatctgttgatgtgattaattttattaatggaatttcctaatgtcagatgagtgacctttgcagtcatttgcaaagttggataaactaaactttttaaatggtttttattgcttctacactgccacattatatttgctaatataatttttagaaattttgacttttgtgtctttttatttttattttatttttttggaagtgaggttcagttgtaactttctttctcacactgtccttacatattgatttttactgccttcacagaatgggtcagaaagtttcttctttctttgtttaggataatttaagattggaaaaatccttatcttgaatgtttgatagaacttacctgtaaaaccctcctctgtgcttggtattttctataatgtataggaatttttgaaacttttttttaaagaatgtgttcatttttatagtattgtctccgatttcaaaatactatcttttactatttttcattttgggaggcaaattcttttttttaactaagttagatctctagcttataaattgtcagtgtttctggttttttcatatatatatttagaattaaatattttcctttaaatgctcttatagtcacatccccaagtattagcatgattcacgttaaaagtcagttcaagtactttctaatgtcccttttgttttcttctttgaccaatgagttatttagaagtgtttttcaaaacaaaagatttttaaaggttttgaaatcagtataaaaagtaattaagttatgatactgaaattttttttaactttgagatttgctttatagcttagtacataatcagttttcattagtgtcccatgaatgcttaaaaagaatgtgtattcttcatttgctaggcgtaaagtcacttatgtttagattaagcttgttttttatggagttcaagttttactgtgtgtgttttgttttgtttttttggtctccttttatataatttacagaagaatattaaaatatattactgtggggctgggcacagttgctcacacctgtaatcccagcactttgggaggccaaggtgggaggatttcttgaagccattaggtcagcctgggcaacataacaagatcccatctctacaaaaagtttaaaaattagccaagtgcaatatcatgtaactgtagtcccagctactcaggaggctactcaaggaggatcacttgagcccaggagtttgacgatacctccttgagcttttttactttatgtgtttatatgtacagcatataaattttgaattgttggccaggcacagtggcttatacctgcaatcccagtgctttgggaaactgtggagggaggatcacttgaggccaagaggtagagaccagcctgggaacgtagcaagaccctggctctacaaaatattttaaaattaactgggcatagttgtgtgtgcctgtagtcccagttactcgggaggctgagatggaaggatcgcttgagcccaggagtttgagggtacagtgagccatgatggtaccactgcactccagcctgggcaacagagcaagaccctgtctttaaaaacaaatctcactgtgatggtggatatgtcctttttccttgcagttttttgatttatctatttgtatgtacagcatataaattttgaatcgttggccaggcacagtggctcatgcctgtaatcccagcacttagggagactgaggcaagagggtcacttggggccaggagattgagagaagcctggtcaacatagtaagacccatttctacaaaaaaaaattagtttttaaaaaataaattttgaattgttgtattctgaattgaaccacttatcatattatctctttctctagtaattttttggaccctaaaatacattctctctgatattaatataggtaccttatttggggtagtttttgcctggttttctttttttatcctttaactttctgttttctctgtctctgtaaattagatatgtctcttataaatagcatttaattcatcctgacaatctgatttttttttaaatatcttaactggagagtaattcatttacatttattgtggttactgataagtttgctctcttatgttttatttctctttcttttctttcaagttttgagttgaataaatttattcttcattttattattttctttctggtttgggagttatatattaattactacttttagtaaatacctttgaaattttaacattcatgcccaacctagtaaagatctgtaccctcatcctgaacaatatttaaaacaaggagttttaagtcagtgcttttcatgcttgtgctattgttattataattttagtgccatcttgtttgtttgataattctataaattcactgtttctgtcactgaatgttttcagtgtgtagatttatttccctgtttatcactattccttattgcatcttgatccttctatcaagtaaaatttttcttcttccaaaaatacatgcttgaaaaacttatgtggtaagaatgtatggaaggtaaactcagtttttgcccatctaagaatgttattttggcctctatcttcaaattttgttggctagacaattctagactggcagttatttttcagcactttgaagatattgttctgctttcttctggctgctttttctgtctcctgttgattgtttcctagaatttgaatgtatacgttccatgttgaactcaatttgtgagcttcctcctatttcttatgctggggatttgttgtggttggaatttgttgtaacctgcatccaatctggaaattttttgtggattcacagttaatacatttctcccttccacccagagccactaacccaagagagacaaatttgtttcctgtctgcttttgtaggtcagattttttttttcctagttgagtgaccttttctctgagagtgaagcctttgctgagttttagctttaagcagaggtttctccagtcttacttccatcctacaaaggcccaaggctttatggtccattcctctgagtgcagcagcctgtgaaaacagtagctctaggccattggtgtttagttgaaattccgagggctgtcagcttaagcacttactagtttcctgatattgttttgtttctaatctcagagtatttcttagtttcttgcaagctcatcagtttttaataggtatcatgcgtgagtgaatataaatttttacatatatataagagaggatttattttgttgtttacaagagttttggggggatctctaagtctcttcttgccttttaatggaaacgttctcgtcattttttttaatcaaaaaatcacattttgtttctcctgtgacttcttcctgtaggtgagcagtaggtcatccagtcccagtgtcagaatgattactacctcaggaccaacctcagaaaagccaactcgaagtcatccatggacccctgatgattccacaggtgaccagtctgtttcttcatacttatgaagttgaatcagtcatgtttatattcatttggccatgtcattactctaatgtttacaaaggcaggcattatactgttgtttagatttttatattaaataaactatttagtaatacatgttaaaataccattttgaatacagagacagagactgccttgccttctgtattttttttaatccagatactaaacatgtattttaaagattgtctgtttggggtttttttccagttgcgaagcgtattgaattcttgatacttcagcctgtgattttcctactagattcatcctactagatgatagtagtaaagtcattttttcagtaaccaaaatcggagaatggtaaaaatcatccccatcatcttcatctcaatcttttaaggacacgagatgtcatgtaccttaagttgaaaaaaattctgaccattgaccttttgaattgtttttaactgataagagacaccattttcagttatacaaatattctattagacctttagaaacctgtgatgagttattaaagctccccaacatgaataactaactgttcacaatattagtattaatgtctacctgcctaaaggtagtgacggcatcgtttcattatgggcaaacaggaaatgatgtgccatagtagaattaacttttccctaactttaagagaataccttgataaatgcttttaagtgtacttatgaaattttttatttatattatattaagtcacgaagggaaagatgatctcttagcccttggaaaattaaagcatttgatattttatataagatcgactatgttattaatagtaacaattagattgaagtttaaaagccagctttctgtctttacaaactaaaatacaactcaagtatttatagttatctgatgtggtttggtcaagtttataatttaatttaaaaaattaactgggtggtttttctgtgtgtcatgtaagatagaactatgtttagccagggtgtactctctagttttagtaagtttaaatttagtggcggcaaaaactcctgtttcacccctagcacagcccaacctaggactgtccagagcattcaccactacgcagcacatgtgtagaattcattatagacttgctcctccccagtggtagacagggcaatgctcttgcccagttttatcattaacattcaggtgatagcagctctttttgatttctgaaccccctggcaagggagtacgttctctgacattacagcatttgcccgggtctggtactcaactcagcagagccttctgtcttcagtctacactaatctgtatatgccagtcaatagtgtggcagattgtgacttcatgggggtaaaataaaaaatgtttaaggctctctctcacataactgctacatttctgcctcatatgttgcttctaccttccaactcccgtcccattgttttctttttctgtacctagaaacaccacaaaataccaattgctagaaataatttgcaatatcagctgaattttgtctttgccttgaaatatattgcacatgtgtggctataattttgaatacattttaaaaatggatgctctggtttaagtttataattaattcagctgtgcagtatttgtaagaaaaatattgataaccaagctaatagaataaattagggaacagataggtaaagtctttttctttgaaggcccactgaccaaggaaaaaattaagagtgtaaatgtaagttaaagtgacctaattaaatttttttaatttgagaggtttttgtatattttcagagaaagctaaagagcataacaatttaataatcatagccgataataagcgctcttcagttcctatttataatataatgggtattcaaaaagacacacatactgagaggatctagtgagagagagatctagacgcagtagagggagccgcagagggggaaactcactaaagaattttcacctttgcttagtactttgcaaacatgtattaatataaagtgtaagacatggcccattccttgcagtctggttagagtcataatactgacacattaaaagtaaacttatactatataataacttactaaatttatagtacaagctgagtgttttgatagttgtaagagaaatcagttcaacaagacttggcatagtctctggccttttcataaaatgatgagacttttctttagccataaagcagaaaggagaaggcagcattccactgaagggaatgcatactcaaagaatatgagatagtaacaagtgttgtgtttgaggggtcagaaaagagagtttgccttaatttaaccaaaccaacatgagctttgacattcaggagaagcaattagatttgattagcaattgaaacacacacacacacacacacacacacacacgcaaaaaactttcattaaataatcttccgatctgtgaccaattattgctagtagagattggaagttcaatatcaatttagtgtaaagtgagaaagtgaaatcccacttctttttttagagagaagatgaaattcaatgaaggaccttaagttccccaccatacaagggctttaattatttgaataacacaatccttggactttttttctgctcccagaataccacgcaacactgatgtattaagcttaattctaaaatacatatcagatacagggtgctgatataatgagatatataatgtatcagtgatttaagaaagaataataggaatggaaatcttaaattgaaactttttcaagacacttaaatttttctagtaaatcaggaggaaatcagtcatttttaatcagttttagttttgtggaaagcagtgtttatgtgggagcgtagtttgaaaccactgttggggtgggagaagagttggtcagagaaataacaaattaagtatatttcttgtttagccacttcagaaaaacacacatttatgttagtactgtatatgagccttaagggtaagggtaagtgccttaagtctctactgtttttctgtattgccctgcaatatttaataaacattactttttcaatatggaattcatactatactattttaaattgttctttctaattctccatttagtatgaataataatgataactaccgtcatgtattgagtgcttaatatacgccaggatttgcatggtgttcctcacatgcactggctcatttggtctgatttcgctaattagcttttggagtttcttgagagcacgttctcagtggctttaaaaaaacaaaaacaaaagcaaaaagaaaaaaaaacacctggattatcagttgacaataaattagaagattactgagccagcaacccttcttgagtttttttggattgcatacagtgcgtctgctgtcttcctgacttgcctttatccacaccactccttcaaggagttattcgtcagaaaaaggctgaagagctcactcatttagctctttttttgtctactaacagtgggaaagcaactacttctgaagtagaaaagtctgtattgcttcagagttactctgtttacttctggaactgttctacataaccataaatgttgagaagagactgtcccacgcatctcagtcaagttgtatggcagttttacctcttttgaaatataaacaaaagcattctattcaaataattttataaaattgactgattgtttgaattaatcaacttaactgttttcggcatgacattgagccacaggtttcaacctcattttggttccttactgttcgtatttgtaatatactctcatcaccaacatctcgttttctgcagtgattcttactgggaagggcaggatgagtggtggaggtcacattataatctatataaattgaaaatgatccactggaagagaatgtgtctctgctttctccctttccctgttaaggaacattgatattagcggagttgatatagccttctataaaataaacttagcatgataaagaaaagagatggggagtttgattagatagggtcaattaagactgaatttaaaatataaaggtctcatcactgtttttgtttttaattaagagcttagaagctctaatatattgtgttctattcagtttatagccaacttaaattataggtatgagaatataattgcattctaatatctgataattgaatatcctttttttaacctttagaattcagaaatagactcttcaattaccaatagctgtaacttttaatttacatattatttactttagggaaaaaaagcatttcattcatgctttcttgctgttcgtttataattatttgtgacagaaaatcaataaaatacatgcttgaattccagataccaatggatcagataactccatcccaatggcttatcttacactggatcaccaactacaggtaaaggagtactttcttattgaaagttgacttttttcttcttagagagtttaagttgacaattgtgttgctacctgtcattgtatagtcactccttaatttatccttttagttggcctccttaaactttttagaatcaaatcaaaataattcttttggttaagttaatcaaactttaaattggcagaatcatattcttatcttttcagtcatcttaaaatcctccagtatctttctttagtactgctaagcattacattttcactctttaattttagtgcattaaaacaaaactcataagcttatttctatttaatacatttgtgatacattctcatgttcatagtgactgaaaatgtaaataatatacttcagtgccccctcatgagtatgagggctataaacatcatttagtttgagcctgtttgcagcctgaaatgtcataccagagactacaactccaacaatcatgattctctgtaacagactgttaaaacagcaagaatagatttaaatgctgagttaattctgacaaaaggacactgagattttctagggcatggtttaacacttatttttaaaagatcattgctttagtgctataaaaatatatcacagtctctgtcttgactctcatcttagctagatattgaaatttgatttaattatgttttaacattcctgattattttcagcctctagcaccgtgcccaaactccaaagaatctatggcagtgtttgaacagcattgtaaaatggcacaagaatatatgaaagttcaaacagaaattgcattgttattacagagaaagtaagttattttttatgaataaaaataaaaatacattagtattttgagtttaaaatatgataaggtgcaatgaaaacgtagtttttagaattagtcattaagtatactttcaacttgtttaagctttaagcacccttttactaaaaattttttatgcaaaactcaatccttttgactatcatattagtgctatggaaaataaactggtgctttatacttgttgttttatgttctcagagctgtttagacttattattataaagatttattgttttcttgtaaatagataaaataatttgatttattaacattcagttgtgccttatcttagaaacatttttgtagatacattttttccaggtgtatgtttagaattggattacttattaaaagactgtatttcataactgagtgtttttctgaggagttatagaaactgccttcctccctttttaaagaaacacagcctaatttccttactactgcattcacagttcttaaatatgtatgtatcttcagttttcttaagcatgacctccatgaaattttatacttaggtaactgaattgttggtggtaactaaaatgaagtgataaggaaaaaattttggcaactttatatatgtatgataataggattcccttcattaattttaatctaaataaatgaaagttgtttttttctgaatttgcgaaaagctttctgtatgtacttcaaaaaaaagagagaaaaaattgttttatcataatttattgatacagtgatttaaatggaaccaacctggtatttgaaaggtaagcctaaataggaaattaaatactacagtttggaaatcgtagaagtaattatcaaactgctggcacttttatgttgaaaaagcttgatttcttatttcacttatttaacctatacttttgccatactttaatcatttgaaagaagtattctatgctggaaaaaacaaatggtggattagggtgttggctgtgaaaactatgacagttttaatcaattttaaatactttcagaagtagtattagttagttattttgcttgaggactttttattaattattcatttatatccagtaacctcactttaggaaatgcctaaagatgcatctttttcgggaatacttaatagttcccaaataagagggacttaaataagtttatcagactataaaagaatgagggtctttcctgaaagtgcttgcaaatgtaagtgttttaaaagaagtggtactttgtcatttttctcactgctttaaaatgggaaaaagctttaaattggatagcatttattttaattagattgcaaatttgctattagcttaccactctctgctatagttaagtaggattgtgacttcagaatgtgaatcagtataaaagtagaatgtgaaggataaaaacttcatgatattttcccatagccacatagaacccttcccagccttttttcatccttcctacacaaaaagaggatagaaaatgaaattttctgaaacttttattttaccattttatctgcttcgctaattatccaagtacagttacttaataaaaggattatgttatttgtatgattacactagaagtagatgagagttccatcccagcccataattatatttgattagtgtacctaagatgcaaaatgataaaccaagaataaaaattctcattaattgagcttccatcatcagctactaaggtatgaatttttccatcatgtgtaatattatgtggtatttgtttgtaggcaagaactagttgcagaactggaccaggatgaaaaggaccagcaaaatacatctcgcctggtacaggaacataaaaagcttttagatgaaaacaaaagcctttctacttactaccagcaatgcaaaaaacaactagaggtcatcagaagtcagcagcagaaacgacaaggcacttcatgattctctgggaccgttacattttgaaatatgcaaagaaagactttttttttaaggaaaggaaaaccttataatgacgattcatgagtgttagctttttggcgtgttctgaatgccaactgcctatatttgctgcatttttttcattgtttattttccttttctcatggtggacatacaattttactgtttcattgcataacatggtagcatctgtgacttgaatgagcagcactttgcaacttcaaaacagatgcagtgaactgtggctgtatatgcatgctcattgtgtgaaggctagcctaacagaacaggaggtatcaaactagctgctatgtgcaaacagcgtccattttttcatattagaggtggaacctcaagaatgactttattcttgtatctcatctcaaaatattaataatttttttcccaaaagatggtatataccaagttaaagacagggtattataaatttagagtgattggtggtatattacggaaatacggaacctttagggatagttccgtgtaagggctttgatgccagcatccttggatcagtactgaactcagttccatccgtaaaatatgtaaaggtaagtggcagctgctctatttaatgaaagcagttttaccggattttgttagactaaaatttgattgtgatacattgaacaaaatggaactcatttttttttaaggagtaaagatttttaattctgtgattgtgtgtatgtgtgttgaaactgtaaagcttttatgactctaatattaatctcttaaatgaaattaaaaggcaaaagaacatgattgagcttaaatgatcatttcttcctgcagtgattcttggattgttttctcatgtatttgaaaaaaaaaaaatgaagaaaaataatggaaaatggaagtaattactccagctaaaaaaagcttggacttagatttctttttatgataccaaatgagaaataaaccaggcaaatcagaaggaagttaaagaagcaaatataaattcaacaagtgtcctaattatcctggatattggaatatttgattttccttacaatcccgttctagaatgcctgccgcctttcaacactttcaagagaatttcaacacttacagagtatttatattgttaacagtaattttgctaccaaaaccttcagaataactttaataataaaatgacactgaaataatagactatacaaactctatattttttcagttggtgttaaaataagtcacattttgataccagtacaagatgtcttttaaataaggatgtcatcagtctgatttttatagcattaatgttttatgaagaaaaagttcaaaatgaaagcattaattgctgtgattattagaattctatcatgactgtattgtagtttttgctctatttcagataagcaagatctaagaagttatcaaaactattctttaaaatgctaaagcaggtaactttttcttccattattttttcctcctaccactgagttttgtaatgaattccttgtgtatacaagcaatacaggtgaatactaaactgttatttttagcttcttcaaaagctattttagaaagcttcctggaaataaatgtcttctgtcatttaatttaaataaaaggagtgttaattgttcccaaatttgattacctagctgaaacagatattggattcagcatagtaatagtaaaataaaattggcagagaaaataactgtagactaggataaagcatgactcctccatagcattgttgcttgtatgtacatctgtcactccactgaaagggacctagtcactttaaagaggccttttatctcagcacgagatatccaagcgtgaatgctaaggcttgatgtttccattaggatttagcattcgagatttcagattttatttatagtcattgatgtgttttgctgtattataacacatttaagggaaattttattatggtttttacatgtagtcatttcataaaaatatccagataggtaaatggaagaaaatagtagattttagtcatggtaccaaatgcaagaggctgttgaacagttgcttgtttgtttacagtaagttccttgagattttcagtactgtagttgccctggacattgagtacagttcagccttactctgtttttaagtagttgtgttgtcaatttcatgcttttaagtcctgatgatccttggagatgggagaaaaagataccagggataattaaaatccacagccagtttcatcagtttcctcatccatcctgcaaataaaaatgttaacaaggagccaaacttattcgttctggttttacaatttattttgaccgttttttgggtgaaaattgcaaacagccaagcaagtggctggaatgccccagtctaagaaattcaaaaacaatcactgagtaagccctaattacattaattacattttactcttgactccaggaaaagaaagcaagcttttatctaatctagagggaagtattcgtgagcaataaaaatcacttttttgagttgaataataatcagttaagaatatttaccgcatagcaacacaacatataaagatttgttacaagttgtttacggatgtttgactatttttgctgaagtattttagagtattgaatgtcttctctcttcaagtttctttcatgttcctaatttcagctcctgtagccagagatcacaggtcttccctgtgaaactttggtttctttctataaatgtgtgtggttttcagcgctcaactcctgtcttcaaatggtagtaagttctacttctacttctgtcattcagaacattttatgtcaaatgatgtaatgcagaaattcttgtgcatatttgtaactgaaggaagctttttagatttatttttgtttttaataaaattcagattcctattctaaa

SEQ ID NO: 15682 - DNA, 73473 bp, Homo sapiens
ggacacggctgtggccgctgcctctacccccgccacggatcgccgggtagtaggactgcgcggctccaggctgagggtcggtccggaggcgggtgggcgcgggtctcacccggattgtccgggtggcaccgttcccggccccaccgggcgccgcgagggatcatgtctacagcctctgccgcctcctcctcctcctcgtcttcggccggtgagatgatcgaagccccttcccaggtcctcaactttgaagagatcgactacaaggagatcgaggtggaagaggtgagcgaggcccggcatggagacgccggtcccggcctgccccgcccccgcctctgcctggtgccggctctgaaggtgcctcccggggcccctctaattcgcgggaccctgcggggtccacccgggagaccccacagccctcagtaacgtgggagtgggggttactctctgagctcaactgctcgggagtagctgccttttttcctctcttgggtactcttgattttggatttgatattccggtgataaacaggagaatgaactggtgagatagtgtggtccaccagttctcgtatctgtaagtagtagtttcagcgaagatcgtagccgttctggagtttcagtccgctggacgtaatgttcttttttttttttttttttttttgagacggagtctcgctctgtcgcccaggccggactgcggactgcagtggcgcaatctcggctcactgcaagctccgcttcccgggttcacgccattctcctgcctcagcctcccgagtagctgggactacaggcgcccgccaccgcgcctggctaattttttgtatttttagtagagacggggtttcaccttgttagccaggatggtctcgatctcctgacctcatgatccacccgcctcggcctcccaaagtgctgggattacaggcgtgagccaccgggcccggccggacgtaatgttcttaatggccaaagattgtattatattcgacttctacttcagtacctggcatgtaggggatgctcaataaatgcttgttaaattagtagatcatcaagtctaataaagtgtttcccttagcaccgaatggttctcaatttctccgataccgcacagcaatactcgtaatgtttaaatgctcggctttcagttgggctaatgtaggtgaatttcaccataagtaacatagactggtctacgatcaaaagatgtttcaagtagcatattctgaagagataacgaatgatttcggtgacaatcagaatataatattagactagaaatcgctatcagaaaacccatatcctttctttattctgcagtaatttattttagaacaagatatttcaaagtgactttaaagcgtcgtttttcaaattaacaggtaaattgggttctaatgactataaaatttagaaaagtaaaaactgcatatatattttttaaagacactttagaacttgttaaaaactttggttgaaaatactatctcttaccatttatttgccattttttaaatttattaagcactttgcgttatatagtccatgaaaaacctagtgaaatattatagattgtcaacgagttatgtctactttaaaattctaaaattatttttaagtgtcagcaagttcaaagtagtgagataacgttcaacaaataaattttttttcctgtgcatgttttggaagagtaatggattactgaattatatatgttttatcacataaagtaactttagagattattgagaatatcctcattttacaagataatatggtggaaagagcaaggtctttggagttagaggaaagttcagtgtatcagatatgccatttattagctgtgtgatttggggcaagtttcctaacccctttgaattttagtttactctaagaaagggctaataaattctgtttcattttatctgcataacagatcttagtagacattatatgcaaaacacctaccacagggcctgacacatattaggaaacctagttccagagaggaaatgtgacctgctttaaggtcatatggctaaaagaagacctgtattttgaaaagagggggaaatgtttttagtttctttttttttacattgaggctatgataaattccttttccagaagtggatagttgatgcagctttcatggctaatattcttttttaagaataaaaattcagtgagtcagtatacaagaattgcagtttttaaataagcgtttacgtctgctctgtggtgaattgctatgcttgtagactacaaattgttatataataataacttgtgctttatggtctactaaatgctttcacaaacttacttcatttggttcttacaaccttagtttttgaatgctactttctaaagctttttacattcttgattcagggaaaaacaaattactaaggaggtagttatcattttgatgttcttcccctaaagctatttcgcttctggttaggtttctgtgtttccaagacccttctctcagtttagataatgtttcaatctttgtgtgtatgtgggtgtgtgtgtgtttaggaaatttctgggagtaggtttttgtttttagatgaaaatttgtttctaatatcaggcagtcatttgggttttttgtttgttttattccctttcatgtttaatacttagttcatttttgcattaaagattgaatttggacctttctgatattgaaagcattacataatttccatcatcttcttcatttgcatacattaaaccagtgttacacaatccagggtgaaccatgaacacttattagctatttgtcaacttagattacacttccagttcaattgtaagataaacagaggaagatgaccagaaacaaaaactattttatgttgcttccaatattttatattgtatgagaatattaccttctaaattaagaaaatcatgtatttctcaatgtaattgaattgtattatatcaatataattagaaactgtaaaaaaaataataattcaactacaggccaaatatgcagccatttagtagatacatatttctaagacattagctgatcttgcatttctaatattgtaactcagtagtattagtttggcacatcttagattcaattcaattcagtcaaattaggtaaggtctcagcctcagaaatctgcctaggtactttttaaacatcatttagtgtttaccatctagaactggctgtagagaatgttggaataaaagaggggatgggttgcaagaagtgttacacagggtagtatagtggaaagtgttctggactgaaaaagaaaatttagatgctgtactgattctgccataatatatttttgtaactttgaggaagtcaccacatttttctgggcctgtggttactcatgtaaactgactgaacaagatcatttaaggtcttttccagttctaaaatgaaaacacattcatgttttccagtatttaactgttttctatagtaagcttagcagttctttaaagactgatcatggtctcctatagaattcagttggtgaccaactaatcctgggttgacagggcaaatgatatcccattgtacagatattgacaagcagtcatagagtttgacttgccagaagccgcatgcctaagtaaatggtaaagctgggaattgaatatgagacttctcacttgtgagtcagttgccctttccactggatttacagtgtcactcagtactttctgaagtactctataaccaaacctaatatgggaaaggggaaacaaaatactgatttcctttttagtgtagttggtcctgagcatttaatgaacattctcatctgtgcgtaatactctgaggtactataaaagataaatagggcttggtgcggtggctcacacctgtaatccgagcactttggagggccagtgcgggcagatcacttgaagccaggagttcaagaccaccctggccaacacggagaaaccccgtcactactgaaagtacaaaaattagctgggtgtggtggcacaggcctgtaatcccagctacttgagtggctgaggcatgagaatcgtttgaacccaggaggcagaggttgcagtgagctgagatcatgccaccgcaccctagcctggacaacagagggagactctgtctcaaaaaaaaaaaaaaaaaaaagatgatagaagaatcctaggattacctccttaaaatgtctgacttagtatgatatcagactggagtaaacacagaacagttaactatagaccacaaatttaaaactgaatatagtgtaaattaaacacttaagccataatttgaaaatagagttaatcacagaaggttccattgagtagggacaagtttaaaactaggttttgaataaagtgaccatcgtgggttgggaaagtcactaagatgaattttctttgtagttgttcctctgcctaaagcgctgttcccccataacttaagatgactgactcctcaccagtcaagtcccacctcaaatgttattaacacttccttagagaagcattccctgaacaacctagatcttttgtcatttctattatctttcatggtacttaccagtaactgaaattgtgtctctccttcagcaaaatgtaaggcgctttattcacttttgtaaccccaatgcctagaacctagaaggttctctatacatatttgttcaatgagtacatgaaagtatcacagcataatcataagaattaaatgcccatcttgttctcttatattacatgtgataaaataggagctgagttatgcgatttggctaaggcaacacgttagaaatgagatccgagtcttgttttaatgtcgactctattatagttagcagatacttttgtttagcagggataaaaaatgctgtaaagggccagatgctatgagtaagccacgtatggtaggtctttactacagagtgctaaaaagacactatttacaatggttgcttttgaaaagggagacccataatgctgacctcaactatagtgtaggaacaaagctatagtattggacacataaaattactgcagcatttgtatatattcttcagctttgttaaggagacacacaaaagttttgttttaaaagctaaaatatgctacaaagaggagatatagatagaacttaaacagttatatgtactttgtaggtttaagttataaatatatggggaattggtattagagaaaaacctaatttatagtggtctaaacaaactgagtacatagatttgttagtcactatttaattatggatacctaaaataatcaatacattctttcatgtgaaagtgaccactgatttcagtagaaatctggaattactatagttaagaggtagctacagagataatttttgcattgtacacgtgtagcttaaaagatagcatgagcatattatttgaaataaaagcctagaaaatgggtgagatgtactgtggcaggtattaaaagactgcatgaaacattcagaagaaagtttgaataatcaaagctttacttttatgttatcaaatccatcttgtcagcagatggcagttccactctgccacagtttattaatagatattgaagttctaacatagttggaggctccaagtcctaactaataaatgtatgatctatgcttgttctgtcttgttccgcatttccagccagaacaatgccagcatcaccaggggtccattcagatagttcatagaacagggccaaatgaaactgacagctgtagtcactgaactaaaaataacatgaattcagaacaattaaaagaattatttaataataaattaagagcacaaaggcatacatccttttccatttaggttaggtgtgtgtttggttgttttctttaacatgacttgtctgaaggaatggagtcatcttacatcataaagaaattaatttttaaaggaatttctttaaaaataacacacaaacacacaaaacctgatttttgtttttgtgcctttcaatagtagttgcatggaaatgttctatataccatctcatattcttctgtattttttattaagaaattaaatttaaatctacttaattgtatgagactaaagttgtagacccaaaacaaagaggtttcaaccatagggggagaaatgcttatcataaagtaattaatcaaaaacattttgatttagaaaacattcataaatttagaaggaaatatttccaaattgacctcccttttaaaaccaaagtcctttttgcattcctctgttttttacaaatgaaggattatgaagaatatctgaaatatttatttgtatgtcaccattttagttggatgtgtgtgatggggaaatacttgtaacttgatatgttctcttttttactcttgatgaaaattcatctttggggaaaaaacagtcatttaaaataatgttgggctaggtacggtggctcacacctgtaatcccaacactttgggaggccaaggtgggagattgtatgaggccaggagtttgagacgagtctgggcaacatagtgagaccctgtctctataaaaaattttaaaaaacaaaaaacctaattgttaattacagtgtgtcaaataaactgtattattcagaaaagaatacggttcagaaagcacgtttgatttgtgaacttggactagaaatttggtagtaaataaaaagtggccttctttcagtggtttacaacttgaatattaagttttttcattgtttacctcagttgccagtatgtctcaagagtggccatctatgccactttttttctgttgatctaccatatgtcaagaaaaatatcaaatttgctttctgtagtttgtaacattggctcattccttatctaataatgtacataatctccttatgtgtttttaggcttggcctttgcagtccagacatactattattctacatctgatcttctccacgattttatgttcttgattaatacaataaggaaatttgttaccaagatatttgcatttgaaacattttcttagaaatatgtgatatattttttaaaaatctatacacatgtaagattttccccagtcagtggagtgctgttttacatagcctgagaggtggagtgcagacagtaatgaactttcttaaccagcgtttcctgttggagcggtggtgtccacaattttttgtttgtctgtctcccactggtaaaacaaaacactttctattttgtatactcagttttcagtgtgtatgtatgaagtcggtatttttaaacaatgggagatgaaaggtttcatactatcatttgatcatggctcaagttgcaataagtactttctaaataaaacctttctaaaatgtgagaattgacttaattaaaatgagataatatctgtaaatctacttaactaaggtcaagtaaactacaatatacacaagtgagggactgataatggagtcagtatttgacatattgaacttaataagcctgtaggaccccttagtctcaaaggcagttttaaatatatcttgagcttgggcaaaaaacctggatgggagagatttgagagtatgaatccatgagattagagaacagattcagaaacaaaagggccaaggacagaaccctggaaagtagcaacatctaaggtttggacagaggaaggaagaatcagtgaaggaggctaaaatagaactcttaagcagagacaggcagagaagggattgttgacagccatctttggagactgccataagccctttatacacaagccttctattaacccaacttcactcttttcttaaaggagattagggctttttaaaacccccttctaaacagctaaaatctgattcgaatataatcttttgaaaagttaattgttgttagttatcatacttgctgcctttgagtagcatttttctctgtaccaggcactggaccaaatcctggcaggcctctgttttgttggcaccatgaaacatacctgaaagctgactctgatttactaattacatgatccttgaataggtaacttcagttcttggagccttggttttcttctctctaaggtaggaataaaaaatcctatatattcatgggtttatggtgacactcaaactccatcatatttgtaagaaagagctttacaagttgtaatatattgttaaatataaggttgcattatcgttatacagataataaaattgcatttctttaaaatgttatttcttgaagaaaggaatgagaagtatattggaatgccctgggaagctttttttatgctacgtagcaccttctgccacctctaattcccattcagacttctcccttagagagctaatatcagaatggggggaaggagagcaaaatataccaggaaacaactttatccattgtatatatcatctgattattctatcttctactcttatggatatatgcttatactcttttttgtttaaagcacaaaactcctgtctctggccaggtgcagtggttcacgcctgtaatcccagcactttggaaggccaacccaggcagatcgcctgagctcaggagttcaagaccagcctggacaagatggcaaaaccccgactctactaaaaatacaaaaattagctgggtgtggtggcacaagcctgtaatcccagctactttggggtggctgaggcaggagaatcacttcagccagagaggcagaggctgcagtgagctgagatcgcgccactgcactccagcatgggcaacagagtgagaccctgtctcaaaaaaacaaacaaaacaaaacaaaacaaactcctgtcctcctgccggtatttcttacttgtttttaaaagttaagaaatgtaactatttttctataaactactgtttaattatgagtcattcctcttttcaactcagtagagaaaagcatttaatcttgccacaacaaggataatttccatgtaatacttacctcttttatgtatctttgtactcagaaatttcaagattaattcggttatttcaaaattcagtcttcccccataaggattttccttttccctttctcctgcccaagatgacatatgggtgctgtggaaagcttccacaaataatataaacagcaagggagagctctctggtctgtgtgatggcttccactgaaatatcttgccttattatctgttgttaatggattagccttgaatgcagtgattttcaaacattgaaactacctggagggcttggtaaaacatggattgcttggccttaccgtcagactctataattctgggttgcaccctgagaatttatatttctaataaatatccaggtgatgttgatactgctgaaccggagaccacacttttagagccactggcatatgctttcactgtccttatatctgctttccttctggaacgtctttttcttttggcttctctgactctctcctagtttgcctgctaccatattgactgttccttcctgttccttgcccattccttctcctctcttgtgatctaaatgttgaactgcttcaaagctcagttcctctactccactatctccatattatttttggttacctcttccaactgattgactagaaaaactgactacatgctaatgactcccaagtttgtatctctttgtctgacttctccatagatcctctcactcacgtttctaccttcttacttgatatctcctcttggatatccagtaggcatcttaaacttcatatgactaaaaccaaactctgagttattaaaaaaaaatctgcatcattcttatccctcagtaaactgttgtccagtctaggtgttttccttgattcagctcttttcctctacacctgtcctgcctggatgcagagcatcagcaaaccctattgactctacttctaaaacatttcccagatctgcccagtttctgcactaccattgaccttgccctcgtagctattgttgcttgtttggactgctgtaatggcttcctaatgggtctctatttacatatcctagcttccctacaatcctttctttaagagctataatgattttgtttaatgtcacataccatccttacttccttgaattttttcagttccttcacattgcacttagactgaaattcaaactcctttttatggtaggtagagccgttcaggatccaacctctgcctgtccctccagccttaccttacaatcactcttcccttcctccactatacaccagccacaccaaacactcccaagtatttctctaaatcatcactaaaatgtcacctttctcagtgaggccttgagtgattaccttgtctaaaattggagtgaggcagagtgcatacatgtgtgtatacacacacaattatactccttttcttcttagcacacaactcccttcctttttatttgtctttttccacaagaatataaacaatgagaacaaggattttgatttggtttgttcactcttgtatcatcagtgcctaaaatagcgcatagcccttagattgggctcacatattggagtaaataaggtagtgaggtttttcttttcccttagggcaaagctttatattagttgtttcttctgtgtgtgtgtgtgtgtgtgtgtgtgtgtgtgtgtgtgtgtgtgtgtgtgtgacagagtctagctctgttgcccaggctggagttcagtggcgcgatctcggctcactgcaacctcggcctctcaggttcacgccattctcctgcctcagcctccccagtagctgggattacaggtgcctgccaccacgccccgttaattttttgtatttttagtagagatggggtttcaccgtgttagccaggatggtctcaatctcctgacctcgtgatccgcctgcctcagcctcccaaagtgctgggattggtgccttgtgtcatccaaatgtcagattcgtaacctctttatatggccttttcaaactgcccagcctggagctgccactagtctcttggtcatagcatcctattttttgttgttgtcgttgttctatgtggcatttttttaaagtctgatttttttcttactcatcttttgtttgtatatcgattttcttttctcctcccctcccttcacatacgctagaaagtacatttgtgtagatcagagcctttgtcttatttctttctgtatttctgatgtcccaaacagtagctggatgtagtacacactaaagaaatattggtttaaggagtaaacaaacgaagttcattattctttcaacatcaagcctcacttgcatcctttgaaggcagaagacctaacccagttctccctgcttgctgaccaggccttccccttggctttcattaatcctctgaaacccagctgtgttcttcattaagtatttgagctagctaccatcccacagacctctaatgtaggtcccaacactctgccctaccgcagcctccttcctgcaatcagaagactccttacttctcagttagcttgctttttgcttcacaagagcttttctttatcccttacgtgttctactggggctgagggaacccgggttagggcctcccttggtctgtcttccttgccacaatccttactcctttgaagcttctggtgtttgcagagcacatgctgtgaggatgcctgctcttagggatctaagtgagaagagaagggtatgagtcttttttgctgttgaatccctaccctaaccctatcctgaaaagggggagggaggagtttattagccttcatcattagcccttacctttggctctcttcagctggtaagtgtttaaaagtttttaagtactattatttagtcttaaatttcttctctaccgcactttcattccatgaaggcaggggtccattctttatatatattttttcttctcatccccagtgtatctacctttatgctatttttaaaaatgggaagtcatttttgatacacacaaacttaattctttaagtattgactgtgcttataatctcactcctttgaattcacagcagttattatttctatcctgtatttcaggtcagtacaaccttggacatcttcacctttctttattataactttagatcctgtcatttcactgtgcatgtgaaatatctcgtggccctaataagaatggaggcttcttaagcccatgggctcatcttacaggaatgtgcctgttttgtatttcagggtgttctagaaaattgctttcttgagcaaaaaggagaaagtttttcatgtcctcatttgaccacattttgttcccatggctttaagttgaaagctcagaatcagctctactctcatcactaggtggcacttgtgaattacaaatagtcaaatgaatttttatgacaaacatgtgattcacaaatatagataatgtttggaatccctgcatggacgttcctcaaaatggaagaaatgaaagaaggggattcctagtaagtaccagttgctgtgatgtatttataaatacatggttgaagaataaattacttcataatcatttcgtatttaatagtaatatcaataggtaaagtctggtctccatgcctgtgttcttaaactaatgttgccacaaagttgaaatttttttaggacctgcttgctattcatcttagttaattgcaagagaagtgagtactacaggtcaggtgcagtggctcacacctgtaatcccagcactttgggaggctgaggcagggcgattacttgagttcagggattcaggaccaacctgggcaacatagtgggatcccatctctacccaaaagaaaaaagaaagaaaagaaatgagtactacagccctttacactgattcatacccaattccaagcacttactgttctttgtagtatttgaggaaatacctggttttaacttacgaatcctgtagatattcatgaaggaaaatgtcagcacttctattttactgctgagaaaacagaaactcaaacttgtccaccattaagagataataggtagacagagccctacattcaaactcaagtctgttggatttcagagcctgggtgtgctctttcatttattctaatggtaccaggtagccagtaccctctattcacaataaagtaactgaatggcaagtacaaatgtctgatgagaattgtgaaggagaacaagaacctaaaccacagaacactgagtgcccagggctaggacgagtgaaatgggaagtcaacaaaacaaagactagctaccagagaagttggcctactttgaaattttgcctagaggcagccccatttcctttaagccactgatgaacagaagctgaatatagagtatgttcatcattaggtgctctaggcttcaaattctggcttctctgaatattttctgaccatccaatcttgggcaagttacaaccatgtgactccatttgcctcccttttaaatggaagaggattaaatgtgttaatgtatgagaagcacatagaatagtacctggcacatagtaaacattcaataaatgttaaccatttgagtagctttagacattgaacaacatggtaaatgttcattctgccttattgatacatgaagtggaatttaagctatggctagagtggtcatacacatcgcagtttacaactagtgtcctaatattattattattaatgccctttttttgatctccaaagtgccctcagttagataataactcatttgatcaacctagttatagtcaactttgttatagaagagttttgtgccaggaatttgttcatgtaagtctaaagtaaaagttcctccaagggaagatactaacttctacttcccgacatggggctttatatatgttacaaattaggactggtaacattcccgtgttagactacctggcatcagactgcactttaacacttgctagctatatagccttgggcaagttttacttctttaaagctaggcacttcaactgtaaaatgaggacagcattagtaccttcctctaggcctgtgtaaatgaggtaatgtatataaagcattagttaagtgcctgctgcatagaaagtacatataaatatggttaagagatgcagattttttgctaaagaaaaaggccttgatacaaagtgcttaggttcattggaagctgagagattggagtaggtggtgcttaactaaggtcctttcacaatgataaaatctaatgattttattctaacaagtatcaaaagctatttttgttttctttttttatattatgaaaaatgtcaaatatttgtaaaaataggactccatgagagagcaatgaacccatgcagtattcatcagttggcttcaacaatagtatgatacatgtctgatctttatttttatgacttttgaaaaataactgtaatgagatctattttacacatcataaaattcacccatttgaagtgtacaatttggtgggttttgcaaatttaccaggttgtcagccaccaccataaattaggtttttggttttttttttttaataatttcatcactttgtcaggataccagctactcatttactgttaattctaattttcaccctcggacccaggtatctatctatagatttgccttttctgaacattttgtataaatggaatcatacaatatgtggtctctggtgtctgacttctttgacttagcataatgtttttggagttcatatcgtaagtaacatatatcaatagtttttcttgcggaataaaattccatggaataaataatactatattttgtctgtccttcatagccggtcttttaacatctatatttatatcgtttctcctccattccctatccctgttgaattattcaaaggctatttttaatttcttaaatatgatagctgaaaatatttattatatgttcctgctttttgtttttccatatcatcttctgtcttctcattcatcttgtctgttttagtttttttttctccatttaacaaatcactttactttgttcctccatgtgtcttttttggttttacttgagaatgaaagggtgtacagatcataaactttcaaagatagagacaagcatgcatttaattatcttctcactttaacaaaaattcatacttgttcagtggcaaatccagatactgttgatttccatgttttttttttttttaatttaaagtcttaaagattgactttagttttttatattgggctgatctatttgattccgattcttgtggtgttttttgtttgttttttgtttgtttgtttaactcaggttgttggaagaggagcctttggagttgtttgcaaagctaagtggagagcaaaagatgttgctattaaacaaatagaaagtgaatctgagaggaaagcgtttattgtagaggtaagttgagatttcatttcttttgtgtagttctgcacttaagatactctgtgaatttaatattatgaaaaagattggtttctcagatgtcatttctttgtatacatgaacatcagcaattcggtttaatcaaaggtactgccataggaacattttctcgttcatactcttaattctgattaaaaattaggggaaaagcgacttaactacataaatgaattcacccctgaattaaaacagtttcatccatggaattcagatctatttcaaggcgtaatattttaattttaaaatagaaaagaaatggtatgctttcccattatctaaaattaagaaattttatacacttactttaaatggaatgtttttagaaactcagattattttaaagaaaaattatttcaaatttgatttttctcatttagcatgaaaatttgcacctattcttttagaaatagattagattgaatgatgaaagaaaatccaataatcatgaaattagcatattatcaaatttatcctttactaactttgttattttgtattttggatcacattatttagttaaatcaatgtttttatcactattaaacctcattggccaatggataagtggcctgtaccttataagccttctgaatttatatctctgttttttcatttaatcataatttcaaaatatacttcatatttttaatgtataacatggaaaaatgaggacttaattgtgatatgagaaagtgatttgtaagtggctgaatgagttgagaaatgctgataagtgatttgatgtcagcatgaagaaagatgatttctagtaatatgttctaggagtctagcctcagctttgttttatgcaatatttttattacagtttagataaagctattgatcatttcctgttacattagcagtttcacaaagctgggtgaaatagcatatgtgttaaacattaggaatcacaagtcaaaaagatcgtaatagcgtgaagaaaattttttaaatccagatgagatgtgcatgtaatgtaaaaaatcaaatggttctccaaaaattcttagtaaaaaagacttcagtctcctgtacctcctccaatctaattttctgcttcccaaagacaactactttgagctcattccttcatgtttggtgtccccagtccagatgctgtttattaccccttctctaaagaatcaacctctagtcttctgctgggatgataagagatagtcattgagctgtttgaagtcaaggaaggaatctttgagtcttttacactgtcccctgccctatcctttgattagctcatttgcataggtacctcattctgctgccactccccaaccttttggaagctttgtgagataaatctggttgtttctccatttttctcattgccagtttatgatgcagctcttctaggtctgctctatcagttattgctagtcatttgctttccagcttccaaaaatgtatgctgtttgtgcactttgcattctcttcatccttctgaggttatgccttaaaatttttcaaatctttaccatcttagtgggaattagggagagaggaggaaaaaatgcttgtataatctgctatctgaatctcagtgctgaaccttagcaagatgaaatatagtaaatatattttcatatagtaaataaatataataaatagtgatactaattctattggacgaaaaatccacacatgttggctctagatagatagagctttttattagcatacagtatgaaggtttagagacattagtgtactgaatatgagccagcagcataatgtatgtaatagagaagaggaagaagagtggaaaaagggcagaaaagagaggagaagggagaaaagaatgagcaagaagcagtttgctgtggagcgggatgcattaatagaaagaagtttgaagacagacatgatggttcacatctgtaatcccagaactttgggaatggcagatgggttgcttgagcccaggagtttgagatcagtctggacaacatggcaaaaccccatctctacaaaaaatacaaaaattaaccaggcatggtggctgtgcacctgtagtcccagctactccagaggctgaggtaggattgcatgagtccaggaggcagaggttgcagtgacccaagattgtaccactgcactgcagcatgggtaacagagcaaaacctgtctcaaaagaaagaaagaaagaaagaagtttgagatctagaataagagaagtgagtatagccaaacccctcattgacctctgtatggatcattggatcagggatgattaaaactgaaagagggaaaccagctagtaggctataatgatcactgcagcagttcaggttgggattactaaggcaatggcagtgggaatggagaggagagaattaattcaagaaatgagaaatggaatggaggcaagtatacagagggagtgcacattttaagtcagatagactaaagttcacaccccacttcttagctatagaacaggtcattcaaccctctctgagacttgaggttaaaatctcatctttaaaatggaaatgataatacctaccttgcggagttgtgataattatacaatatctataaagtgcacattagggccccacgcagagtagctagactgttcaactatagctatgaagatgataacaatgatagcatgacgtctggtttggataatgcagctcagtaccatctctgggatcatatcctaacatttcttggcagagttcatctcttcttattctatatactcatcgtgccttgttcataactcctgttatagcactttgcacattgatttaattatttgtttagatgtctatctctccagctaaactgtatgagctggagaacagggattctgtgccattctgggcagtcacttggtattttcagtgactatgattgcaatgcctgttacatagtaaatagtgattgttgaatgatttaaacaaatgttttgtacaacagtaagattttaatgatactgtgaaatcagtacttcaaaagttatcactttttaaaagaaaccttaatttcttaacagcttcggcagttatcccgtgtgaaccatcctaatattgtaaagctttatggagcctgcttgaatccagtaagtttgttactttttcatggtcacctgtgagaaatgacatggcagatgtgtgtgtgtagtttatgtagctatttttgggtttttttgttttttttaagtttttcaaaaatattatattttttcaagataaaaaggtacctccaatactttaaaatatcagcagtgatcccaatagttcaaggactatatgagtacatgtggctattatacacgcacaatatgtcaccaacacactctaaatagtgagaatacagcaccgtggcattgctcccatattattatttttttctttctctttatgtatttattgagttacttacttgtttttgatatctttttttattatactttaagttctaggttacatgtgcacaacgtgcaggtttgttacgtatgtatacatttgccatgttggtgtgctgcacccattaactcgtcatttacattaggtatttctcctaatgcttatccctcccacctctccccaccccacaacaggacccagtgtgtgatgttccccttcctgtgtccaagtgttctcattgttcagttcccatctatgagtgagaacatgtggtgtttggttttctgtccttgcaatagtttgctcagaataatggtttccagcttcatccatgtccctacaaaggacatgaactcatccttttttatggctgcatagtattccatggtgtatatgtgccacaatttcttaatccagtctatcattgatggacatttgggttggttccaagtctttgctattgtgaatagtgccacagtaaacatacgtgtccatgtgtctttatagcagcatgatttataatcctttgggtatatacccagtagtgggatggctgagtcaaatggtatttctactctagatccttgaggaattgccacactgtcttccacaatggctgaactagtttacagtcccaccaacggtgtaaaagtgttcctatttctccacatcctctccagcacctgttgtttcctgactttttaatggtcaccattctaactggtgtgagatggtatctcattgtggttttgatttacatttttctgatggccagtgatgatgagcattttttcatgtgtcttttggctgcataaacatcttcttttgagaagtgtctgttcatatcctttgcccactttttgatggggttgtttgattttttcttgtaaatttgtttaagttctttgtagattctggatattagccctttgtcagatgcgtagattgcaaaaattttctcccattctgtaggttgcgtgttcactctgatgatagtttcttttgctgtgcagaagctcgttagtttaattagatcccatttgtcaattttggcttttgttgccattgcttttggtgttttagtcctgaagtccttgcccatgcctatgtcctgaatggtattgcctaggttttcttctagggtttttatggttttaggtctaacatttaagtctttaatccatcttgaattaatttttgtataaggtataaggaagggatccagtttcagctttctacataaggctagccagttttcccagcaccatttattaaatggggaatcctttccccatttcttgtttttgtcaggtttgtcaaagatcagatggttgtagatgtatggtattatttctgagggctctgttctgttccattggtctatatctctgttttggtaccagtaccgtgctgttttggttactgtagccttgtagtatagtttgaagtcaggtagcgtgatgcctccagctttgttcttttggcttaggattgtcttggcaatgtgggctcttttttggttccatatgaactttaaagtaattttttccaattctgtgaagaaagtcattggtagcttgatggggatggcattgaatctataaattaccttgggcagtatgaccattttcacgatattgattcttcctatccatgagcatggaatgttcttccatttatttgtgtcttcttttattccaatgagcagtggtttgtagttctccttgaagaggtccttcacatcccttgtaagttggattcctaggtattttattctctttgaagcaattgtgaatgggagttcactcatgatttggctctctgtttgtctgttattagtgtataggaatgcttgtgatttttgcacattaattttgtatcctgagactttgctgaagttgcttatcagcttaaggagattttgggctgagacaatggggttttctaaatatacaatgatgtcatctgcaaacggacaatttgacttcctcttttcctaattgaataccctttatttctttctcctgtctgattgccctggccagaacttccaacactatgttgaataggagtggtgagtgagggcatccttgtcttgtgccagttttcaaagagaatgcttccagtttttgtctattcaggatgatattggctgtgggtttgtcataaatagctcttattattttgagatacgtcccatcagtacctagtttattgagagtttttagcatgaagggctgttgaattttgtcaaagcccttttctgcatctattgagataattatgtggtttttgtcattggttctgtttatatgatggattatgtctattgatatgtgtatgttgaaccagccttgcaacccagggatgaggccaacttgatcgtggtggataagctttttgatgggctgctggattcggtttgccagtattttattgaggatttttgcatcgatgttcatcagggatattggtctaaaactctctttttttgttgtttttatgccaggctttggtatcagaatgatgctggcctcataaaatgagttagggaggattccctctttttctatcgattggaatagtttcagaaggaatggtaccagctcctctttgtacctctggtagaattcggctgtgaatccatctggtcctggactttttttgtttggtaggctattcattattgcctcaatttcagagcctgttattggtctattcagggattcaacttcttcctggtttagtcttgggagggtgtatgtgtccagtaatttatccatttcttctagattttgtagtttattttcatagaggtgtttatagtattctctgatggtagtttgtatttctgtaaaattggtggtgatatccccattatcattttttatcgtgtctatttgattcttctctcttttcttctttattagtcttgctagtggtctatcagttttgctgatcttttcaaaaaaccagctcctggattcattgattttttttttgaagggtttgttgtgtctctgtctccttcagttctgctccgatcttagttatttcttgccttctgccaacttttgaatgtgtttgctcttgcttctctagttcttttaattgtgatgttagggtgtcaattttagatctttcctgctttctcttgtgggcatttagtgctataaatttccctctacacactgctttaaatgtgtcccagagattctggtatgttgtgtctttcttctcattggtttcaaagaacatctttatttctgccttcatttcgttacgtacccagtagtccattgttcagtttccatgtagttgagtggttttgagtgagtttcttaatcctgagtctagtttgattccactgtggtcagagagacagtttgttgtaatttctgttcttttacatttgctgaggagtgttttacttgcaactatgtggtcaattttggaataagtgcaatgtggtgctgagaagaatgtgtattctgttgatttgggatggagagttctatagatgtctattaggtccacttggtgcagagctgagttcaattcgtggatatccttgttaactttctgtctcgttaatttgtctaacattgacagtggggtgttaaagcctcccaatattattgtatgggagtctaagtctctttgtaggtctctaaggacttgctttatgaatctgggtgctcctgtattgggtgcatatatatttaggatagttagctcttcttgttgaattgatccctttaccattatgtaatggccttctttgtctcttttgatctttgttggtttaaagtctgttttatcagagactaggattgcaacccctgccttttttttgttttccatttgcttggtagatcttcctccatccctttattttgagcctatgtgtgtctctgcccgtgagatgagtctcctgaatacagcacacttactggtcttgactctctatccaatttgccagtctgtgtctttcatttggagcatttagcccatttacatttaaggtgaatattgttatgtgtgaatttgatcctgtcattatgatgttagctggttattttgcttgttagttgatgcagtttcttcctggcatcaatggtctttacaatttggcatgtttttgcaatggctggtaccggttgttcctttccatgtttagtgcttccttcaggagctcttgttcagcaggcctggtagtgacaaaatctgtcagcatttgtttgtctgtaaaggattttatttctccctcacctatgaagcttagtttggctggatatgaaattctgggttgaaaattcttttctttaagaatgttgactattggcccccactctcttctggcttatagagtttctgctgagagatccactgttagtctgatgggcttccctttgtgggtaacccgacctttctctctggctgcccttaacattttttccttcatttcaactttggtgaatctgacgattatgtatcttggagttgctcttctcgaggagtatctttgtggcgttctctgtatttcctgaatttgaatgttggcctgcgttgctaggttggggaagttctcctggattatcctgaagagggttttccaacttggttccattctctccatcactttcaggtacactaatgagatgtagatttggtcttttcacatagtcccatatttcttggagtctttgtttctttttactcttttttctctaaacttctcttcttgcttcatttcattcatttgatcttcaatcactgataccctttcttccacttgatcaaatcagctactgaagcttgtgcatgtgtcacgtagttcttgtgccatggttttcagctccatcaggtcatttaaggtcttctctatgctgtttattctagttagccattcagctaatctcttttcaaggtatttagcttgtttgtgatgggttcaaacatcctcctttcgcttggagaagtttgttattaccgattgtctgaagccttcttctctcaactcatcaaagtcattctccatccagctttgttccgttgctggcaaggagctttggaggagaagaggtgctctgatttttagaattttcagcttttctgctctggtttctccccatttttgtggtttttatctacctttggtctttgatgatggtgacatacagatggggttttgatgtggatgtcctttctgtttattagttttccttctaacagtcaggacctcagctgcaggtttgttggagtttgctggaggtccactccagaccgtgtttgtctgggtatcatcagcagaggctgcagaacagcaaatactgcagaacagcaaatgttgctgcttgatccttcctctggaagcttcgtctcagaggggcacctggctgtatgaggtgtcaatctgcccctactggaaggtgtctcccagttaggctactcaggggtcagggacccacttgagaaggcagtctgtccgttctcagatctcaaactccatgctgggagaatcactgctctcttcaaagctgtcagacagggatgtttaagtctgcagaagtttctgctgccttttgttcagctatgccctgcccccagaggtggagtctacagaggcgggcaggcctccttgagctgtggtgggctccacccagttcgaacttcctggctgctttgtttacctactcaagcctcagcaatggtagacgcccctctcccagcgtcgctgccgccttgcagttggatctcagactgctgtgctagcagtgagtgaggcaccgtgggcatgggaccctccgagccaggtgcaggatataatctcctggtgtggtgtttgctaagaccgttggaaaagcacagtgttagggtgggagtgttccaattttccaggtaccatctgtcacagcttcccttgtctaggaaagtgaattccccaaccccttgtgcttcccgggtgaggcgacgccctgccctgcttcgactcacactccatgggctgcacccactgtctgacaagccccagtgagatgaaccctgtacctcagttggaaatgcagaaatcacctatcttctgcgtcgcttacgctggtagctgtagactggagcttttcctatttggccatcttggaacctcctatgtagctattttgatctgctatcttagatgtatttctgaaagaacagttatagtttgttcatttgacttgtttctagtcttttagcaaaactgtatcggaagagttcttttaggtgattttgtccaataacctcatcttcttatgaggcttttgatgtcctgtggcagcacctacttactggcactggagaaagtccccagaatatcctgtgattgtattttacatacatcttcactgttagtggactcctagaagacagtcttagtcttaggtcatagataccttttccttccctagtactattcacatagtaggggccaaaagaatgatttttaatatatctataaaatcaggggagtgaattaaattctctctcaaaggccctaagatgatggagcttcttggttaatgcttctgatatatgtttcctttaggtgtgtcttgtgatggaatatgctgaagggggctctttatataatggtgagtgtcattagacctgtctttatctagtggattaaaataatttgaaaaattttaatataaaccctaagttgtttaacattcttcacaatttgccgtcagagtcccaaaagggcataatttttaaaaatctgctaagaataaaaatggaaagataagattctataacattagtatgtgaaatttagaggtctatcaattttttaagtagatggtactttgcatttcattaaaagcatttaagtaaaagtttactttttaaatagattttaaaatatcttcagatttttttctttttgccctctcataactttgagcctcctcattttagaattctttaaccatatttcgatttcactctgctttattttttcttttttttcaaaaaaaaatgtgaaaactcacttcacacaaccttttatttgtagtaatgaaaaaaaactttgtgtagttacattggagaacagagttcttttaccctaaaaataccaaccatatgcagaaatgtattgtctcttgtagcaccagttatataaaacaaattgttacattttattttttaattagtattattttatgtaaacttttacttatatttactgcccatgtgttcatcattgtgatggatatctaataccccattgtcttatttgattgaactacttctggtttttagccattacagaaaatacaggtgcaaacatcttgatatacattgttttgtttctttctgtactgttctctgcctctctcttgtagtagtgtgccataagactgctcataatttatattactttataaaagtctttatctgtttgaaaaaatgtggtaatgtatattgattttacttcaatgtaggaataacatttaatagatgtactattaaatgttaatatcatggcaattatccactcaaaattagtagatattttcatcctttttatttagaagaaaaattaaaaggccaggcatggtggctcactcctgtaatcccagcactttgggaggccaaggcaggcagatcatgaggtcaagagatcaagaccatcctggccaacatggtgataccctatctctactaaaaatacaaaaattagctgggcgtggtggcacacgcctgtagtcccagctactcgggaggctgagccaggagaatcgcttgaacccaggaggtggagtttacagtgagccaagatcgcaccactgcactccagcctggcgacaaagtgagagtccgtctcaaaaaacaaaaagaaaaaagaaagtaaaaaattaaaagcaggactgatggagcatatgtatatgtagaaaaatacccagtcatgtgttctgatagtgcttgcattcacattgtgtcttttgttatatgcaataaagttctttttagtttgtgcctttctttcgcagtgctgcatggtgctgaaccattgccatattatactgctgcccacgcaatgagttggtgtttacagtgttcccaaggagtggcttatcttcacagcatgcaacccaaagcgctaattcacagggacctgaaaccaccaaagtaagttataataatgtgacacccctcagcctcttcctccttctctctcactctcaccaccccgaacccactctctaattcaagctcattattgtacaggagtttctcttttctctatttggcttactcagtgtttacttttaactcaccttcatcatttagtcatttatctaagcttgtattttagatgttgtctttagtgggatttttatttttggtaacctctaccttagattagcatacttctagaatctgttagcctataaaaatctcattttgtgcctgcagtatataatgttgctgttagacaattccttgggggcagagataggtctgacgtttttcttgctgtgtccctaacacctagcacataaacattctacagaaatttgcagagttgttattacttgctctttcagaggaaagtaaaagggcatttcttggcatctgggtagaaattgaaaatattctggattcttcataatgtgaatacttgggactttaaaaaacttataaattccttagataagtattttaaaagactaaaactttgggggttttgtttgtataggtattcagttaaagaaaacatacacataaaacatattgtttccttttctctctttttttttcttttatgcacctgtgacacagtaaaaatagtctccacgtatcttctttaccctccccccaagctcccaccccagcacattagtctttacagaagaggtttcccttaggaaatcagtatagtcttcagttattccattctcttgatactggttaaagcattaaaacatcccttctgggtgcaacttgtcactctcaggtctaatctgatatactctacataggttccaactcttagaatcactgttcttgctatgtatcttatctctactcccaaacttaaactgatttctgtttccccaggtcactgataaaataatgtttaagcttttatttttcctgaggctattatcttagttacctgccttaactaatgaaaaaatcacttagcctttttttcttcattgtgaatattcagtcatcctttttccactatattaacagagttgaattattaaagcaaacttatgagaatcacagctcttaaccagcaacaaattgacaaatgatccaaaggatataggcaagcatcagatacagccaaagcattcttttcctaaaagagtctgaacgcatctgatgcaacacccaaaagtatcccttttctcctcgttacagtatgttttggctttggaataaatgattagttattgaacaatatatggagaaatatcttacaaaaggaagtcatttccattttctaacatcttttacattgcactaattacatggtttaaatgactatccctaatcttcatccaactacaccccatgaattttaggtttatttaatcaacctagttagaccagatatatccttctaaaatcatttgtagatagagattctccttttgctagtaaataccattaacatatttacagaaggtctggtctaggtcatttattccaggcctctccatgattggattcatcttgcaaatcgtctttggagcccctggtatacaagttggactttagaatcagaattgattctagttcagaaagtactgggtaaaagaaattctttggaatggctatgattttatatataattggacatacatgaatacctgctatatctttattttttaattatttttattattattattattttttattttgagacacagtctcgctctgtcgcccaggctggagtgcagtggcgcaatctcagctcactacaacctccacctcccgggttcaagcaattctcctgcctcagcctcccaagtagctgggactacaggcatgtgccaccatgcctggctaattttttgtatttttagtagagacagggtttcactgtgttagccaggatggtttcaatctcctgacctcgtgatctgcccgcctcagcctcccaaagtgctgggattacaggcctgagccactgcacccggccaatacctgctatatcttattgtcagtggaaaacctacagattctgtggtcaggaagagttcctcaaaatggtatctaaagaaggtacctgatgatctagggaggtgttttatacactatcaagttgtgcttgtgcttgtattttatcttttgcaagtttattcacatttacattagaaattaaaatgtgtttttaatcttaacagtgtgaaagtaagcctacaaagataatttaagttcagatttcagtgagccctgaatttcctgttcaaggctggtgaacttttgaagtcgagtaaaggagtactaacataaaactcattcaggaaaattatcttgaatcatcagaaattatcttgatatcttgaatataccagtataaaacaaggaaactagttacagagttcttataattttcttgggtaaaaagtgtaagagtttgaacaagaacattgagatgcgggaaaaaagctttgttgaagtacatatagaggtatactggatttagcattcttttcactggaatgattatgagagtctttttggtattatggaactgtgaatagtagtttatctgacttattttagtcacattggactaaaagagaagaaatttccaaatagtctctccagatgtaaaaagtttataaaacttgtaattaaaatgaattcctatgtactgctattggatattactacaatgtgatggtgcaaattatattacccatttctatttctctttgtcatgaaaagcaaaaccttgtaagtaagagtatgctacttggtgactgtagttgggtaatagtacacctaggaaagtccgaatcttaagttcagaaaattttccagaaatctctcattaggtcattttagctataatagatttgtattcctcccacacattcatagtctaagcacaaaaatggttttgggattgaacatttttagaagtatcttcaaaataaagacattaaattacagaccatttttttccttctatattggattattttctttatatagtgttactattttttaagtaatacatatttatgattaaactcccatttcaggataccgtaatgttgacctaacagaagttttttaaaccccacgttttattttggccagatagaagtatgatcaggaaagattttggagctagagatgaagacatcagaatgtgagtctagcagccttccaaagagagctaggttatggttaattaatttttgcttattatttctctgaactattaggcttttatagtgaccaagtaaattagtcatttcacagaagttgaatgataacattcattttgcttaaccttttccatttccacaaatgtctcttcttttattgtagaataaaatgttggccttgtaacttttgatgttttttgtttttttttaaacagcttactgctggttgcaggggggacagttctaaaaatttgtgattttggtacagcctgtgacattcagacacacatgaccaataacaaggggagtgctgcttggatggcacctgaagtttttgaaggtaaaatggcaaaagtatggtatgtttgataatctccctcactccttgtgaattcatatgtttttatagattttccccatttccatggttttatttctgcataatacataaagtatacaatgaaatctaaggggatattaaatatagtgttatatcctaaattttatagtaagatttaaatcttctatgcttctaagcatatgtacagttgatcctcattgttcaccaatttcttaattgcaaaattgcctatttgctaacatttatttgtaaccccaaaattaatactcatggtgctttcatggttatttgcagacagtgctttcatgtactcgcagacagtgtgcatgcgctgagcagtgcaaattttgagtcatctaacgcatgcttccagctgaggttgaacaagacaacgtttttccgtcttgtttcagctctcatgctgtaagcaggtgtccttttttgtgctgttcagagccctttttcatttttgtgatttttgttggtaattttgctacttaaaatggccctcaagcatagtactgcctaagtacaagaaggctatgatgtatcttaacagacaatatacatatgttaaattatcttcattcaggcatgagttacagaaatgttgactatgagttcaatggtaataaatcaacagtatatatgaataaggtgtctttaagcagaaatacgcatgaaacaaggctatatattgatcagttgacaaaaacatggtgaccagaggcacacaggaacctacccctgtattttccttaggagcagtgattcagtgttcactaattcagtgttctcagaaactttatagaacataaataccaggaataatgagaattaactgtgcttttgtattggtttcctagcaattaaaaattgagagccctaaagtttaaatgaggatgccttaaaaagaatgcaaatagctgggcgcggtggctcaggcctgtaatctcagcactttgggaggctgaggtgggcggatcatgaggtcaggagatcgagaccatcctgtataacacggtgaaaccccatctctactaaaactacaaaaaattcgccgggcgtggtggcgggcgcccgtagtcccagctactcgggaggctgaggcaggagaatggtgtgaacccgggaggcggagcatgcagtgagccgagatcgtgccactgcactccagcctgggtgacagagcaagactccatctcaaaaaaaaaaaagaatgcaagtaattggacagaaataagatactaagaattacaaataaatgtcaagcttatatgtttaccttcttttatacctccatatgtcactgaagttttaaaagagttgtctgtaaattatatgctaggtttctgtataaaaacatcaaattatcttttaaatgaaagaagttgaactgaaggtatgtgatttgtatgttaggaagtgtaaatgcccataaaattcagatacattcagttaatcagactctggttatagcttatttctttcagttttgatgactttaaagggttttctgtttgtttttagccaccccagaggaagagaaattgcaatgcaactagtcacctgagtggagctcttttgccctaaaattcaatttagtaataaatgaataatcaggtgttatattacacaagattaaataatgcctcctgtttcatatacagaatgtatacatttgacattgttttaaaattatttacttatttaatatacctttatgtgagttaaaatgacccaatgttactgtatgtggagagcaaaaagatttgtttatacaaaagattaattttattgctctagacaacccttaattgtctagagcaacaaaatgcagactgttaggctgtgtaagtttcttcatttctgaaagatgtcagtcaacctgtagcccaaattagactgtagcatggttgtagtgctatattacagtgtactgcttagcatgtaaagctatagctataataattgttcattcttacagtgagttgagtgtttgtttgtttttgggagattatgacgggtgcttattgtgctggctgattcaaccacctacttagtttgtaaattttgctgtgtaactcaggttatccataattttcgttacttacaacgtaatgtttaagtttataaattaagaatttcccttcaccatatattgaggaaaaaactgtaacactaaattagaaagttcttctgctttgatagcagagtagtgctgtctgtcagagtgggaagaaaatttaagattaaaatgtaacagaaaggaggccaggcacaatggctcatgcctgtgatcccagcgcctcgggaggccagagcaggaggatcagttgagcccaggagtttgagaccagcctgggcaacatggcaagaccccatctctacaaaaaatttaaaaaattaaccagttgtgccagcgcatgcctgtagccccagctactcaggaggatcacttgagcccaagagtttgaggctacactgagctccagcctggatgagagtgtgagatcctgtctcagaataaaataataataaacaacataaaggaatgtacagatgtttcatactctgccccagagaaagtatcagtctaaatacataaaagtcaagtcctgtgcctcttgatgaaaaaactgcctcttgatgaaaaaagatagaaaataactgagtttctgaagtagttttttagtgtattgttgatacttaattcatttaaaaatgtacttgttgaaaagacaaagtacttcagaaagagtagtttcttagttctacatgtgacagcctcatttttatccctgatacccattctcaaaatttaagccattgtttctgtaagtcatgtggaaaaatagtctttaggttatatactaccttttttttttctaggtagtaattacagtgaaaaatgtgacgtcttcagctggggtattattctttgggaagtgataacgcgtcggaaaccctttgatgagattggtggcccagctttccgaatcatgtgggctgttcataatggttcgtaaaaagaaatttttcttaaaagtactttttgtgttttctacttggaagactactcctgtccccttccctaaagaatatcatttatctctaacattaaaatgtacaattctttgttaagagactgctttgctattatcagactctgccctgtccctgccccagagtccagcagagcaggattgagagtagtcctggtctacacatgcggctgaggatgttcactggctccgctgattagggaaaggccatcagtacgcaacctagacagttggctctctcttagggagaagcatcaggctggatcatggaaaaaataaaaaaatacatacataaaatctctgacatggttaatataactggagagttatagcccttttctcctgaagaagcaagggcctcatcaaggagaagaagcaaagaataataatgcttcacatatttttcctgtttatattctcacccacccttagaaggtgagtactgttgcctcattttacagattaggaaactgaggcctagagaggttaaataacttgcttaaggtcacaagattagtaagtggtagagctgggattcaaatccagatgcttctgacttgaatgctcatatcttaagtcatattgacttatggactcaatgtccttgcatctgtcctgtttcttttatagttctggtaatgttgtttttaaccacatatgatgttagaatgcatcctcttcattagtaaagttactttacatttgcttgggaaaatagcttttcatgaaggaaaattacttaccttcttaattttagcgccactcttagttatttcatttctatgccttgtttataatcatgtgactaatggccattttttacattattccacaagtctaaaaacaaatgtctgcctaattatttaggtcattcatagatttatcaaacagtaccatcatctgagtaatcttagctgtttttaccagtttcctatactgcctttaatattactaccattagtatcattgtggagactgttcagcattgaccaggacagcttgcttgcttgctttctatcagttgtcagtaaataattgaacgtccgtgaagtaaagagtaaaagaactaacttgttaattgataaaattacaaagcacttttattactccaaattacagatcttaaactacaagatctataaaataaataccactttggaaatacgtacaaagagtttgcatcattctttgggtaaatacattcttccccccttcctctcattttcaattgtaggtactcgaccaccactgataaaaaatttacctaagcccattgagagcctgatgactcgttgttggtctaaagatccttcccagcgcccttcaatggaggaaattgtgaaaataatgactcacttgatgcgggtataatccttcttttgaggggctttggatttaggggaatttaatatgtgctgagttttaatggaattttaaaagggatgttattactatattctgctttatatattgctatgttttctaagtgagaatgggcatttattactcatagtcagaagaggaaacatttcgagagggaaaatctagttctttatcactggaaagatggctagactaggtttctagacttgcttttttctttttgcttacattagtggacaagtatgtttgtctctgggcctgttgcctcatttgtaatgtgggagaaactgaaatagatagtctctaaagccatcacaggacttggatatattaatattatgacttcaatacatgataaactaaattttacatttttctgataccaattttcatcaagcatttagtcatttatgcaaggcaataggttgcattctcagacacatttatttgagtgacttttactatttggcctattttcaggtttttatatcccagtaaaaagttaaactttcttctatttagaagaacccttttaaatgattatcaaattttcctagtctgtgaatcaagcgcctttagaattatttggaatattttacgcctctggtttttggtacattaacaaaaactgtgaagtggtatcttggctttaaaaagttcaaatatctatgaaagtgcctgaattttgaaacagtttgttcagtagaagaatcttacaatctccttaaatatagactaagtaatttcctaaatggtaaaacgttgtttattcaatctattgaaaatttcttacgcaaagcagcttgaactaatctactaaaagtttaccatcgtatttggataccagtcatatatagaagcctaggccttaaaggtgtgtgcataagaaaacaacttagtctctgtagtcagattacttaaaactttaggatatataagttattgcagttgtaattttgcttctctgttccttgtctaatttgaggagaatacgtttcctttttttctctaaattctaacatttttgtccagcagatactttgagtattatgcctccagtttgtagaaagacattcataatctatcctcttaatatttaaaatgttctaacaattattctatggtatactagtctcagtcttcagactaacagtcactggaagtttacatcactactgtaagaacatgagtatgttttacataattatgagaaatgatactattttatttcatatgtttctctagagaaatatttgctgttttcttcaagactatctagactccaatgtaagctagattcttaggtaggtgcatggcattgatcaaagttgaaatccaagagtacattattgtaatctttgtaaaataaaaaacttaggcacctacaaatttagtatataacttagggaaaataaaacattaatcaggatttaatttgtattaaggaaattttaagctgtggtttacttttttatatatagtactttccaggagcagatgagccattacagtatccttgtcagtattcagatgaaggacagagcaactctgccaccagtacaggtaaatggatagattggaagagtattgacttgatttttctttcatctctattcccatgaaattataatcaagaagtaatgaataatgtccccatttgcattttaattccttcatttcatatgattgactgcaatttgagtttacaggtgcgtcattcttcatgtaggtaccctgattaaagagttattgaagacctgcttccaagtcttagaattcctacataattatgaataaaaagatggcatattgtattacagtgaatgtcattcttaacttgaaaaatcacttttacatgcatactactagatcaagtagtattagaaattattgtaaatgtatttaaacatttcttcatcacgaacaccctagtttttgttctcttctacagaggctctgatttaagaagctatgttaaaagttccttagttttccgaaatgtgaagtagtagtgggacatgtaatttgtggtcatcaaaaagatagtagaaataatactgtaacttagaaatattgtacttctcaaaatatagtggcattataagcatttcattattaattgaaacttaaagatatgtgtgtgtctatatgcacatgtatttaccctgcatttattgaaaaatacttttactgatctatttctcccacctcaagaatagttttatttattttaagatggttactgcttggctagttattctcaaattccagttttactgaaaatattttgagttgctctgaattctaaaatgtacttctctaaaattctatcatttgtgtctcccacgtcctctaaactctctcttcatttccttactgtgaccttgaattttttgagcctcccaccttttcactggtcctcagtcctcttaggtccttttttctttctccctccacttaattccaatcaactattataattcttttgggaataattttcatctttctagcctctctctcaagcttgcttggctaaaccacaagcctaatgaaagctgacactcggcttactccttgcctgtaccaatgcagctgagtgtggctggagatagcacaggtttactatcctcacgtgcatgtttagtgctattggacagttgtactgtattgtagttcatctctttcctcctatatgtcttaattttatactgtagcctctcctcagacttcaaacacctcctcgccactcctcactctcagctgatcttgtttgctctttctctgagaaaattggagtaatcggaagacagcttccacaacatctgtgcccatctactctgctttcttctgttactctggctaaactatccatacttctggccaaaggtgtacctttctgcctgtgcattatatcccatctgctcctctgagcaattctcccctgtctcttgcatcatcagttttagctttctactggatcattcctaaaacatacgtagtctgtatttgcattcactagcttctcttttccccttctttcttgagctgactccattcagacgtattatgccagtacttcagaattgttcttgtcaaggtcactagttatctctacatcactacatttaaggaatcattttcatttctcatcttgactctcagtagcacttgacctaattcattactttctccttcttacagacagcactttcttcagttggcctccgagataccatactagcctagattccatcttacatctctggccgtctgttctcagttttctttgctggttattcctcatctccccaacctagaaatgttggagtgcccagggcctgctcatttggcttcttcacttatctgtctgcactcatttccttggtaacctcattcattattatggccttatataccatctgttggctcataatgttttccatcttatacctgaactctatactcatatatccaactatttcctttacatctactagaaactcaaacttaatattttccaaactgagttcctgatacttccttcaaactcactcttcctttagtctttccgcatctcaattaatagccctcagttcttctactagctcaggttaaaaaccttaagttattcttgactattagaagactatttaggcatcttggttccttttttgtgctatccttaagtttctcttaaaatgggtttgtttggatatcttcattagcttgaaaagtcttattttatttctgttcctgcctggctagtttataaaagaatgtaagttacataataccaagtgaagcatttgtattatttccagccattagtcataaatgtttctgcttttcctaggctcattcatggacattgcttctacaaatacgagtaacaaaagtgacactaatatggagcaagttcctgccacaaatgatactattaagcgcttagaatcaaaattgttgaaaaatcaggcaaagcaacaggtttgttatgttattacaagtaaaactggtaaccttaccagtagtcacaatattatactaactgaaattaattatttaccatcttctattttataaatcctgaattttcttcctgaaacatgcaaaagagcttacaaatagagacacgtaatgagattctcctaccatttattaccaaatggtttttccttctaatgattgctacctttgccaattctaaatccctatctataataatccctaaatgtaatggttgatggttaaaaatgtaaaatgggtatattttggctgcgctgcccagttagaggagttgttctaagtctatcatttcatgctgttcagatttattatatttttgccattgttgatttttaaaaatatttcaaggagtgagtttattcattttgcctgaggcatttaggttaacgaataattggggcttttagctcccagttctagtgactgccttttcataaagacagtatctgcagcttgctttcccttacccctgtagctccctctcgtacaaacttccctctcctttcagagcagaacaggatctatcagaatcccatttgccatcttcctccttttaggttgcctaagattgctaaatctaaagaacttcagtaattcagattgacctgtaattttaacagagtgaatctggacgtttaagcttgggagcctcccgtgggagcagtgtggagagcttgcccccaacctctgagggcaagaggatgagtgctgacatgtctgaaatagaagctaggatcgccgcaaccacaggtaaaaaggaactacaagtctgaagagtgaaaatgtatataagcctttttggccatggtagtttcagttgtcaaaggttttttgtgtgtgtcttatatttttttttaaataggaagtaggtttacaatatatttttctaagttactagcaatagtttatgcatttatctcaaattccaaataaggaaggtatgacttgtaaaattatttggatgagaaagtatgccttcctcatttacagattttatcaaatgtaattctttctgctcaaacatgagttgaaagtctaagtgagaaattgaaattctgccaaaaccagaatattttggggattttcagtgatactactagatttttgtgctgaactcaaataatagcaaatattttgtttcaaatttaacagaaaaatgtattccagatccatgtatgatttgaccttctatctgcttcttcattccagtgacaaaataatagctaagctggttgtggttaatttttttaattgtaaaataaaatatcataattttattagatcttgaaaaagctagcatttaaattccattgttcagttcttaaaattattaatcatggaagaactggtcagcacaaaaacaattacatgttttgttacttaagtaaactgacaacctaattctgtgaccaggtttcattttagtaatgctggtttaatttggacgtttttggttttttgctgattctttccagggatcagggggagctgattttaaaagtaaacacgtttctgttgtggaaaatgtggaaatgtaaacaagccaaaaaaacttacataattaccccactcagagataaacacttaacatttttgtgtatttaccccatcttttaactatgtatgtgtataaatgtatatattcatgtgtatttgcatcttttttaacttagctaaccaattttttaggtctttttttcacttatttggtttttttctaaatagaatattctcattgtgtgtggagctcttttcagaaagaagttgtcaagatggaccatcatactatacttgtcttcaactaatcatgatcattgattttatcagctactattagaatccattagatataacagaatatccgaaataacagtgtctataacacataagcattatttttcacatataaacaagtctggaggtagtgggctctgtgatcttgaagtaactggtctcctatttctgtgctgtaatccctactgtatagcttccattctcaaagttatcctgtgctccaaaatggctgttgaagttccatttcatcacttctacattccaggcaataggaaggaagacatgggggcagggcaaatagacatccaagttctttgaaggaacattcccagatgcctctcttaacaacatccacacatcattggtcaaagtaacatggtcgaatggctacacgtagctccaagggaagaggagatctgccctcttttatctgatgacttttctgtcctaaataaaatcagagtactattgctaaaacagaagggaagagtggaaactggcagaagatagctgtgtctgccacagatgggtcttcagaaactatcaagttgagtagaagtcaccagccactgacaagcccatgagtctccatgagtcacaagtatttctttggagcagggttgtctcactgtagtgtcagatgaaccctactcaccgggacataccctcatgctttgaggaacccttttcacttcagggatgttgttcaggatagatctgccacatactaattgctgtctcaaaactgaaaattgttataataatggtttcatgtcttcgctagtatcatatttctagtcaagcactggttttttattattatttacagaaatgactttgctagaaggataaccacacacattaaaattttgcctaagtgtagaacaaatgctattgtacatcccttgagttttacacaatttaaattttttcatgaattgtcttacttggaaagagtcatactttccagccttttgacagactttgtgtttactgtgaatgtaccctaaactttggaaaatataataaatatttggtactagaaatatgtataagtatgactacaaaagcatatacatttcacactttgattcaataattattatttaatcattggattttactttatagcacacttcaagaaacacctaacttgaacatgtattcctgtgtttgtgtaattaaaacaaatacgacaacttactttttaacgcctttcttcctctcctccttcgttcccccacccccatcacagatcagtgatttcacttaggtagactgtttctatgaatatatttgaaattttgcttcctcattaccctgcagctttgtctctgttctttttatttttttctgctaattaaaaccagtgtgtaaaacatcttgtatttggtagttgtttgctctttaatctcgccttttctgagcatggatgaaaagttaggtagttctgcatgccattctgcatgaaatgttattaacatgaactatttgaaaatgagtctatttttgtagttaatcattttccgtgttactgtttgtggttgtttgcatgtatactgtatatatgtgtttttgcagcctattccaagcctaaacggggccaccgtaaaactgcttcatttggcaacattctggatgtccctgagatcgtcatatcaggtatcatagaccacctgagttggtctaatagctgtggaaccggaataatgatccctggtacttgtaaaatgcttcttgctccaatttttacaagacatgaaaatggataccttgcatgcagtaattagggagacagattgaaaaactacatttattctgaagcagtcttgaaaagatacctctgatctacaataagtgaggataaaatagaagagaaagtaaacctttttggagaagggagaacaccaacccagaattctaccaacttcctctctacttttaagtgagcacatgagctaaacccagaccttttttgcacccaacagaaagaggaaacaactaattaaaatttgttattttccttggctcctttccttcctcagttactgctttttgggtcccctctagactttctgtcctaacctctttctgttggtagcaagtgaatgtgaagttgagagaagagagttgctaaatagcattttgccttaacctggaaaacaaaaagtaaagctaaatgagatgtgctgttttgcagggtatcttgccaaagaatcatgtaaaatagttggtcaattctgatttttgtgtattatcaggagaatctcataaattacatgtttttatacctaacttacacatggtactttagtgtctaaaattggtaaactgctttatttcttatggtgatcatttcatagaggaatatgttaccatttttaatagaaacttaaatggcatattgaccttcagtattgattaatgtattatcaaaattatcatttatttatccctttaggcttttctctacctctttacccaaaatcttgataaggaaatacatattttccacacacgttcatgagtgcgagttggatgaattcttcagcatgctgtcctttgcctgtgattgtgtttttagcagtgttgataattctagttgaatacctaatggttattttctcctctactaaactgaaaactatgtaaggatagaatccatatctttgtgcattattttgttgttgttgcttattattgattgtatcagcagttgctggctcagtgcttcacatattaagcatattaacatagtgtttaataaatacatttattaaataaatgaacagacctattgagcatctcccctggtgagaaactagcatacaaaaatatgaattatactattcttaggtgccattttgtctgtataaaactatcttatattaattttcccctggttatcaaagtggtttcttattttacaacatcattactattgctattcaaagagtagagttaacccatttttcacatggtaatttttatttattgaatctggactgcttcagaaattaacaaagagatcattttacatggagatcagtttacctccatgcggaaaggtactgtgtataagggacgtactttaaagaggtggaagcatttaaacttacataccgctgaactgtgcttcccttaaatgtttgagggaatcaggaaaatttagacagatggcagtgtaatcttatgactaagcattaagaataaatttatatatggcagcgtagcccacgctatacaagataatgggggagggaaaaataaggaaagaataatagtttataactgtcaggtactactggcatctagtgggcagagaccagggatgctgctaaacatcctgatgtgtaccaggcagtcttctccaacaaagaatgatccagcccaaaatggcagcagtgctgaggctgaaaacccctgattagatgttctttgtgccctacaaagtagcttaaagtacatcttattttacctttatacaatcttacaactaggttatcggatgaaattatagctgtttaacagacgaagaacttagatctgatgatgtttagtggtttttccagaatcatatagccaggaccccaacccagatcttctgactccaagtcacatccattttttgttcttttgtttaagtcagagaagctagagtaatttcttcttgctttctcttagtgttcacattaaggagagctcttcagccagggagatcctcttttatgacattgggcctttatggaatcaggtaaccttaattctcttaattgccagagcagcagtgctattcatatgaaaatattattcagtaataccttttattaaatattctttttaggcttttcccccctcagatatcaaacattaacttactcaggtgcactttctttaatagaagaatacaagctgtagaattgacactagtggacataaaagccaatcatgaatgtgctcataggtaatgtttttaaattaaatataaaaataccgcccatcctttgggaatatctcaaatttcctacatgacattttaattgtaaagaagggtgatacttaatttccaaaatttcttaatactttctagaaattgttttgttctaagtggatttcccacaagctttatggtattagcaaatacttcttgatatattcaaactgtttaattagcattaaaacccaattgcaaggattctttttaaatatagctttttaaagatcttatttacatggataagagtttcgttaatacttccctttggccaagtgcaatgtactgagtctaatgtacttcttggaatgaactacctctcttaataagagcaatccttcaagcatcacaaaaaaggttttgtatatatatctttaaagtcactaaaatgtctaacctagtcataggtaaagaaatgcaaagaccctaatcttgtaatcttgttttttgctcgctcttcaaaatgtgtatactatgccatcagtcaaatgtggaagaaaaagcaacttagcaaaacagcactatttatcaatttagtagtctctcagatcatacagaaattaacctttaataccttaggactccctgtgggtcagactgtacaattttttatacctcttctaccatattactggctctgaagaactgacaaacttttgtacggtaacccttccttctttccactgtccatctgcccttaaaagagtgagctttatagattagcctggctcctttttaccaaggaagacacgcagctaagagcaaattaccagtagagtgtgtgacattttgctgactcttcctttgtagagaaggtcctgccaagtagcagtgtgctacctaagcaaagtaaatgtaaatgtggaagtttcttgcccagtatttagaccatatgaactacagttttctaatgcatttgcttgctggtaagttggaagggacttcgagaaaagaaatagattttcttaaatgttttttattaaaacttgagttttaaaaaccatatcctttctcctttcagccagtacatctaatttgttacatttatatttgaagaaaagggaataggtagcagattattggattctttgaagtttttctagattttttttgttctaggactttaataagggcagtaagaacacagatcattgttttgcatggattttctttactttttcccatattttctttttgtcactatctaagcttccaagaatctatttttcacccaccttcatctcaagtacacaaatgaaatagattattgggattgtgaaactatgtaagacattctaatgcagttcatctgatgttagaagaatacctaaattttacatttcttttaaaaatccaaatgtcaaagaggaacaggtagaatgcctaaatattacaaaaaaagaggaacaacctttttcagtttaacatgtagagtaagagaataagtagttaagaaagcgaattatttttcatgcttgtagcatcagtaatggaagatgggttgttctgctctggagcctttgtgtgagtagttatagcatttaaggaaataaactgtaattataatgcattctaaaatctactggaaaaaaatactgtcatatacatatatacttaccacctataaaagatttaattaaacattagtcttctgcacttctactctgatataaaatttgttgtacatggttcataccggcttgattgcttttataaagtgaaatgagtttcccaaatgtgatatgcaaaagtaaaattttctaaattacagacatttttaatgctattatatcatcatagataaatttatttcttagttcagattagattataatgcttgatttcaagtacttgaaaaccatccattctatagatgaacattgccttgaagtgcttcaatttgagaaccttgaacagtgttgctttagtgtaccttttgttatttctaagcctaaaataatatggcataacattcgagagcaataaaatgccttgaccaaagaggattttctgtcttacatactgttcttaaggatatgcaaaagaagattgaatatacaaatgtttttgagtcagatcttactgaaatagataagatttttgcctagtttcctgaagaacctgaacttaattgatatttattgtttgttatatcattcttaaagctaaaaagaaaccttaggtgtccttatgatttcagccgcatttagatctcttaactgaataaaaaacgcgtattcgcttttaatttcagtcaaggacgtttagctctattgtatattggttttttactaacagtatgataagtagtaaattggagtaagtagaatgtagagaggcccaaacattttaactgaaaaatagatgagtagttaggcttctaatacttgtatcttgttgccctccttcagaagtttcaaatgtcaggtattggcaaataaattatctaggtggggagggctttatagaatgcttaaacaactggaagcagagatgcttttcaaggacacctgagcactattttgctttctccaccaggatgaaaatatcacttttttaatagtatatttggttcaagagccggtcggtaactaatgtttgtaaacctttctttaactggaagcatgtaagttattaaatatttcctccagactactgcagcaccaatatgaagaggcaaagagagaaagaattgagtttttctagatctggcaagttctcacctagcacagatagtgtcattagcagatgtaagcctttgatagggatcctagggctaaggggtgctatactaagatgtactgtactagtttctgtgtatagccacctcactttcaataaaattctctatttgtggcatattaaatagggaagttaatctaactttataatgaatatttaggtggcctttctgccatattgtatagtctaccaagatcactttttgtaatctaaaaaattcaactctaagctaataaagctggtttattggaaagcaaataaaccacctgacggacctttccagtgaaagagccagaatttgttaaaattagtaaagaaatacgaaactttggcagcctaaattagaacatatattttaaaattacatgttcagtttaccatgaagcagtaatgtaatgctagtgtatcatgctatgcatttttttaaatcttgggtattttacacatgaagagaatggtgtcccataatgtgtaatattcaaaactcgtgaatctcaaaatttctaacatttaggttaagagaagtctccaggaaaatgtagtgttgattcttacatgaagacagtcttcaggaagttttaaagtagaaaataagagtagtgtaagtcaaggaaaactatgagcttaactgataagaaaaattacaggagtggctgtctgggacctaagccagcagtctctggaagaaacccgggataacttttaaataccagctcaggaaatcagttgtacttaaaagagcagcttttttgaagaggggctctgttttaatgacattactgtaaaaagaatggaactgacccctaagttgctttctatttgcggtgggcaggagtgcagatttagtatgcactggcaatgtgatgtattcttagaagtcattctaaaaagtggaatttgttctctattataagacatgaacgttccagaattcattacagaatgaaatactcaggatagcatatgcaggtttcagattccttgatcaggcatctgtttacatcatgctgtcctcatttctactactttttccatttacactaccatgtataatataggtatgtacatatcaaaggaccaaaaaaggtaaaatgagtgaatgtctaaattagtattcagttgcaaaaaacttcagaatcaattcaaatttactgagaacacacccagtaattttcatttgaagtaataggaggttgatttttcttacattcatatttctaaattatgacttaaaatttaatattggagcaacaagtatttgttgattgcaatcctgttttgctttgtctgaactatctgccagatggtttctgccatggttgtgctaattaaaatgcattgcctaatactgcttgctttgattcatgcagtagcttaaagatttctcattttatggcatttgttaactgtcagctcttctttaccttacttccttaaaaggttttacttcccttttctcctatccttccacctaaatttaagttcagtttttgttgttattgcaatggtgatgtaatggtttatagacacatgtgtcgggtggttcctcagattaacaaatgttgctgtgttgctaatctgaaaagagaattccagacacttttacaagcctgtctcatcaccgctaattttagaatgaatgtgttgaatgaaatgtgcctaaaattgcttattagtcacggttgtggggatcctttttgtccttgggaaacaggggtagttgaaagtattcagaaaagtaatctagtggatctaattcaataaatgcacagttttgttgttttagtttgtaatgaaaagttgaaatttttggaataaaatgaaatttgaagtaaatgtgaattcagataatgcaaagaattataaaacgtagcttaaaatggaaaaaaactgatgatgtcttacatttgcaagaggagttacaaatttgagtttttatattcactacacatattattctattaaacattcttattccattgtaaggtccttttagtttatctgcagcataataatggggtcatgtgggttaaggtgctaaattatattgctgattggttttaaaaggatgtctctacgaaagattctggaagtctaaaattttaagaatgaattctgtctactaatcgggaaactacaattagagtgagtacatgttctaagtgttgcccactagttgagaaattacgtaatacagatttcagagtcaaaagaattttgagtattgtatcagctgttactcagtattttggtgtttccttttagacagctgatctctcacgttagaagatactgcataaacagctttattcccaaataaaagtgctgagtgaagccattgctcaattcattgttttgctgaggacttatatgtgtagaattctctcataaattgatttttaattaaattaattataaacatagaagtttctaaagcagaattaacacaatagcccatttcaacaagctgtatatttgagaacagagtgacagttattaacatccagtaggaaattaagagttgttgttcacaaataataaattactagattctgacaaagactaatggggattaagtaagcgtgactcaatataacaaatttaagcctaagcatcttctaggccctgaaatgaacaaggtattgctgccagttaaagtcagttgtgtcttacaacctgctagctgtcttgctgtaaaaactgtaacgtaaggcccttgaaatagatgccgtcatcagccccagcccccaagcattcatctatttaaacacatgacagaagatggtggaagagagttcagcagctattcatgtggtagaagtggttattgtattaggacatactctgttgtaggccagcaacttttgagttaaaacaccgcagctgtttctcttcctttctttacatctttctcttcttttttttttttcttagcaataaactcacttttttttccccacaaacattttgtgtagatccaaggagcaacaaattccaactttctgctgtagcaattacacgctttttgtctgtttgactagattttagtattttactttttttcttctttttaaaggcaacggacagccaagacgtagatccatccaagacttgactgtaactggaacagaacctggtcaggtaagacaacattcaaattttctatctttgaagaatactaggcagaaaacaagaattaactgtattctactctgcaaaattagttttatgagttgacctaaagttgtgatagagaaattcattgcacctgaacttaaatacttaggggggaaaaaaacataggtgccattgttaatttaacttgaaagataatttattaaagtaggtttattaaactccatggaaaagtaaattgttcattagcgctgtatatatgttatatggttttatgtatgttttaataagtattcaattttataatttaacaatttatcattaaagtgtcctttaaagtgaatcattaatatgtctcctttttactaataagggtagtaaacatttccccaataagttgctactcctctagcgccacgtagggcattacatggagaactctaacgtcttttaacttggcatatccactggattaatatttttttcaaatatccttaagataacatttactaagcaaatgtgtaaactctcgaaaggcttctattccagtggttaagatttcattgtttatatttctggatcctcctctaaactctccttgtctctttatcactgctgctttgcagatgatgcagacagtgttataatttaagccattactgattagtgcagagttttaacccaccaggtatataaaagtagctcagtcattgttttttctgtgttactcagattaatacacttgacatatataatttattatatactatattctgtaaaatgaatgaagattaattataaggtgtttgttttcagctgtacaagaataagttttatgagagcagcataaaagtaatgaaattaagtaatgaaattgttacatattaagaagtattaagtattaaattattaagtattaagtaatgaaattattacatcgtgacccatatttttgtaaaattttagcgtttatatattataaacaatctgttgtaatttatgataatatgtattagtacttgtcatcctaaaaaggtattttattattatatcatttgtataatatacttaaaatttgggagatcctttgtagtcattaataaaaaagtcttttatacccatcaaccaacttaccaaaaaccacttcaaatatttaagtggtgaatatccttgatcttcatttatatctggaaatatgtttatttcacaaaatgcttataaacacatatataaataaaatctatatagacacattaatttattatgttttgtgatactagtgactctaaatcttgatttcattatttagtgatagtttttttcagtgcatctgtttttgtaagaccccagaacttttggctgaagtttcccgttttctccccctcagatacttaaaagttttaatcagcccatttagtaacagatagtttgacatctgctatttgctttgattctttggaggtttgatgagctcagccttttaaactctgtttactattgccactgatattccagttatgagaacttctagccaactgtttgactaggaatgagaagcttgtcctaagacatgtcaggagcagctactagtttgaaagcttttctgtagactctagaataaaagtgttgccataattcaggactgatcttcccacaccaagtcttacttatttcttcacaagttccacattatttgagattttcgttgttacccttttaattcacaataccttcaggtagtaaaacgctggaactgaggccaactatgggtgtgggacagtcatttgtggaattgtcatagaccactctgaaagatttggggtgagggagagtttgatatgggtgagggagagtttgatatggcagtaaaacctgttctgaaacaggtgatgtatgaccattgtgtagccacattttaaaactgatccactctttcaaaattatttgtgttatagccttaaaatgcctaatgttcagcttggcatgagagtggcaaatactaatcctaatgtactatgaaaacatttctcccaaaaaatgtatgataagtgaccattaaatcttttaaattactcacaaagatgatattcatttgaggaagaaaagtattcacaatatgtgttttcaaaattggaaggtgccatcctttttgaagtctggctaagcgtgattccatcttgcagaggaaagtaaacttattgtactgtggctcttgactcaaaacataatcttagtaaaaccacttagaatttccatctgtaaactaaaattaaattggttgtttttctgctgccatccatttgagaggaacagtaaatgaagcaagcttcttaattaaaagtaatgatataagtataggtgtaaaagattgcattcttacaacatacaactcactttcaaacatggttttttcattaattcaggaagctttttaaacactcaatagatgtgacttcctagaagctttgaaaagatactgagaaagaaaaaagcagtccctgacatccaggaactggtttgacactgtggcctcactgttgttagtagctagccttattctcaacggctggctgtcacagctagagcatgttactgtcttattggacataatctctcagaacaccaatatcagacaagataatgctgagaccgtgataaaaggagacaaaacaagactacttcggaatgttttctaagcacagacaaaaacaaggtcactgtgccacccacaaaatacctaacattgtcctctcccagctattaagagtgactgctgcttctttaccaattacagcttggtcctcactctggactgccctccctgtggaattgcccttgctttctgacagcggccaatctggaacgaacccctccttcctttgagtttccccaaaatcactcaaccaaagcctaaatcctataatactttctttttctaaaaccctcttactgagacaccccatgctgccccatggtaagcattctccttcactgcaataaatattaaacccaactctttccactattggtgtgttcctggcagtctttggctagagggctttgacaataccaataaagcctattccgcaaggacctcatttggagagatcagacttatgcccaaatcaattagaaaactaaagtaataacagcttccatttgttgtgcactgactttgtgccagataggctcttagtatacattatcagaatgttaatcctgttatcaggatcttagtcctgtgaagttggtactttttcacctaatttgcagccaggtaaagtgaggatgagagaaactgacctaagtctcttacttccttatactgccagtaattcctataaccaggttttgaatccagacctgattgcaaagcacacaaactctatactttaatcattctaacttgcatgtgaaactagatgtgatgcatgctgttatagccctagatctcttacatttaggtattttggcttctaatagtctgcattgtcattaattatttaaacagttgttaagtgatgatgaattgtagctgtatcatatcattgaacaaggttaacctatcttgataataaatttctaccaatgactgcacaaatttatgttttatacacctgggtgagccattctgtgtttcactaaaacaatatacattcttataaatgcctgaataccccttctggaattgtattcagtatagatctatattcaagaattctcttagaggaggctgcagtcagtgaaaattacgactgcaagatgatacagttatgattatttagagaagtgggcatattacatttccatatggactttataatctacttttactagtcaaatatgtgactttgggcaagttccttaatttccctgagcttctgcacccttatctgcaaatagggaccataacacccacctcccagagttcttaacagatgtgaaagtgccagggcacacagtagatactaatccatgttgtatgccagcctctccacagtgtgcctcaccgggctcttgatatcacttccttgctctcatgatagtgagaaataaaaagaaaatagcacttggaaagaagtaaaatccaccagcgttctttctgtatcataaggaaaccttgtgtcaaggatcatggaaagtatttgctttaaaggtctcttatcgcatattgagtgatattaatatacattgttattatttatttaagggatgtgatttattatactacttttttccatcttcattctgcacctccttttgtgtaaacaaatgttctggtaaactctaaatcagaaacttatgtaatagttttgaataattccttcttcatagtatacctttctattggagaatagacacgtttcttcttttttttttttttttccgagacacagtccccgctgtcagccaggctggagtgcagtagtgtgatctccgctcattgcaacctctgcctcctgagttcaagtgattcttccacctcagcctcccgagtagctgggattacaggcatgtgccaccacacctggctaatttttgttttatttttagtggaggcagggtttcaccctgttgcccaggctggtctcgaacttctggcctcaagcgatctgcccgcctcagcctcccaaagtgctaggattacagtcgtgagccactatgcctggcctctgttggagaacagacacctttctattgtagaagaccatgtaagaataataaaattctgaaatttccttatgaaaaactgtagtgaagccaaaatagatcaagcctacagacctttagattagaaagaatattttcagtacaaccttcatgtatagatttaattatctgtaactaccataataagtacccatgtaaatccacattaccaacttatacccattttaaaaatatttatattattgagatgttactttagcaagaatatcatagaagtcatcatttaatctctgtgttttgtgcttgtataattttagctactaagatttctgagggtattaaatagcttttaaatgtcagtctaaataataacactgggtgtaaattcctgacttatgaaaatattttcccagtctttcaggtaagatattaaaagctgagctttatttttgtctgtaaaataacttccaattcctttttataaatatagggataaatttctggtcaaaggccaattctggttcatgtctactgatggtaatctgcccctgaggtttaaatttggcttagtattcttttgctgccttaaattgctgtgtcacgtttctatactcttgtgactttcatatccagttcttttggtaagtcaagtttgcctatatctcttaaactttgcaattaatgtggggatagaataagtaattttaaatgtcttagaggaaggagcaacttaaatgagttttaatagtttgagagcatttgtgaccctcagaattttaccagtgattttaaaaaataagtactgtaaaaacttcttcagtagttggttacaagcagtaacataaattcagccacaaactagtttgagttttttcattgattgtcagatgttatgtgttcctcttatttatgccttgtattattcacatactcaaaaactacagttatgccttgtttttaaatatttccttagtttttttatacaaacatattagcatatttttatttattgagatacacatttcttaaaatataaagatttatttattagttaatggatttaaatctaactgtgctggtctaaaaacagttttgaaacttgcattaaaagtgcaagccttatatttcttagtttcatagctgttggaaattacaagtgggacaaacaagcatgcacagaaggtgctaagagtttcttggaaagtagaaggtgaaaagaaaggtgtagcaaagaatcattttgcaaaagatttaagcttaaggagtactataaaattcctattaggtccaacttatttgttttaatattgcagatgttcagtgacctcttttttaaatatactaaatccattctcattttaaaaacctaattattacttctactgtattttgttgatttctcacaactgatactgattcttacatgtcacaaacatgtgtttctctttttaaaatgtgcattagcattacactgactctgaaaccctggtctgccaccactttgaaggaaaaatgcctttgatttataatagcagttataactatgggcatatttgtgtacttgctttcagtcaaagaaagttaaaaagactcaggaataatttcataatgtctatacttgctttgtcaagggtaaaagtatcctaaaagtaagagtgaaacatttcatcactggttttctttggtgtatgtcgttgttattcttatatactaaaggtaaataagcttaagcaccaatcttgtatctgagtgctaatagcttgtgttctcattttattcaatgagtatctattatgtgtttattatatattcagcaatttcccagatcctgggaagtacaatataaaaagtacgcatggtctctgcccttaagaggttataatacttttgaagaggagtaaaactttgagactactataatttcgggcacaagttgaagtaggaactgactatacagccaaaattcaaagaagaaaaaaatctcgtgtgaagacatttcatgtacatcatttcatttaatttttataaccttatagatagataatactgtccttattttcctattgagtcttagaggttaaataagttacccaaagctgtactagttagaaatggcagagcacagtcaaactctgggctgtcttgtctccaacacccaacttcttactgctactactttttctcattcacacttcatcaatgagaaacctaagtctcagagaggctaagttacttacacaggttcacacagctgtaagtggcagaatggagacataaccccaggtctccaaagtattagactgaaacatgtgaagttgctgagttttcaactacaaaaacaccagttttatctggttcagttttatgcatgccctgtgcactacgccgtattatctttaggtgaatatgaggtcaggattaaaaactgcaagggaaacaggggcatgaggaattttaagaggagagaaaatccagatgggcaaggtaaacctgctgatggagagtcatgaatgccagagtgagaatttcagaattgattcagtaacaatcagtaaacgaacattttgcctgcagtacactgttaggcactccatgtcctcaaacacaaggtctggccttgtacacaaacaaccagagaagtggcaagaatcaccacataatgtagaagaaaacctgagctgggccttacagggtggggaaggattaacaaggagaagaaaagaacagaatgagcaatcttatatggagttaaaaattggttatggtgtagaaaagctttttggaatttctgaagcaatttcagtgggtacccaaaatgaaagtcatatttcatcagtttttcttcaaagttaatttatgatttttttctctgaaattgttaggaaagtacctttcactaaaagtataattagattgtttgtaacacaaaggataaatgcttgagggaatgggtaccccatttttcatgatgtgattattatgcattgcatgcctgtgtcaaaacatctcatgtgccccataaatatgtacctactatgtacacacaaaaattaaaaattatttttaaaaaaacagaaatgagaggaaaacaaagtacctgtcactgtttattatcctgaatccattgtggcttttcaagacctaaaatcatataattttagcactatatggaacacttctcatcacattcttaacccagccccaacccctctccagataaagagaggttgaagtgatctgaagcagacattacagcataattagaactcacatacgatggattctactcaaaggtacttttgtattgcatttcattttacttgttgcagtcttgaatttgagtgtttgtatatatgttgaagctagatataagattcttcatgaatttattttaagttttattttctataactccatgttcttttttaagtctcttctttggtactcagtaacacatcaagaaaaaaaaggtgctttttaaaaagtccttatgaggccgggcgcggtggctcacgcctgtaatcccagcactttgggaggccgaggcgggcggatcacgaggtcaggagatcgagaccattctggctaacacggtgaaaccccgtctctactaaaaatacaaaaaattagccgggcgtggtagcgggcgcctgtagtcccagctactcgggaggctgaggcaggagaatggcgtgaacccgggaggcggagcttgcagtgagccgagatcgcgccactgcactccagcctgggcgacagagcgagactccgtctcaaaaaaaaaaaaaaaaaaaaaaaaaaaaaagtccttatgaaacccattttagtttctgtgtcctttgaaaggctttaatatatgaaatataaatatgtagacaagaatgtatataatgtataagttatgaaaataaaatgagcacttgtgaacccaccacccagcttaaggaatggaacattagcaatcccagtgggggttggtccctgtgtgttcctcgcctgtggccttccctgtcatttccccaccaaccctcagtgccatgttctgtcatatgtcatgtttccagatatcataaataccttttatctgattaagaagtcctcttcccactgggcacaggggctcacacctataatcccagcacgttaggaggctgaggcaggaggatcgcttgagcccaggagttcaagaccagcctgcacaacacgggcgagaccccgtctctacacaaattttttttaaaattagccatgcatggtgccgtgagcatgtggttccagctactgaggaggctgaggtgggaggattacttgagcccaggaggtcaaagctgcagtgagctgtgttggtgccattgcacaccagcctgggcaagagaacaagaccctgtctcaaaaaaaaaagaaagaaagaaaaagaaattctcttctcatacatggaatttaagtttgttaaatgtcttttttataagtagatgttaaatgttgtcaaatgctttttctgcatctgttgaggttttgtcctttaatctgttgatgtgattaattttattaatggaatttcctaatgtcagatgagtgacctttgcagtcatttgcaaagttggataaactaaactttttaaatggtttttattgcttctacactgccacattatatttgctaatataatttttagaaattttgacttttgtgtctttttatttttattttatttttttggaagtgaggttcagttgtaactttctttctcacactgtccttacatattgatttttactgccttcacagaatgggtcagaaagtttcttctttctttgtttaggataatttaagattggaaaaatccttatcttgaatgtttgatagaacttacctgtaaaaccctcctctgtgcttggtattttctataatgtataggaatttttgaaacttttttttaaagaatgtgttcatttttatagtattgtctccgatttcaaaatactatcttttactatttttcattttgggaggcaaattcttttttttaactaagttagatctctagcttataaattgtcagtgtttctggttttttcatatatatatttagaattaaatattttcctttaaatgctcttatagtcacatccccaagtattagcatgattcacgttaaaagtcagttcaagtactttctaatgtcccttttgttttcttctttgaccaatgagttatttagaagtgtttttcaaaacaaaagatttttaaaggttttgaaatcagtataaaaagtaattaagttatgatactgaaattttttttaactttgagatttgctttatagcttagtacataatcagttttcattagtgtcccatgaatgcttaaaaagaatgtgtattcttcatttgctaggcgtaaagtcacttatgtttagattaagcttgttttttatggagttcaagttttactgtgtgtgttttgttttgtttttttggtctccttttatataatttacagaagaatattaaaatatattactgtggggctgggcacagttgctcacacctgtaatcccagcactttgggaggccaaggtgggaggatttcttgaagccattaggtcagcctgggcaacataacaagatcccatctctacaaaaagtttaaaaattagccaagtgcaatatcatgtaactgtagtcccagctactcaggaggctactcaaggaggatcacttgagcccaggagtttgacgatacctccttgagcttttttactttatgtgtttatatgtacagcatataaattttgaattgttggccaggcacagtggcttatacctgcaatcccagtgctttgggaaactgtggagggaggatcacttgaggccaagaggtagagaccagcctgggaacgtagcaagaccctggctctacaaaatattttaaaattaactgggcatagttgtgtgtgcctgtagtcccagttactcgggaggctgagatggaaggatcgcttgagcccaggagtttgagggtacagtgagccatgatggtaccactgcactccagcctgggcaacagagcaagaccctgtctttaaaaacaaatctcactgtgatggtggatatgtcctttttccttgcagttttttgatttatctatttgtatgtacagcatataaattttgaatcgttggccaggcacagtggctcatgcctgtaatcccagcacttagggagactgaggcaagagggtcacttggggccaggagattgagagaagcctggtcaacatagtaagacccatttctacaaaaaaaaattagtttttaaaaaataaattttgaattgttgtattctgaattgaaccacttatcatattatctctttctctagtaattttttggaccctaaaatacattctctctgatattaatataggtaccttatttggggtagtttttgcctggttttctttttttatcctttaactttctgttttctctgtctctgtaaattagatatgtctcttataaatagcatttaattcatcctgacaatctgatttttttttaaatatcttaactggagagtaattcatttacatttattgtggttactgataagtttgctctcttatgttttatttctctttcttttctttcaagttttgagttgaataaatttattcttcattttattattttctttctggtttgggagttatatattaattactacttttagtaaatacctttgaaattttaacattcatgcccaacctagtaaagatctgtaccctcatcctgaacaatatttaaaacaaggagttttaagtcagtgcttttcatgcttgtgctattgttattataattttagtgccatcttgtttgtttgataattctataaattcactgtttctgtcactgaatgttttcagtgtgtagatttatttccctgtttatcactattccttattgcatcttgatccttctatcaagtaaaatttttcttcttccaaaaatacatgcttgaaaaacttatgtggtaagaatgtatggaaggtaaactcagtttttgcccatctaagaatgttattttggcctctatcttcaaattttgttggctagacaattctagactggcagttatttttcagcactttgaagatattgttctgctttcttctggctgctttttctgtctcctgttgattgtttcctagaatttgaatgtatacgttccatgttgaactcaatttgtgagcttcctcctatttcttatgctggggatttgttgtggttggaatttgttgtaacctgcatccaatctggaaattttttgtggattcacagttaatacatttctcccttccacccagagccactaacccaagagagacaaatttgtttcctgtctgcttttgtaggtcagattttttttttcctagttgagtgaccttttctctgagagtgaagcctttgctgagttttagctttaagcagaggtttctccagtcttacttccatcctacaaaggcccaaggctttatggtccattcctctgagtgcagcagcctgtgaaaacagtagctctaggccattggtgtttagttgaaattccgagggctgtcagcttaagcacttactagtttcctgatattgttttgtttctaatctcagagtatttcttagtttcttgcaagctcatcagtttttaataggtatcatgcgtgagtgaatataaatttttacatatatataagagaggatttattttgttgtttacaagagttttggggggatctctaagtctcttcttgccttttaatggaaacgttctcgtcattttttttaatcaaaaaatcacattttgtttctcctgtgacttcttcctgtaggtgagcagtaggtcatccagtcccagtgtcagaatgattactacctcaggaccaacctcagaaaagccaactcgaagtcatccatggacccctgatgattccacaggtgaccagtctgtttcttcatacttatgaagttgaatcagtcatgtttatattcatttggccatgtcattactctaatgtttacaaaggcaggcattatactgttgtttagatttttatattaaataaactatttagtaatacatgttaaaataccattttgaatacagagacagagactgccttgccttctgtattttttttaatccagatactaaacatgtattttaaagattgtctgtttggggtttttttccagttgcgaagcgtattgaattcttgatacttcagcctgtgattttcctactagattcatcctactagatgatagtagtaaagtcattttttcagtaaccaaaatcggagaatggtaaaaatcatccccatcatcttcatctcaatcttttaaggacacgagatgtcatgtaccttaagttgaaaaaaattctgaccattgaccttttgaattgtttttaactgataagagacaccattttcagttatacaaatattctattagacctttagaaacctgtgatgagttattaaagctccccaacatgaataactaactgttcacaatattagtattaatgtctacctgcctaaaggtagtgacggcatcgtttcattatgggcaaacaggaaatgatgtgccatagtagaattaacttttccctaactttaagagaataccttgataaatgcttttaagtgtacttatgaaattttttatttatattatattaagtcacgaagggaaagatgatctcttagcccttggaaaattaaagcatttgatattttatataagatcgactatgttattaatagtaacaattagattgaagtttaaaagccagctttctgtctttacaaactaaaatacaactcaagtatttatagttatctgatgtggtttggtcaagtttataatttaatttaaaaaattaactgggtggtttttctgtgtgtcatgtaagatagaactatgtttagccagggtgtactctctagttttagtaagtttaaatttagtggcggcaaaaactcctgtttcacccctagcacagcccaacctaggactgtccagagcattcaccactacgcagcacatgtgtagaattcattatagacttgctcctccccagtggtagacagggcaatgctcttgcccagttttatcattaacattcaggtgatagcagctctttttgatttctgaaccccctggcaagggagtacgttctctgacattacagcatttgcccgggtctggtactcaactcagcagagccttctgtcttcagtctacactaatctgtatatgccagtcaatagtgtggcagattgtgacttcatgggggtaaaataaaaaatgtttaaggctctctctcacataactgctacatttctgcctcatatgttgcttctaccttccaactcccgtcccattgttttctttttctgtacctagaaacaccacaaaataccaattgctagaaataatttgcaatatcagctgaattttgtctttgccttgaaatatattgcacatgtgtggctataattttgaatacattttaaaaatggatgctctggtttaagtttataattaattcagctgtgcagtatttgtaagaaaaatattgataaccaagctaatagaataaattagggaacagataggtaaagtctttttctttgaaggcccactgaccaaggaaaaaattaagagtgtaaatgtaagttaaagtgacctaattaaatttttttaatttgagaggtttttgtatattttcagagaaagctaaagagcataacaatttaataatcatagccgataataagcgctcttcagttcctatttataatataatgggtattcaaaaagacacacatactgagaggatctagtgagagagagatctagacgcagtagagggagccgcagagggggaaactcactaaagaattttcacctttgcttagtactttgcaaacatgtattaatataaagtgtaagacatggcccattccttgcagtctggttagagtcataatactgacacattaaaagtaaacttatactatataataacttactaaatttatagtacaagctgagtgttttgatagttgtaagagaaatcagttcaacaagacttggcatagtctctggccttttcataaaatgatgagacttttctttagccataaagcagaaaggagaaggcagcattccactgaagggaatgcatactcaaagaatatgagatagtaacaagtgttgtgtttgaggggtcagaaaagagagtttgccttaatttaaccaaaccaacatgagctttgacattcaggagaagcaattagatttgattagcaattgaaacacacacacacacacacacacacacacacgcaaaaaactttcattaaataatcttccgatctgtgaccaattattgctagtagagattggaagttcaatatcaatttagtgtaaagtgagaaagtgaaatcccacttctttttttagagagaagatgaaattcaatgaaggaccttaagttccccaccatacaagggctttaattatttgaataacacaatccttggactttttttctgctcccagaataccacgcaacactgatgtattaagcttaattctaaaatacatatcagatacagggtgctgatataatgagatatataatgtatcagtgatttaagaaagaataataggaatggaaatcttaaattgaaactttttcaagacacttaaatttttctagtaaatcaggaggaaatcagtcatttttaatcagttttagttttgtggaaagcagtgtttatgtgggagcgtagtttgaaaccactgttggggtgggagaagagttggtcagagaaataacaaattaagtatatttcttgtttagccacttcagaaaaacacacatttatgttagtactgtatatgagccttaagggtaagggtaagtgccttaagtctctactgtttttctgtattgccctgcaatatttaataaacattactttttcaatatggaattcatactatactattttaaattgttctttctaattctccatttagtatgaataataatgataactaccgtcatgtattgagtgcttaatatacgccaggatttgcatggtgttcctcacatgcactggctcatttggtctgatttcgctaattagcttttggagtttcttgagagcacgttctcagtggctttaaaaaaacaaaaacaaaagcaaaaagaaaaaaaaacacctggattatcagttgacaataaattagaagattactgagccagcaacccttcttgagtttttttggattgcatacagtgcgtctgctgtcttcctgacttgcctttatccacaccactccttcaaggagttattcgtcagaaaaaggctgaagagctcactcatttagctctttttttgtctactaacagtgggaaagcaactacttctgaagtagaaaagtctgtattgcttcagagttactctgtttacttctggaactgttctacataaccataaatgttgagaagagactgtcccacgcatctcagtcaagttgtatggcagttttacctcttttgaaatataaacaaaagcattctattcaaataattttataaaattgactgattgtttgaattaatcaacttaactgttttcggcatgacattgagccacaggtttcaacctcattttggttccttactgttcgtatttgtaatatactctcatcaccaacatctcgttttctgcagtgattcttactgggaagggcaggatgagtggtggaggtcacattataatctatataaattgaaaatgatccactggaagagaatgtgtctctgctttctccctttccctgttaaggaacattgatattagcggagttgatatagccttctataaaataaacttagcatgataaagaaaagagatggggagtttgattagatagggtcaattaagactgaatttaaaatataaaggtctcatcactgtttttgtttttaattaagagcttagaagctctaatatattgtgttctattcagtttatagccaacttaaattataggtatgagaatataattgcattctaatatctgataattgaatatcctttttttaacctttagaattcagaaatagactcttcaattaccaatagctgtaacttttaatttacatattatttactttagggaaaaaaagcatttcattcatgctttcttgctgttcgtttataattatttgtgacagaaaatcaataaaatacatgcttgaattccagataccaatggatcagataactccatcccaatggcttatcttacactggatcaccaactacaggtaaaggagtactttcttattgaaagttgacttttttcttcttagagagtttaagttgacaattgtgttgctacctgtcattgtatagtcactccttaatttatccttttagttggcctccttaaactttttagaatcaaatcaaaataattcttttggttaagttaatcaaactttaaattggcagaatcatattcttatcttttcagtcatcttaaaatcctccagtatctttctttagtactgctaagcattacattttcactctttaattttagtgcattaaaacaaaactcataagcttatttctatttaatacatttgtgatacattctcatgttcatagtgactgaaaatgtaaataatatacttcagtgccccctcatgagtatgagggctataaacatcatttagtttgagcctgtttgcagcctgaaatgtcataccagagactacaactccaacaatcatgattctctgtaacagactgttaaaacagcaagaatagatttaaatgctgagttaattctgacaaaaggacactgagattttctagggcatggtttaacacttatttttaaaagatcattgctttagtgctataaaaatatatcacagtctctgtcttgactctcatcttagctagatattgaaatttgatttaattatgttttaacattcctgattattttcagcctctagcaccgtgcccaaactccaaagaatctatggcagtgtttgaacagcattgtaaaatggcacaagaatatatgaaagttcaaacagaaattgcattgttattacagagaaagtaagttattttttatgaataaaaataaaaatacattagtattttgagtttaaaatatgataaggtgcaatgaaaacgtagtttttagaattagtcattaagtatactttcaacttgtttaagctttaagcacccttttactaaaaattttttatgcaaaactcaatccttttgactatcatattagtgctatggaaaataaactggtgctttatacttgttgttttatgttctcagagctgtttagacttattattataaagatttattgttttcttgtaaatagataaaataatttgatttattaacattcagttgtgccttatcttagaaacatttttgtagatacattttttccaggtgtatgtttagaattggattacttattaaaagactgtatttcataactgagtgtttttctgaggagttatagaaactgccttcctccctttttaaagaaacacagcctaatttccttactactgcattcacagttcttaaatatgtatgtatcttcagttttcttaagcatgacctccatgaaattttatacttaggtaactgaattgttggtggtaactaaaatgaagtgataaggaaaaaattttggcaactttatatatgtatgataataggattcccttcattaattttaatctaaataaatgaaagttgtttttttctgaatttgcgaaaagctttctgtatgtacttcaaaaaaaagagagaaaaaattgttttatcataatttattgatacagtgatttaaatggaaccaacctggtatttgaaaggtaagcctaaataggaaattaaatactacagtttggaaatcgtagaagtaattatcaaactgctggcacttttatgttgaaaaagcttgatttcttatttcacttatttaacctatacttttgccatactttaatcatttgaaagaagtattctatgctggaaaaaacaaatggtggattagggtgttggctgtgaaaactatgacagttttaatcaattttaaatactttcagaagtagtattagttagttattttgcttgaggactttttattaattattcatttatatccagtaacctcactttaggaaatgcctaaagatgcatctttttcgggaatacttaatagttcccaaataagagggacttaaataagtttatcagactataaaagaatgagggtctttcctgaaagtgcttgcaaatgtaagtgttttaaaagaagtggtactttgtcatttttctcactgctttaaaatgggaaaaagctttaaattggatagcatttattttaattagattgcaaatttgctattagcttaccactctctgctatagttaagtaggattgtgacttcagaatgtgaatcagtataaaagtagaatgtgaaggataaaaacttcatgatattttcccatagccacatagaacccttcccagccttttttcatccttcctacacaaaaagaggatagaaaatgaaattttctgaaacttttattttaccattttatctgcttcgctaattatccaagtacagttacttaataaaaggattatgttatttgtatgattacactagaagtagatgagagttccatcccagcccataattatatttgattagtgtacctaagatgcaaaatgataaaccaagaataaaaattctcattaattgagcttccatcatcagctactaaggtatgaatttttccatcatgtgtaatattatgtggtatttgtttgtaggcaagaactagttgcagaactggaccaggatgaaaaggaccagcaaaatacatctcgcctggtacaggaacataaaaagcttttagatgaaaacaaaagcctttctacttactaccagcaatgcaaaaaacaactagaggtcatcagaagtcagcagcagaaacgacaaggcacttcatgattctctgggaccgttacattttgaaatatgcaaagaaagactttttttttaaggaaaggaaaaccttataatgacgattcatgagtgttagctttttggcgtgttctgaatgccaactgcctatatttgctgcatttttttcattgtttattttccttttctcatggtggacatacaattttactgtttcattgcataacatggtagcatctgtgacttgaatgagcagcactttgcaacttcaaaacagatgcagtgaactgtggctgtatatgcatgctcattgtgtgaaggctagcctaacagaacaggaggtatcaaactagctgctatgtgcaaacagcgtccattttttcatattagaggtggaacctcaagaatgactttattcttgtatctcatctcaaaatattaataatttttttcccaaaagatggtatataccaagttaaagacagggtattataaatttagagtgattggtggtatattacggaaatacggaacctttagggatagttccgtgtaagggctttgatgccagcatccttggatcagtactgaactcagttccatccgtaaaatatgtaaaggtaagtggcagctgctctatttaatgaaagcagttttaccggattttgttagactaaaatttgattgtgatacattgaacaaaatggaactcatttttttttaaggagtaaagatttttaattctgtgattgtgtgtatgtgtgttgaaactgtaaagcttttatgactctaatattaatctcttaaatgaaattaaaaggcaaaagaacatgattgagcttaaatgatcatttcttcctgcagtgattcttggattgttttctcatgtatttgaaaaaaaaaaaatgaagaaaaataatggaaaatggaagtaattactccagctaaaaaaagcttggacttagatttctttttatgataccaaatgagaaataaaccaggcaaatcagaaggaagttaaagaagcaaatataaattcaacaagtgtcctaattatcctggatattggaatatttgattttccttacaatcccgttctagaatgcctgccgcctttcaacactttcaagagaatttcaacacttacagagtatttatattgttaacagtaattttgctaccaaaaccttcagaataactttaataataaaatgacactgaaataatagactatacaaactctatattttttcagttggtgttaaaataagtcacattttgataccagtacaagatgtcttttaaataaggatgtcatcagtctgatttttatagcattaatgttttatgaagaaaaagttcaaaatgaaagcattaattgctgtgattattagaattctatcatgactgtattgtagtttttgctctatttcagataagcaagatctaagaagttatcaaaactattctttaaaatgctaaagcaggtaactttttcttccattattttttcctcctaccactgagttttgtaatgaattccttgtgtatacaagcaatacaggtgaatactaaactgttatttttagcttcttcaaaagctattttagaaagcttcctggaaataaatgtcttctgtcatttaatttaaataaaaggagtgttaattgttcccaaatttgattacctagctgaaacagatattggattcagcatagtaatagtaaaataaaattggcagagaaaataactgtagactaggataaagcatgactcctccatagcattgttgcttgtatgtacatctgtcactccactgaaagggacctagtcactttaaagaggccttttatctcagcacgagatatccaagcgtgaatgctaaggcttgatgtttccattaggatttagcattcgagatttcagattttatttatagtcattgatgtgttttgctgtattataacacatttaagggaaattttattatggtttttacatgtagtcatttcataaaaatatccagataggtaaatggaagaaaatagtagattttagtcatggtaccaaatgcaagaggctgttgaacagttgcttgtttgtttacagtaagttccttgagattttcagtactgtagttgccctggacattgagtacagttcagccttactctgtttttaagtagttgtgttgtcaatttcatgcttttaagtcctgatgatccttggagatgggagaaaaagataccagggataattaaaatccacagccagtttcatcagtttcctcatccatcctgcaaataaaaatgttaacaaggagccaaacttattcgttctggttttacaatttattttgaccgttttttgggtgaaaattgcaaacagccaagcaagtggctggaatgccccagtctaagaaattcaaaaacaatcactgagtaagccctaattacattaattacattttactcttgactccaggaaaagaaagcaagcttttatctaatctagagggaagtattcgtgagcaataaaaatcacttttttgagttgaataataatcagttaagaatatttaccgcatagcaacacaacatataaagatttgttacaagttgtttacggatgtttgactatttttgctgaagtattttagagtattgaatgtcttctctcttcaagtttctttcatgttcctaatttcagctcctgtagccagagatcacaggtcttccctgtgaaactttggtttctttctataaatgtgtgtggttttcagcgctcaactcctgtcttcaaatggtagtaagttctacttctacttctgtcattcagaacattttatgtcaaatgatgtaatgcagaaattcttgtgcatatttgtaactgaaggaagctttttagatttatttttgtttttaataaaattcagattcctattctaaactggta
